United States Patent Application Publication US 2018/0126003 A1 - sequence listing, part 106

SEQ ID NO: 187575 - DNA, 2424 bp, Artificial Sequence
  derived and/or modified sequence
atgagcaagctgtccttccgggcccgggccctggatgctgccaagcccctgcccatctaccggggcaaggacatgccagacctgaatgactgtgtgtccatcaacagagctgtgccccagatgcccaccggcatggagaaggaggaggagagcgagcaccacctgcagagggccatcagcgcccagcaggtgttccgggagaagaaggagagcatggtgattcctgtgcctgaggccgagagcaatgtgaactactacaacagactctacaagggggagttcaagcagcccaagcagttcatccacatccagcccttcaacctggacaatgagcagcctgactatgacatggattctgaagatgagaccctgctgaaccggctgaacaggaagatggagatcaagcccctgcagtttgagatcatgattgaccggctggagaaggccagcagcaaccagctggtgaccctgcaggaggccaagctgctgctgaatgaagatgactacctgatcaaggctgtgtatgactactgggtgaggaagaggaagaactgccggggccccagcctcatcccccagatcaagcaggagaagagagatggcagcaccaacaatgacccctacgtggccttcagaagaagaacagagaagatgcagaccaggaagaacaggaagaatgatgaggccagctatgagaagatgctgaagctgcggcgggagttcagccgggccatcaccatcctggagatgatcaagagaagagagaagaccaagcgggagctgctgcacctgaccctggaggtggtggagaagcgctaccacctgggggactatggaggagagatcctgaatgaggtgaagatcagccgctctgagaaggagctgtatgccaccccagccaccctgcacaacggcaaccaccacaaggtgcaggagtgcaagaccaagcacccccaccacctgagcctgaaggaggaggccagtgatgtggtgcggcagaagaagaagtaccccaagaagcccaaggccgaggccctgatcaccagccagcagcccaccccagagaccctgcccgtcatcaacaagagtgacatcaagcagtatgacttccacagcagtgatgaagatgagttcccccaggtgctgagccctgtgtctgagcctgaggaggagaatgaccctgatggcccctgtgccttcagaagaagagctggctgccagtactatgccccccggctggaccaggccaaccacagctgtgaaaattctgagctggccgacctggacaagctgcgctaccgccactgcctgaccaccctgactgtgccccggcgctgcattggatttgcccggcggcgcatcggccggggcggccgggtcatcatggaccgcatcagcacagaacatgaccctgtgctgaagcagattgatcctgagatgctgaacagcttcagcagcagcagccagaccatcgacttcagcagcaacttcagcaggaccaatgccagcagcaagcactgtgagaaccggctgagcctgtctgagatcctgagcaacatccgcagctgccgcctgcagtgcttccagccccggctgctgaacctgcaggacagcgacagcgaggagtgcaccagcaggaagccaggccagacagtgaacaacaagagggtgtctgctgcctctgtggccctgctgaacaccagcaagaatggcatctctgtgactggaggcatcacagaggagcagttccagacccaccagcagcagctggtgcagatgcagaggcagcagctggcccagctgcagcagaagcagcagagccagcacagcagccagcagacccaccccaaggcccagggcagcagcaccagtgactgcatgagcaagaccctggacagcgccagcgcccactttgctgccagcgctgtggtgtctgcccctgtgcccagccgctctgaggtggccaaggagcagaacacaggccacaacaacatcaacggggtggtgcagcccagcggcaccagcaagaccctgtacagcaccaacatggccctgagcagcagccctggcatctctgctgtgcagctggtgaggacagtgggccacaccaccaccaaccacctgatcccagccctgtgcaccagcagcccccagaccctgcccatgaacaacagctgcctgaccaatgctgtgcacctgaacaacgtgtctgtggtgtcccctgtgaatgtgcacatcaacaccaggaccagcgcccccagccccacagccctgaagctggccaccgtggccgcctccatggacagagtgcccaaggtgacccccagcagcgccatcagcagcatcgccagagaaaatcatgagcctgagcggctgggcctgaatggaattgctgagaccaccgtggccatggaggtgacctag

SEQ ID NO: 187576 - DNA, 2424 bp, Artificial Sequence
  derived and/or modified sequence
atgagcaagctgagcttccgggcccgggccctggacgccgccaagccgctgcccatatatagaggcaaggacatgcccgatctcaatgattgcgtttccattaatagagctgtccctcaaatgccaaccggcatggaaaaagaggaagaatctgaacaccatcttcagagggctatcagcgcacaacaggtattccgtgagaaaaaagaaagcatggtgatccccgtccccgaggccgaaagcaacgtcaactactataatcggctatataaaggtgagtttaaacagccgaagcagttcattcatatccagccattcaatttggataatgagcagcccgattacgacatggatagcgaagacgaaacactgctgaaccgattgaaccgcaaaatggagatcaaaccactacagtttgaaattatgatcgaccgattggagaaggcctcttccaaccaactggtcaccttgcaggaggcaaagttgcttctgaatgaagacgactatctaattaaagccgtgtacgactattgggtgcggaagaggaaaaactgtcgggggccttctttgatcccacaaattaagcaggagaagcgtgacgggtccactaataacgatccgtacgtcgcctttcgccgtcgtacggaaaagatgcagaccaggaaaaatagaaagaacgacgaggctagctacgaaaagatgctgaagctccgtcgagaattctctcgtgcgataactatcctcgaaatgatcaagcgccgcgagaaaactaaaagggaactgttgcacctgactttggaggttgtagagaagcgctaccacctcggcgattatggcggcgagatcctgaacgaagtcaagatttctagatcggaaaaggaactatatgccacaccggctacactccacaacggaaaccaccataaggttcaagagtgcaaaaccaaacacccccaccatctttcattgaaagaagaagctagcgatgtcgtcaggcagaaaaagaaataccctaagaagcccaaggccgaggcactaatcacctcccagcagcccaccccagaaaccctgcctgtgattaataagtcagacataaagcagtacgattttcatagctctgacgaagacgagtttcctcaagtgttaagtccagtcagcgagccggaagaggagaatgaccctgatgggccctgtgcgtttcggcgcagggcaggctgtcagtactatgcccctcggcttgaccaggctaaccactcctgcgagaatagcgaattagccgatctggacaagctgcgctatcgacactgcctgactaccctcacggttcctaggcgatgtatcggttttgcccgacgaaggattgggcgtggggggagagtgatcatggaccgtatctccaccgagcacgatccagtgctaaaacaaattgacccagaaatgcttaattccttttcatcttcaagtcagacaatagacttctcctcaaactttagtcggaccaatgcctccagcaagcactgtgaaaacagactgtctctgtctgaaatactgagcaatatccggagttgccgactgcaatgttttcagcctagattgctgaatctccaggactcagacagcgaggagtgcacgagccgaaagccgggtcagacagttaacaataagagagtgagtgccgcttctgtggccttactgaatacttcaaaaaatggcatctccgtcactggaggcataaccgaagagcagtttcagacacaccagcagcagcttgtccagatgcaacggcagcagctggcccagttgcaacagaaacaacaatctcaacactcctctcagcaaactcaccccaaggcccagggtagcagtacatcagactgcatgtcgaaaaccctggactccgcctccgcccactttgcggcctccgctgtggtgtctgctcccgtaccctcccgttccgaggtcgccaaagaacagaatacaggccataataacattaatggcgtggtgcagcctagcgggacctccaaaacattgtacagcacaaatatggccctttccagctcacctgggatttctgcagtacaactcgtaaggacagtggggcatactactaccaaccacctgatccccgctttatgcacctcatcacctcagacacttcctatgaacaatagttgtctaaccaatgccgtgcacttaaataatgtatctgttgtgtctcccgtgaatgtgcacattaatacacgcacctctgcgccctctcctactgcccttaaactcgccaccgtagctgcttcaatggaccgcgtcccgaaagttacaccaagctccgccatttcttcaattgcccgggaaaaccacgagcccgaacggctgggattgaacggcatcgcagagacgaccgtggccatggaagtgacatag

SEQ ID NO: 187577 - DNA, 2424 bp, Artificial Sequence
  derived and/or modified sequence
atgagcaagctgtccttccgagctagggcactagacgccgcaaaaccgctgcccatttatcgcggaaaggatatgcctgacctaaacgattgcgtgtctatcaatagagcagttccacaaatgcctaccgggatggaaaaagaagaagaatcggagcaccacctccagcgggcaatttccgcccagcaagttttccgcgagaagaaggaatcaatggtcattccagtgccagaagctgaatccaacgtcaattattacaacaggctgtacaaaggggagttcaaacaacccaaacaatttatccacatacagcccttcaatttggacaatgagcagcccgattatgacatggacagcgaagatgagactctgttaaatcgtttaaatagaaaaatggaaataaagcctctacagtttgaaatcatgattgacagactggagaaagctagtagcaatcagctggtgaccctgcaggaagcaaaactgctgctcaatgaagacgattatctcattaaagcagtttatgactactgggtgcgcaaacgcaagaattgccgtggcccatcactgatccctcaaatcaagcaagagaaacgtgatgggtccacaaacaatgacccctacgtggcctttcgccgacgaacggaaaagatgcaaacaagaaaaaatagaaagaatgatgaggcttcctacgaaaaaatgttgaagctccggagagagtttagcagagcgataactattttagaaatgatcaaaagaagagaaaagactaaaagagagctgctccacttaacactcgaagtggtggaaaaacgataccacctcggtgattacggcggagagattctgaatgaagtcaagatttctaggagcgaaaaggagctttacgcaacccctgctactttgcacaatggcaatcatcacaaagtacaggagtgcaagaccaaacatccccaccatttaagtctcaaggaggaggctagtgacgtagtgcgacagaagaaaaaatacccaaaaaagcccaaggctgaggctttgattacctcccagcaaccaacaccggaaaccctcccggtcatcaacaaatcagacatcaaacagtacgactttcacagtagcgacgaggatgagtttccacaagtgctcagcccggtctctgaacccgaagaagaaaatgaccccgacggcccatgcgcgttccgtcgacgagcaggctgccagtattacgccccaaggttagaccaggccaaccactcctgtgagaattcagagctcgcagacttggataagctaaggtacagacattgccttaccactttaaccgtcccaagaagatgcattggctttgcaagaagacgtattgggagggggggtagggtgatcatggacaggatcagtacagaacacgaccccgtgttgaaacaaatcgacccagagatgctcaactctttctcctcctccagtcagacaatagacttttcttctaatttctctcggactaacgcaagctctaagcactgtgaaaatagattatctctctccgagattctgtccaatatacgatcttgcagacttcagtgctttcagccaaggttgctaaacctgcaagactccgactcggaagagtgcacatcccgcaagcccggacagaccgtgaacaacaaacgggtgagcgccgcatcagtggccctgctaaacaccagtaaaaacggcatcagtgttacgggcggaattacggaggagcagtttcagacacatcagcagcagctggtccagatgcaacgccaacagttggctcagttgcagcaaaagcagcagtctcaacattccagtcagcaaacgcaccctaaagctcaaggatcatctacttcagactgtatgtcaaagacacttgacagcgcctccgctcatttcgctgcatctgcagtagtttctgccccagtgccctctaggtccgaagtcgccaaggagcagaataccggccacaacaacataaatggcgtggtccagccaagcgggaccagtaagaccctgtactctactaatatggcattatcctcttcacccggtatttccgccgtgcagctggtgagaactgttggacacaccaccacaaatcacttaataccagcactgtgcacctcaagtccacaaacgctccctatgaacaatagttgtcttactaacgcagtgcacctgaataatgtttccgtggtgtcccccgttaatgttcatattaacacccggacttctgccccaagtcctaccgcactgaagttggccactgtggcggctagtatggaccgcgttcctaaagtcaccccttcatctgccatatcctctatcgccagggaaaaccacgagccagagcggttaggtttaaatggtatagctgaaaccacggtggctatggaagtaacctag

SEQ ID NO: 187578 - DNA, 2424 bp, Artificial Sequence
  derived and/or modified sequence
atgagcaagctgagcttcagagccagagccctggacgccgccaagcccctgcccatctacagaggcaaggacatgcccgacctgaacgactgcgtgagcatcaacagagccgtgccccagatgcccaccggcatggagaaggaggaggagagcgagcaccacctgcagagagccatcagcgcccagcaggtgttcagagagaagaaggagagcatggtgatccccgtgcccgaggccgagagcaacgtgaactactacaacagactgtacaagggcgagttcaagcagcccaagcagttcatccacatccagcccttcaacctggacaacgagcagcccgactacgacatggacagcgaggacgagaccctgctgaacagactgaacagaaagatggagatcaagcccctgcagttcgagatcatgatcgacagactggagaaggccagcagcaaccagctggtgaccctgcaggaggccaagctgctgctgaacgaggacgactacctgatcaaggccgtgtacgactactgggtgagaaagagaaagaactgcagaggccccagcctgatcccccagatcaagcaggagaagagagacggcagcaccaacaacgacccctacgtggccttcagaagaagaaccgagaagatgcagaccagaaagaacagaaagaacgacgaggccagctacgagaagatgctgaagctgagaagagagttcagcagagccatcaccatcctggagatgatcaagagaagagagaagaccaagagagagctgctgcacctgaccctggaggtggtggagaagagataccacctgggcgactacggcggcgagatcctgaacgaggtgaagatcagcagaagcgagaaggagctgtacgccacccccgccaccctgcacaacggcaaccaccacaaggtgcaggagtgcaagaccaagcacccccaccacctgagcctgaaggaggaggccagcgacgtggtgagacagaagaagaagtaccccaagaagcccaaggccgaggccctgatcaccagccagcagcccacccccgagaccctgcccgtgatcaacaagagcgacatcaagcagtacgacttccacagcagcgacgaggacgagttcccccaggtgctgagccccgtgagcgagcccgaggaggagaacgaccccgacggcccctgcgccttcagaagaagagccggctgccagtactacgcccccagactggaccaggccaaccacagctgcgagaacagcgagctggccgacctggacaagctgagatacagacactgcctgaccaccctgaccgtgcccagaagatgcatcggcttcgccagaagaagaatcggcagaggcggcagagtgatcatggacagaatcagcaccgagcacgaccccgtgctgaagcagatcgaccccgagatgctgaacagcttcagcagcagcagccagaccatcgacttcagcagcaacttcagcagaaccaacgccagcagcaagcactgcgagaacagactgagcctgagcgagatcctgagcaacatcagaagctgcagactgcagtgcttccagcccagactgctgaacctgcaggacagcgacagcgaggagtgcaccagcagaaagcccggccagaccgtgaacaacaagagagtgagcgccgccagcgtggccctgctgaacaccagcaagaacggcatcagcgtgaccggcggcatcaccgaggagcagttccagacccaccagcagcagctggtgcagatgcagagacagcagctggcccagctgcagcagaagcagcagagccagcacagcagccagcagacccaccccaaggcccagggcagcagcaccagcgactgcatgagcaagaccctggacagcgccagcgcccacttcgccgccagcgccgtggtgagcgcccccgtgcccagcagaagcgaggtggccaaggagcagaacaccggccacaacaacatcaacggcgtggtgcagcccagcggcaccagcaagaccctgtacagcaccaacatggccctgagcagcagccccggcatcagcgccgtgcagctggtgagaaccgtgggccacaccaccaccaaccacctgatccccgccctgtgcaccagcagcccccagaccctgcccatgaacaacagctgcctgaccaacgccgtgcacctgaacaacgtgagcgtggtgagccccgtgaacgtgcacatcaacaccagaaccagcgcccccagccccaccgccctgaagctggccaccgtggccgccagcatggacagagtgcccaaggtgacccccagcagcgccatcagcagcatcgccagagagaaccacgagcccgagagactgggcctgaacggcatcgccgagaccaccgtggccatggaggtgacctag

SEQ ID NO: 187579 - DNA, 3642 bp, Artificial Sequence
  derived and/or modified sequence
gccgcccgggctgttcctgtaaggcggggagacaatgagtaaactctccttccgagcgcgggcgctggacgccgccaagccgctgcctatctaccgcggcaaggacatgcctgatctcaacgactgcgtctccatcaaccgggccgtgccccagatgcccaccgggatggagaaggaggaggaatcggaacatcatttacagcgagcaatttcagcacagcaagtgtttagagaaaaaaaagagagtatggtcattcctgttcctgaggcagagagcaacgtcaactattacaatcgcttgtacaaaggagagtttaaacagccaaaacagttcattcatattcagccttttaatctagacaacgagcaaccagattatgatatggattcagaagatgagactttattaaatagacttaacagaaagatggaaattaagcctttgcaatttgaaattatgattgacagacttgaaaaagccagttctaatcagcttgtaacacttcaagaagcaaaactgctgctaaacgaagatgattaccttattaaagctgtatatgactactgggtgagaaaacgtaaaaactgcagggggccatccctcattcctcagataaaacaagagaaaagagatggctctaccaacaatgacccttatgttgcctttcggagaagaacagagaaaatgcaaactcgaaagaatcgtaagaatgatgaagcctcttatgaaaagatgttgaaactgagacgagaatttagtagagccataacaattttggaaatgattaagagaagagagaaaacaaaacgagaattattgcacttaaccttagaagttgtggagaaaagataccatttgggagactatggtggtgaaatccttaatgaagtaaaaatcagtagatcagaaaaagagttatatgccactccagcaactcttcataatggaaatcatcacaaagttcaagaatgtaaaactaagcaccctcatcatttgtctttgaaagaagaggcttctgatgtggttcgtcaaaagaagaagtacccaaagaagcctaaagcagaggctttgataacatctcagcaacccactcctgagacattgcctgtgatcaataagagtgacattaagcaatatgattttcacagctcagatgaagatgaatttccacaggtattgtccccagtatcagaaccggaagaagaaaatgatcctgatggtccctgtgctttcagaaggcgggcaggatgccagtattatgctcctcgtttggaccaagctaaccattcatgtgaaaattcagaattggcagatttggataagttgaggtataggcattgccttacaacacttacagtcccaagaagatgtataggatttgcaaggaggcgaattggcagaggtggaagggtcataatggaccgaatatccacagaacatgacccagtcctgaaacagatagaccctgaaatgctgaatagtttttcaagctcttcccaaactatagacttttcttctaatttctctcggaccaatgcttccagtaaacattgtgaaaatagactgtctctttctgaaatattaagcaatatcagatcatgtcgactacagtgtttccagccaaggctactaaatttacaggacagtgatagtgaagaatgtacctcaagaaaaccagggcagactgtgaacaataaaagagtttctgcagcatctgtagctttattgaacaccagcaagaatggcatatcagtaacagggggtatcacagaagagcagtttcagacacatcagcagcagttagttcagatgcaaaggcagcaacttgcccagcttcagcagaaacagcaatctcagcattcctcgcaacagacacatccaaaagcacagggctcaagcacctctgactgtatgtctaaaacacttgactcagccagcgcccactttgctgcatctgcagtggtcagtgcacctgttccaagtcgcagtgaggtagccaaggaacagaacactggccacaacaacataaacggtgttgtccagccttcaggaacctctaaaacattatactccaccaatatggctttatcatccagcccagggatttcagctgtacagcttgtaaggacagttggccacaccactacaaaccacttaatcccagcattgtgcacaagcagtcctcagacacttcccatgaacaattcctgcctgacaaatgcagtgcacctcaataatgtcagtgttgtttctccagtcaatgtgcatatcaatacacggacttcagcaccatcgccaacagccttaaaacttgccacagttgctgccagtatggacagagtgccaaaggttactcccagcagtgccatcagcagcatagcaagagagaaccacgaaccagaaagattgggcttaaatggaatagcagagacaacagtagctatggaagtgacataacctaaaacacgtggctctgacctgtgctgatggtgtgcagtcattcatattccagctgaatgcaaaaggcaacactctgtggatcacagagtgtaacaatggacctaaatggactatagtatattggatgttaaatccatatatgatgtatattttgtaaaattgggaaaatcactaccttgtaaaatagtttatttgtatcatcaatattatttctgttacttgaatagtagatattcatcatcatgcttttgcacttgaatttgcaactgaatggattttaaaaaataattctttaatgggatcatgagcatgaaatgggatcctgcatcacttgttttaactatttattttgccatgtttacattttgtatcttgtaaaaataaatccaactttgtgtctaaaaagttaaagattcatagctaggaaatgaaattcttgtaatttttttctaaaggaactgtaaagttttcacttggttcattttgtttcacaatttgactagatggactttttggtaaatactttagtggcatttcactgtcaaatatgaagttcaaggcaaaatagtattttctattactgtgcaggggaaagggatggatcgatacatgcaaatttaatgtagtaactcacttttccatatattttgaatgtatatttctatttatgataccaatttataaaaaataattacacagaaaaaatggaataggaaaaattatgcatctagcacatttaaactgtgcaaatatgaaaatttttcgaggattacattttatctgaaggctgcatattttaactggctttaaaactgtaacacatcacataaaagatactttaccaggtatgtattgcattatatcattgcaataattattggaagtctagatatcgagccatcccaggtgttgggcggggggagggttgtggcaagattgtcttttcaattttggagagttttcctgtggctacaaggcaagtaacgggttggaaaaagtctgactgtaagcgttggacaccttcatagtgtagtgttttagtgactttttttatacggttcttgtaaattagatacgtgtagtggtgtttcagaatgtttgtttatgcactagttcagacaactttccctgttacttgttcttgataagtgaaaactgcagggaaataaaaaatacatatc

SEQ ID NO: 187580 - protein, 607 aa, Artificial Sequence
  derived and/or modified sequence
MRTPQLALLQVFFLVFPDGVRPQPSSSPSGAVPTSLELQRGTDGGTLQSPSEATATRPAVPGLPTVVPTLVTPSAPGNRTVDLFPVLPICVCDLTPGACDINCCCDRDCYLLHPRTVFSFCLPGSVRSSSWVCVDNSVIFRSNSPFPSRVFMDSNGIRQFCVHVNNSNLNYFQKLQKVNATNFQALAAEFGGESFTSTFQTQSPPSFYRAGDPILTYFPKWSVISLLRQPAGVGAGGLCAESNPAGFLESKSTTCTRFFKNLASSCTLDSALNAASYYNFTVLKVPRSMTDPQNMEFQVPVILTSQANAPLLAGNTCQNVVSQVTYEIETNGTFGIQKVSVSLGQTNLTVEPGASLQQHFILRFRAFQQSTAASLTSPRSGNPGYIVGKPLLALTDDISYSMTLLQSQGNGSCSVKRHEVQFGVNAISGCKLRLKKADCSHLQQEIYQTLHGRPRPEYVAIFGNADPAQKGGWTRILNRHCSISAINCTSCCLIPVSLEIQVLWAYVGLLSNPQAHVSGVRFLYQCQSIQDSQQVTEVSLTTLVNFVDITQKPQPPRGQPKMDWKWPFDFFPFKVAFSRGVFSQKCSVSPILILCLLLLGVLNLETM

SEQ ID NO: 187581 - protein, 443 aa, Artificial Sequence
  derived and/or modified sequence
MRTPQLALLQVFFLVFPDGVRPQPSSSPSGAVPTSLELQRGTDGGTLQSPSEATATRPAVPGLPTVVPTLVTPSAPGNRTVDLFPVLPICVCDLTPGACDINCCCDRDCYLLHPRTVFSFCLPGSVRSSSWVCVDNSVIFRSNSPFPSRVFMDSNGIRQFCVHVNNSNLNYFQKLQKVNATNFQALAAEFGGESFTSTFQTQSPPSFYRAGDPILTYFPKWSVISLLRQPAGVGAGGLCAESNPAGFLESKSTTCTRFFKNLASSCTLDSALNAASYYNFTVLKVPRSMTDPQNMEFQVPVILTSQANAPLLAGNTCQNVVSQVTYEIETNGTFGIQKVSVSLGQTNLTVEPGASLQQHFILRFRAFQQSTAASLTSPRSGNPGYIVGKPLLALTDDISYSVSFLELGGLLQPNEKSCKGFQTYVRLAKGEEFFVHYNEVLIY

SEQ ID NO: 187582 - protein, 625 aa, Artificial Sequence
  derived and/or modified sequence
MRLETAEAYVGPGGPECPMRTPQLALLQVFFLVFPDGVRPQPSSSPSGAVPTSLELQRGTDGGTLQSPSEATATRPAVPGLPTVVPTLVTPSAPGNRTVDLFPVLPICVCDLTPGACDINCCCDRDCYLLHPRTVFSFCLPGSVRSSSWVCVDNSVIFRSNSPFPSRVFMDSNGIRQFCVHVNNSNLNYFQKLQKVNATNFQALAAEFGGESFTSTFQTQSPPSFYRAGDPILTYFPKWSVISLLRQPAGVGAGGLCAESNPAGFLESKSTTCTRFFKNLASSCTLDSALNAASYYNFTVLKVPRSMTDPQNMEFQVPVILTSQANAPLLAGNTCQNVVSQVTYEIETNGTFGIQKVSVSLGQTNLTVEPGASLQQHFILRFRAFQQSTAASLTSPRSGNPGYIVGKPLLALTDDISYSMTLLQSQGNGSCSVKRHEVQFGVNAISGCKLRLKKADCSHLQQEIYQTLHGRPRPEYVAIFGNADPAQKGGWTRILNRHCSISAINCTSCCLIPVSLEIQVLWAYVGLLSNPQAHVSGVRFLYQCQSIQDSQQVTEVSLTTLVNFVDITQKPQPPRGQPKMDWKWPFDFFPFKVAFSRGVFSQKCSVSPILILCLLLLGVLNLETM

SEQ ID NO: 187583 - DNA, 1824 bp, Artificial Sequence
  derived and/or modified sequence
atgagaaccccccagctggccctgctgcaggtgttcttcctggtgttccccgacggcgtgagaccccagcccagcagcagccccagcggcgccgtgcccaccagcctggagctgcagagaggcaccgacggcggcaccctgcagagccccagcgaggccaccgccaccagacccgccgtgcccggcctgcccaccgtggtgcccaccctggtgacccccagcgcccccggcaacagaaccgtggacctgttccccgtgctgcccatctgcgtgtgcgacctgacccccggcgcctgcgacatcaactgctgctgcgacagagactgctacctgctgcaccccagaaccgtgttcagcttctgcctgcccggcagcgtgagaagcagcagctgggtgtgcgtggacaacagcgtgatcttcagaagcaacagccccttccccagcagagtgttcatggacagcaacggcatcagacagttctgcgtgcacgtgaacaacagcaacctgaactacttccagaagctgcagaaggtgaacgccaccaacttccaggccctggccgccgagttcggcggcgagagcttcaccagcaccttccagacccagagcccccccagcttctacagagccggcgaccccatcctgacctacttccccaagtggagcgtgatcagcctgctgagacagcccgccggcgtgggcgccggcggcctgtgcgccgagagcaaccccgccggcttcctggagagcaagagcaccacctgcaccagattcttcaagaacctggccagcagctgcaccctggacagcgccctgaacgccgccagctactacaacttcaccgtgctgaaggtgcccagaagcatgaccgacccccagaacatggagttccaggtgcccgtgatcctgaccagccaggccaacgcccccctgctggccggcaacacctgccagaacgtggtgagccaggtgacctacgagatcgagaccaacggcaccttcggcatccagaaggtgagcgtgagcctgggccagaccaacctgaccgtggagcccggcgccagcctgcagcagcacttcatcctgagattcagagccttccagcagagcaccgccgccagcctgaccagccccagaagcggcaaccccggctacatcgtgggcaagcccctgctggccctgaccgacgacatcagctacagcatgaccctgctgcagagccagggcaacggcagctgcagcgtgaagagacacgaggtgcagttcggcgtgaacgccatcagcggctgcaagctgagactgaagaaggccgactgcagccacctgcagcaggagatctaccagaccctgcacggcagacccagacccgagtacgtggccatcttcggcaacgccgaccccgcccagaagggcggctggaccagaatcctgaacagacactgcagcatcagcgccatcaactgcaccagctgctgcctgatccccgtgagcctggagatccaggtgctgtgggcctacgtgggcctgctgagcaacccccaggcccacgtgagcggcgtgagattcctgtaccagtgccagagcatccaggacagccagcaggtgaccgaggtgagcctgaccaccctggtgaacttcgtggacatcacccagaagccccagccccccagaggccagcccaagatggactggaagtggcccttcgacttcttccccttcaaggtggccttcagcagaggcgtgttcagccagaagtgcagcgtgagccccatcctgatcctgtgcctgctgctgctgggcgtgctgaacctggagaccatgtag

SEQ ID NO: 187584 - DNA, 1824 bp, Artificial Sequence
  derived and/or modified sequence
atgaggacaccgcagctggcgctgctgcaggtcttcttcctggtctttcctgacggagtgcgaccccagccctctagttccccttccggggccgtgccgacatcccttgagttgcagagaggcactgatggtggaacactgcagtctcctagcgaagcaaccgctacccggccagccgtgcccgggctgcctaccgtggtgcccacactcgtgacgcccagcgcaccaggtaatcggactgtggatctattcccagtgctacccatctgcgtttgtgacctgacccctggcgcttgcgatataaactgctgttgcgatcgcgactgttatcttctgcatccaaggaccgttttctctttttgcctgccaggcagcgtgcggtcctcttcttgggtatgtgtggataattctgtcattttccgaagtaattcaccattccctagccgcgttttcatggacagtaatgggatacgtcaattttgtgtacacgtgaacaattcaaatctgaactacttccagaagctgcagaaggtaaatgccacaaacttccaggcactggcagcagaattcggaggcgaatcatttactagtacattccagacccagagcccaccaagcttttaccgtgccggtgatccaatcctcacatactttccaaagtggtccgtgatttcactcctccggcaaccagctggcgtaggagcaggcgggctttgcgctgagtctaaccctgccggcttcttggagtctaagtccacaacctgcactcgctttttcaaaaatttggcgtcaagttgcaccctggacagcgctctgaacgctgcgtcttattacaacttcacagtgctaaaggttccccgttccatgaccgatccacagaatatggaattccaggtgcccgtgattctcactagtcaggcaaatgcccccctcctggctggcaacacgtgccagaacgtcgtctcccaggtaacatacgaaattgaaaccaacggtactttcggaattcagaaggtttcagttagtcttggccagactaatctgaccgtggagccaggggcctccctccagcagcatttcatcttacgctttcgcgcgtttcagcaaagtacggctgcgtccctaacctctccgcgctctggtaaccctggctacatagtgggcaagcccctgctggcgttgaccgacgacatctcttactcaatgacactattgcagtcccaaggcaacggtagctgtagcgtgaaaaggcacgaagtgcagttcggcgtcaacgccattagcggatgcaagcttcggctcaaaaaggccgattgtagccatctccagcaggaaatctaccagacactgcatggacgccccagaccagagtatgtggctatctttggaaacgcggacccagcacagaagggcggatggacgcgcatcctgaaccgacattgctcaatttccgcgattaactgtacctcctgctgcctcatcccggtgagtcttgagatacaagtactctgggcctacgtgggcctcctgtcaaacccgcaggcgcacgtgtcaggcgtcaggtttctgtaccagtgccagtccattcaagactctcaacaggtaactgaggtttcactcacaacattagtgaattttgtggacatcacccagaagcctcagccacctagaggacagcccaagatggactggaaatggcctttcgatttctttccttttaaggtcgccttcagtcgcggcgtgtttagtcagaagtgcagcgtgagtccaattctcatactgtgtcttcttctcctcggcgttctgaatctggaaaccatgtag

SEQ ID NO: 187585 - DNA, 1824 bp, Artificial Sequence
  derived and/or modified sequence
atgaggaccccccagctggccctgctgcaggtgttcttcctggtgtttcctgatggagtgcggccccagcccagcagcagccccagcggggctgtgcccaccagcctggagctgcagaggggcacagatggcggcaccctgcagagccccagcgaggccacagccaccaggcctgctgtgcccggcctgcccaccgtggtgcccaccctggtgacccccagcgcccctggcaacagaacagtggacctcttccctgtgctgcccatctgtgtgtgtgacctgacccctggggcctgtgacatcaactgctgctgtgaccgggactgctacctgctgcaccccaggacagtgttctccttctgcctgcccggctctgtgcgcagcagctcctgggtgtgtgtggacaacagcgtcatcttccgcagcaacagccccttccccagcagggtcttcatggacagcaatggcatccggcagttctgtgtgcacgtgaacaacagcaacctgaactacttccagaagctgcagaaggtgaatgccaccaacttccaggccctggccgctgagtttggaggagagagcttcaccagcaccttccagacccagagcccccccagcttctaccgggccggggaccccatcctgacctacttccccaagtggagcgtcatcagcctgctgcggcagcctgctggggtgggcgccggcggcctgtgtgccgagagcaacccagctggcttcctggagagcaagagcaccacctgcacccgcttcttcaagaacctggccagcagctgcaccctggacagcgccctgaatgctgccagctactacaacttcaccgtgctgaaggtgcccaggtccatgacagacccccagaacatggagttccaggtgcctgtgatcctgaccagccaggccaatgcccccctgctggccggcaacacctgccagaatgtggtgtcccaggtgacctatgaaattgagaccaacggcaccttcggcatccagaaggtgtctgtgtccctgggccagaccaacctgactgtggagcccggggccagcctgcagcagcacttcatcctgcgcttccgggccttccagcagagcacagctgccagcctgaccagccccaggagcggcaaccctggctacatcgtgggcaagcccctgctggccctgacagatgacatctcctacagcatgaccctgctgcagagccagggcaatggcagctgcagcgtgaagagacatgaggtgcagtttggagtgaatgccatcagcggctgcaagctgcggctgaagaaggctgactgcagccacctgcagcaggagatctaccagaccctgcacggccggcccaggccagaatatgtggccatctttggaaatgctgaccctgcccagaagggcggctggacccgcatcctgaacagacactgcagcatcagcgccatcaactgcaccagctgctgcctgatccctgtgtccctggagatccaggtgctgtgggcctacgtgggcctgctgagcaacccccaggcccacgtgtctggagtgcgcttcctgtaccagtgccagagcatccaggacagccagcaggtgacagaggtgtccctgaccaccctggtgaactttgtggacatcacccagaagccccagcccccccggggccagcccaagatggactggaagtggccctttgacttcttccccttcaaggtggccttcagccggggcgtcttcagccagaagtgcagcgtgagccccatcctgatcctgtgcctgctgctgctgggcgtgctgaacctggagaccatgtag

SEQ ID NO: 187586 - DNA, 1824 bp, Artificial Sequence
  derived and/or modified sequence
atgcggaccccccagctggccctgctgcaggtgttcttcctggtgtttcccgatggcgtgcggccgcagccttcatctagcccctcgggcgcagtccccacatctctcgaacttcagcgtggaacagacggcggaacacttcaaagccctagtgaagccactgccacccggccagccgtgccggggctgccgacagttgtgcccactctggtgacaccgtccgcccccggcaataggaccgtcgacctgtttccagtcttacctatttgcgtgtgtgacttaacacccggcgcctgtgacatcaattgctgttgcgacagagactgttacctactgcacccaagaacggtgtttagcttttgtctgcctggcagcgttaggtcgtcctcatgggtgtgcgtggataattcagtaatatttcgtagcaacagcccgtttccaagccgcgtcttcatggactccaacggcattagacagttttgtgtgcatgtcaacaattccaaccttaactatttccaaaaactgcagaaagtaaacgctacaaacttccaggccttagcagccgagttcggtggcgaaagcttcacgtccacattccagacacagtcacccccttccttttacagggctggcgaccccatccttacctactttccgaaatggtcagttatcagtctcctccggcagccagccggcgtgggggccgggggcctttgtgcagagtctaatccagcgggcttcctggaaagtaagtcaactacctgcacccgtttcttcaaaaatctcgcttcttcatgcactctggatagtgccctgaacgctgcatcttattataacttcacagtgcttaaggtccctcgctctatgacagatccacaaaatatggagtttcaagtcccagtgatcttgacgtctcaggccaatgctccattgcttgccggaaatacctgtcaaaatgtggtctctcaagtgacctatgaaatcgaaacaaatggaacattcggtattcagaaagttagtgtctccctggggcagacaaaccttactgttgaaccaggagcttccctgcagcagcattttattctccggtttagggcttttcagcaatcaaccgccgcgagtttgactagtcctagatcgggaaatcccggctatattgtgggaaagcctctgctcgctttgacagacgatatcagctatagcatgacactcctccagagtcagggtaatggttcgtgcagcgttaagcggcatgaggttcagttcggcgtaaacgccatttccggatgtaagctgcgactgaaaaaagccgactgcagccacttgcagcaagagatttaccaaacgctgcacggcagaccacgccctgagtacgtagccatttttgggaatgccgatcctgctcaaaaaggcggatggacaaggattctcaaccggcattgctctatttccgccatcaactgcacctcctgctgtctgattccagtgtctttagagatacaggtgttgtgggcgtatgtcggcctgctgagcaatcctcaggcacacgtgtccggtgtccgtttcttgtatcagtgtcaatccatacaggattcccaacaggtgaccgaggtgagcttgacaactctcgtgaacttcgttgacatcacacagaagcctcagccacccagagggcagcccaaaatggactggaagtggccatttgatttctttccgtttaaagtcgccttttccagaggagtgtttagtcagaaatgttccgtgagccccatcctgatcttgtgcctcctgcttctgggcgtcctgaatctcgagacaatgtag

SEQ ID NO: 187587 - DNA, 1824 bp, Artificial Sequence
  derived and/or modified sequence
atgcgaacaccacagcttgctctgttacaggtcttcttcctggtcttccccgacggtgtgcgaccccagccctccagttccccgtctggcgcagtgcctacaagtcttgagctgcagcggggaacagacggaggaacgttacagagcccctctgaggctactgctactcgccctgcagtgccaggcctccccaccgtagtgccaactctagtcacgccaagcgctccagggaatcgaactgtggaccttttcccagtacttcctatttgcgtctgcgatctcacccccggtgcgtgtgatatcaattgctgctgtgaccgggactgctatctcttgcatccaaggaccgtatttagcttctgcctgcccggaagcgtacgcagctcatcatgggtctgcgtcgacaattctgtcatcttcaggagtaactccccctttccaagtcgagtgttcatggatagcaatggtattaggcagttttgcgtgcacgtgaacaattccaatttgaactatttccagaaactacaaaaggtcaatgctacaaactttcaagcgctggctgcagagttcggcggagaaagctttacatctacatttcaaactcagagtccaccctccttttaccgtgcgggagacccaatattaacttactttccaaaatggagcgtgatcagtctgctgcgccagcctgcaggagtaggtgcaggcggactgtgtgcagagagcaaccccgcaggttttctcgaatctaaaagtaccacgtgtacacggttcttcaagaatctggctagcagttgcactctggactcagccttgaatgccgctagttactataactttacagtcttaaaagtgccccgttcaatgacagatcctcagaatatggaattccaagttccggtcattctgacttcccaggccaacgcaccgcttctggcaggcaatacttgccagaacgtggtgagtcaggtcacctacgagatcgagaccaatggaactttcgggattcagaaagtcagcgtgtctctgggacagacgaatttgacagtggagccaggagcttctctgcaacagcacttcatcctgcgatttagggcctttcaacagagcaccgccgcaagcctgaccagccctcgcagtgggaatccagggtacatcgtgggtaaacccttactggctcttactgacgatatctcttattcaatgaccctgttgcagtcccagggcaacggaagctgtagtgttaaaaggcatgaggtgcagtttggagtgaacgccatttccgggtgcaagctgaggctgaaaaaagcagactgctcacacttgcagcaggaaatataccagacgctacatggcaggcctagacctgaatacgtggccatcttcgggaatgctgacccagcccagaagggcggatggacccggatcctgaataggcattgttctatcagcgctataaactgcaccagctgctgtctgatcccagtgagcctggagatccaggtgctgtgggcatacgtgggactgctgtcgaacccacaggcccacgtaagcggcgtccgttttttgtatcagtgtcaatcaatccaggactcccagcaagtgaccgaagtcagcctgaccacactggtaaattttgtggacattacccaaaagccacagcctcccaggggtcagcccaaaatggattggaaatggccctttgacttcttcccattcaaagtggctttcagccggggagtgttcagccagaaatgctcagttagcccaatactgattctctgtttattgctcttaggcgtattgaatctcgaaaccatgtag

SEQ ID NO: 187588 - protein, 253 aa, Artificial Sequence
  derived and/or modified sequence
MSCTIEKALADAKALVERLRDHDDAAESLIEQTTALNKRVEAMKQYQEEIQELNEVARHRPRSTLVMGIQQENRQIRELQQENKELRTSLEEHQSALELIMSKYREQMFRLLMASKKDDPGIIMKLKEQHSKIDMVHRNKSEGFFLDASRHILEAPQHGLERRHLEANQNELQAHVDQITEMAAVMRKAIEIDEQQGCKEQERIFQLEQENKGLREILQITRESFLNLRKDDASESTSLSALVTNSDLSLRKS

SEQ ID NO: 187589 - DNA, 2924 bp, Artificial Sequence
  derived and/or modified sequence
agggccccgccctgccttctggggcaaagcggagagtggtcggttctgccccacagtaacgcgaggaaagaaatctcgcgaggctggagttctccgggagcgccggtcggaggcggtcggcggaggtgtctaccccgccggtgatggcgttgaacgccactggcttcccggccttccgtccgctgcctccgtccgattctgcgtctgcttgctgaggaggcggattaggggggcgcggagtctcttcccttgagtgcataggtcccggttggtagagggtttgagtccgcatcgccacagctgaaggctgcgagggactaagagcagaatatatctttagaaatgagttgcacaattgagaaggcacttgccgacgctaaagctcttgttgaaagattaagagatcatgacgatgcagcagaatctctgattgagcaaaccacagctctcaacaagcgagtagaagccatgaaacagtatcaggaagaaattcaagaacttaatgaagtcgcgagacatcggccacggtccacgttagttatgggaatccagcaagaaaacagacaaatcagagagttgcaacaagaaaacaaagaattacgtacatctctggaagaacatcagtcggccttggaacttataatgagcaagtaccgagaacaaatgtttagattgctaatggctagcaaaaaagatgatccgggtataataatgaagttaaaagagcagcactccaagattgacatggtacatcgtaacaagtccgaaggattcttccttgatgcatctcgacacatccttgaagcacctcaacatggactggagagaaggcacttggaagcaaatcagaatgaactgcaagcacatgttgaccagataactgaaatggcagcagtaatgaggaaagccattgaaattgacgagcaacagggttgcaaggaacaagaacgaatatttcaacttgaacaagaaaacaaaggcttgagagagatccttcaaataactcgagaatcatttttgaacctaaggaaagatgatgcgtcggaaagtacttctttgtcagcattagtgaccaacagtgatttgagtctgaggaagagctgaagagtttctgagtctgtgagcttcttacatggctccaaatggtcaaataagtgaatgaatgaatggacagaaaattcaatcctttatttttttctctgtaaatatgtacagtgcacgggctatgagatagcaacaaaaaatgcatagttaatggtcatagactttattccaaaacataattggaaaatagaaactgagccattgccaaatggtaaagaaatgaaaagttttcacagtgactactgaatataccaagagcttttggcagtactgctggctttctgggtgattaattaggtaaacttgaatattcccagtaaatgtttgagaatgcataaaattataccaatttaaaaatataaatttttgccactgttttgtgaacggaggatttgtacgctaaatttcatccttatttggcgtcaaagttgatgcaaagtttatgtaccatgagacttctagtgattgcctactttcacatttatttaaatttttgtgaaagaaaatacagttttaaaggctataggaatgtgttatatgtaccttaaacagataatttaattttagcaatttatcataactgatacttagctaacaattgtccataacttgtttaagtgtaagaaataccatttcaggaatgaaaaagaaggaatactactttctaagaaagaagatcttataatagacatatttagtaggttaaactactcctttgaaagaataagttttggttcaaagtcaataatgaagacgagatttgtttttctcttctctggctgatttttaaggatattatgtagttcatttagttaacagaattgaaatgtttgatatggcaagataggtatggtaatttcaaagtgaattgggaattcctctggctcatagaacccttttttttttcctttaagtattcttgagatacaaaaaaaaaaagtaaatacaatttcaaaaaaaaagttccggatctgtttttaagctccatctggtcctcataacctgcaagatttttcttaaaacctttcagctgaaagtgggggtaaaggtggagtaatctgtggatttgtttctgttgtcttttaaaatgtcaaatatataatatgtaatttttttaaaaaccaccagatacagaaatgtgctttaacatcagttgaaacctaaattttcttatgttgtggtgattgtattaaaaagggataaaagaagagtgtcaaacatggttaaatatattgtactcatttatgttgaatacgtattaaaattaagacaaatggaaaattatactttgagtatataatttgttaaatattactttatatggtaattttatgtataatttcatatattggtaaaattcaaaactacacttgagaatttttttatcttaagtttggggtgaatggggtggatgagactgattgaatagaaaagggctaatggcccaaacattatatagatttctttttttcagtcagaggccttatttgatattttataaataaatgacagtttttatttttaaactttttattgtttttgggaaagtattccttaatttaatgacacattcattcagatacttcttatccctgctaataaaggaaatctatttcaagctacaccattgagattaagtctgaggcagttcattgaggcagctctactataaaagcttacttgataaataattatttttgtaaacaagttgggttaacttattcttcgtctttttgcttggatatgaatttaaggtcttcatgtttaaagacatttactttgttatttagtgacacatttccatcctatttttttttttt

SEQ ID NO: 187590 - DNA, 762 bp, Artificial Sequence
  derived and/or modified sequence
atgagctgcacgattgaaaaggccttggctgatgcaaaagcgttggtggagcggctgagagaccatgatgacgccgctgagagcctgattgaacagaccaccgccctgaacaaacgagtcgaagccatgaagcaatatcaggaagaaattcaggaactgaatgaagttgcccgacatcgaccacgatctacactcgtgatgggcatccaacaggagaatcggcagattcgggaactccaacaggagaataaggagctaaggacctctcttgaagaacatcaatccgctctagaactcattatgtcaaaataccgtgaacagatgttcaggttgctgatggcctccaagaaggatgaccccggcatcatcatgaagctgaaggagcagcacagtaaaattgacatggtgcacaggaataagtccgaagggttttttctggatgcctcgaggcacattctagaggccccccaacacggcttggaaaggcgccacctggaagccaaccagaatgagctgcaagcccacgttgaccagataaccgaaatggccgcggtcatgagaaaagccattgagattgatgaacagcagggatgcaaagagcaggagcgcatcttccagttagaacaggagaacaaaggtcttcgagagattttgcagattacccgcgaaagcttcctcaacctgaggaaggacgatgccagcgagtcaacgtccctctccgctctggtgaccaacagtgacttatcattgagaaagagctag

SEQ ID NO: 187591 - DNA, 762 bp, Artificial Sequence
  derived and/or modified sequence
atgagctgcaccatcgagaaggccctggctgatgccaaggccctggtggagcggctgcgggaccatgatgatgctgctgagagcctcatcgagcagaccacagccctgaacaagagggtggaggccatgaagcagtaccaggaggagatccaggagctgaatgaggtggcccggcaccggcccaggagcaccctggtgatgggcatccagcaggagaaccggcagatccgggagctgcagcaggagaacaaggagctgcggaccagcctggaggagcaccagagcgccctggagctgatcatgagcaagtaccgggagcagatgttccggctgctgatggccagcaagaaggatgaccccggcatcatcatgaagctgaaggagcagcacagcaagattgacatggtgcacaggaacaagtctgagggcttcttcctggatgccagccgccacatcctggaggccccccagcacggcctggagcggcggcacctggaggccaaccagaatgagctgcaggcccacgtggaccagatcacagagatggctgctgtgatgaggaaggccatcgagattgatgagcagcagggctgcaaggagcaggagcgcatcttccagctggagcaggagaacaagggcctgcgggagatcctgcagatcacccgggagagcttcctgaacctgaggaaggatgatgccagcgagagcaccagcctgagcgccctggtgaccaacagcgacctgagcctgaggaagagctag

SEQ ID NO: 187592 - DNA, 762 bp, Artificial Sequence
  derived and/or modified sequence
atgagctgcaccatcgagaaggccctggccgacgccaaggccctggttgaacgtctgagggaccatgatgacgctgcagaatccctaatcgaacagaccacagcacttaacaaaagggtcgaggctatgaaacaataccaggaggagatccaggaactgaacgaggtggcacggcacaggcctcgctccacactggtcatggggattcagcaagagaaccgtcagattagggaattacaacaagagaataaggagctgcggacctcacttgaggaacaccagagcgcactggaattaattatgagcaagtatagggagcagatgtttaggttactcatggcctcgaaaaaagacgacccagggattatcatgaaactgaaggaacaacatagcaaaatagatatggtgcaccgcaacaaatctgaggggtttttcttggatgcctcgaggcacatcttagaagcccctcagcacggtctggaaagaagacacttagaggcaaaccagaacgagctgcaggcacatgtagatcagatcactgaaatggccgcagtaatgagaaaggcaatcgagatcgatgaacagcaggggtgtaaggaacaggagaggatctttcagctggagcaagagaataagggactgagggaaattctgcaaattacacgcgagtccttcctcaaccttcggaaggacgacgctagtgagagcaccagcctgtcggcgctagttaccaactcagacctttcgcttagaaagagctag

SEQ ID NO: 187593 - DNA, 762 bp, Artificial Sequence
  derived and/or modified sequence
atgagttgtactatcgagaaggctttggccgacgccaaggccctggtggagcggttgagggaccatgacgacgccgcagaatccctgatcgagcagacaacagcgctcaacaaacgagtggaggccatgaagcagtaccaagaagaaattcaggaactcaacgaagtcgcccgtcaccggcctagaagtactctggtgatgggcatccagcaggagaatcgccagatacgggagctgcaacaggagaacaaggagctccgtacctccctcgaggagcatcaatctgctctggaactgattatgtccaagtacagggagcagatgttcagactactgatggcgagcaaaaaggacgaccctgggatcataatgaaattgaaggagcagcattcaaagattgatatggtccacagaaacaagagcgaggggtttttccttgacgcttctaggcatatactggaggcgccacagcacggcttggaacgtcggcacttggaagcaaaccagaacgaattacaggcccacgtggaccagataacagagatggccgcagtcatgaggaaggccattgaaatcgacgagcaacaggggtgcaaggaacaggaaagaatcttccagcttgaacaggagaataaagggcttcgcgaaatactacagattacaagagaatctttcctgaatctgaggaaagacgacgcctctgagtccaccagtctcagcgcgctggttactaactctgatctgagcctgagaaagtcttag

SEQ ID NO: 187594 - DNA, 762 bp, Artificial Sequence
  derived and/or modified sequence
atgagctgcaccatcgagaaggccctggccgacgccaaggccctggtggagagactgagagaccacgacgacgccgccgagagcctgatcgagcagaccaccgccctgaacaagagagtggaggccatgaagcagtaccaggaggagatccaggagctgaacgaggtggccagacacagacccagaagcaccctggtgatgggcatccagcaggagaacagacagatcagagagctgcagcaggagaacaaggagctgagaaccagcctggaggagcaccagagcgccctggagctgatcatgagcaagtacagagagcagatgttcagactgctgatggccagcaagaaggacgaccccggcatcatcatgaagctgaaggagcagcacagcaagatcgacatggtgcacagaaacaagagcgagggcttcttcctggacgccagcagacacatcctggaggccccccagcacggcctggagagaagacacctggaggccaaccagaacgagctgcaggcccacgtggaccagatcaccgagatggccgccgtgatgagaaaggccatcgagatcgacgagcagcagggctgcaaggagcaggagagaatcttccagctggagcaggagaacaagggcctgagagagatcctgcagatcaccagagagagcttcctgaacctgagaaaggacgacgccagcgagagcaccagcctgagcgccctggtgaccaacagcgacctgagcctgagaaagagctag

SEQ ID NO: 187595 - protein, 621 aa, Artificial Sequence
  derived and/or modified sequence
MANVPWAEVCEKFQAALALSRVELHKNPEKEPYKSKYSARALLEEVKALLGPAPEDEDERPEAEDGPGAGDHALGLPAEVVEPEGPVAQRAVRLAVIEFHLGVNHIDTEELSAGEEHLVKCLRLLRRYRLSHDCISLCIQAQNNLGILWSEREEIETAQAYLESSEALYNQYMKEVGSPPLDPTERFLPEEEKLTEQERSKRFEKVYTHNLYYLAQVYQHLEMFEKAAHYCHSTLKRQLEHNAYHPIEWAINAATLSQFYINKLCFMEARHCLSAANVIFGQTGKISATEDTPEAEGEVPELYHQRKGEIARCWIKYCLTLMQNAQLSMQDNIGELDLDKQSELRALRKKELDEEESIRKKAVQFGTGELCDAISAVEEKVSYLRPLDFEEARELFLLGQHYVFEAKEFFQIDGYVTDHIEVVQDHSALFKVLAFFETDMERRCKMHKRRIAMLEPLTVDLNPQYYLLVNRQIQFEIAHAYYDMMDLKVAIADRLRDPDSHIVKKINNLNKSALKYYQLFLDSLRDPNKVFPEHIGEDVLRPAMLAKFRVARLYGKIITADPKKELENLATSLEHYKFIVDYCEKHPEAAQEIEVELELSKEMVSLLPTKMERFRTKMALT

SEQ ID NO: 187596 - DNA, 1866 bp, Artificial Sequence
  derived and/or modified sequence
atggccaacgtgccttgggccgaggtgtgcgaaaagttccaggcagcactcgccctaagccgcgtcgagctccacaaaaatccggaaaaagagccctacaagtccaagtactctgcaagggcactgctggaagaggtcaaggctttgcttggtccagcacccgaggatgaagacgaaagaccagaggccgaggacggccccggtgccggtgaccatgccttaggcctgcccgccgaggtcgtggagccggagggtcccgtcgcccagcgggccgtacgccttgccgtgattgaatttcatttgggcgtgaaccatatcgatacggaggaactcagcgctggcgaagaacacttggttaaatgccttcggcttctgaggagatatcgactgagccacgattgtatcagtctgtgtattcaggctcaaaacaacttagggatcctttggtcggagcgcgaggagatagagaccgctcaggcatatctcgaaagcagtgaagctctctataatcagtatatgaaagaggtggggtctcctccgctcgaccctaccgagcggttccttcctgaagaggagaagttgacagagcaggagaggagtaagagattcgagaaggtttacacccacaacctgtactatctggcccaagtgtaccaacacttggagatgtttgaaaaagccgcacactactgtcactctactttgaaacgacagctggagcacaatgcctatcaccctattgagtgggccataaatgcggccactctgagccagttctacatcaacaagctatgtttcatggaagcccgccactgcctgagcgctgccaatgttattttcggccagacgggcaaaatctcagccaccgaagatactccagaggccgagggggaggtcccggaactttaccaccagcgtaagggggagatcgctaggtgttggatcaaatactgtttgaccctaatgcagaacgcccagttaagcatgcaggacaatatcggggagcttgacctagacaaacaatctgaattacgggctctacgtaaaaaagaattggacgaagaggaatccatacgtaaaaaagcggtgcagtttggcacgggcgagttatgtgatgcaatttccgcagtggaagaaaaggtcagctatctcagaccacttgactttgaggaggccagagagctgttcctactgggccaacattatgtgttcgaggcaaaggagttctttcagattgatggatatgtaaccgatcatatcgaggtcgtgcaggatcattcagccctttttaaggtcctggccttttttgaaacagatatggagcggcgatgtaaaatgcataagcgccgcattgctatgctggaacccctgactgtggacttaaacccacagtattacctcctggtgaaccgccagatacagttcgaaattgcacacgcctattacgacatgatggacttgaaagttgcaatcgcagatcgacttagagatcctgacagccacattgtgaagaaaatcaacaatcttaataaatcggcccttaagtactaccagttattcttagatagtctcagggaccccaataaagtcttccccgaacacattggggaagatgtcctaagaccagcaatgctggctaagttccgggttgcgaggctgtacggaaagatcatcaccgccgacccaaagaaagagctggaaaatctggcaacttcacttgaacattataaatttattgtcgactactgtgaaaagcatcccgaagccgcccaggaaattgaggttgaactggagctgtctaaggagatggtgagcctcctccccaccaaaatggaacggttcaggaccaaaatggctcttacatag

SEQ ID NO: 187597 - DNA, 1866 bp, Artificial Sequence
  derived and/or modified sequence
atggccaacgtgccctgggccgaggtgtgtgagaagttccaggccgccctggccctgagccgggtggagctgcacaagaaccctgagaaggagccctacaagagcaagtacagcgcccgggccctgctggaggaggtgaaggccctgctgggccctgccccagaagatgaagatgagaggcctgaggccgaggatggccctggagctggggaccacgccctgggcctgcctgctgaggtggtggagcctgagggccctgtggcccagagagctgtgcggctggccgtgattgagttccacctgggcgtgaaccacatcgacacagaggagctgtctgctggggaggagcacctggtgaagtgcctgcggctgctgcggcgctaccgcctgagccatgactgcatcagcctgtgcatccaggcccagaacaacctgggcatcctgtggagcgagcgggaggagattgaaacagcccaggcctacctggagagcagcgaggccctgtacaaccagtacatgaaggaggtgggcagcccccccctggaccccacagagcgcttcctgcctgaggaggagaagctgacagagcaggagaggagcaagagatttgagaaggtgtacacccacaacctgtactacctggcccaggtgtaccagcacctggagatgtttgagaaggccgcccactactgccacagcaccctgaagaggcagctggagcacaatgcctaccaccccatcgagtgggccatcaatgctgccaccctgagccagttctacatcaacaagctgtgcttcatggaggcccggcactgcctgtctgctgccaacgtcatcttcggccagacaggcaagatcagcgccacagaggacaccccagaggccgagggggaggtgcctgagctgtaccaccagaggaaaggagagatcgcccgctgctggatcaagtactgcctgaccctgatgcagaatgcccagctgtccatgcaggacaacattggagagctggacctggacaagcagagcgagctgcgggccctgaggaagaaggagctggatgaggaggagagcatcaggaagaaggctgtgcagtttggaactggagagctgtgtgatgccatctctgctgtggaggagaaggtgtcctacctgcggcccctggactttgaggaggcccgggagctgttcctgctgggccagcactacgtgtttgaggccaaggagttcttccagattgatggctacgtgacagaccacatcgaggtggtgcaggaccacagcgccctcttcaaggtgctggccttctttgaaacagacatggagcggcgctgcaagatgcacaagagaagaattgccatgctggagcccctgactgtggacctgaacccccagtactacctgctggtgaaccggcagatccagtttgaaattgcccacgcctactatgacatgatggacctgaaggtggccatcgctgaccggctgcgggaccctgacagccacatcgtgaagaagatcaacaacctgaacaagagcgccctgaagtactaccagctgttcctggacagcctgcgggaccccaacaaggtgtttcctgagcacatcggagaagatgtgctgcggcctgccatgctggccaagttccgggtggcccggctgtatggcaagatcatcacagctgaccccaagaaggagctggagaacctggccaccagcctggagcactacaagttcatcgtggactactgtgagaagcaccctgaggccgcccaggagattgaggtggagctggagctgagcaaggagatggtgtccctgctgcccaccaagatggagcgcttccgcaccaagatggccctgacctag

SEQ ID NO: 187598 - DNA, 1866 bp, Artificial Sequence
  derived and/or modified sequence
atggccaacgtgccctgggccgaggtgtgcgagaagttccaggccgctcttgccttaagcagagtggaactgcataaaaaccccgagaaggagccttacaaatccaagtatagcgcccgcgcactgctcgaggaagtgaaggcccttttaggtcctgctccagaggacgaggacgaaaggcccgaggctgaagatggccccggcgccggcgatcatgccctggggctaccagcggaggtggttgaacccgaaggacctgtagcacagagagcagtgcgtctggctgtgattgagttccaccttggggtcaaccatatcgacaccgaagaactgtctgcaggggaggaacacctggtgaagtgtctgagattgctgcgcagatacaggctcagtcatgactgcatctcactgtgtatccaggcgcagaataatctaggaattctttggtcagaaagggaggagattgagacagctcaggcctaccttgagtcatctgaggccctgtacaatcaatacatgaaggaggtgggatctccacctctggacccaactgaaaggtttctaccggaggaggagaagctcaccgaacaggagaggagcaagcgcttcgagaaagtgtatacacacaacttgtactatttggctcaagtataccagcacctggagatgtttgaaaaggcagcccactattgtcactctacgctgaaacgacagctggagcataatgcctaccatcccattgaatgggcgattaacgcagcaactctgtcccagttttatattaacaaactttgcttcatggaggctcggcactgtttatcagcagccaacgttattttcggacaaacgggcaagatctcagcaaccgaggatactcccgaggccgagggagaggtgcctgagctctatcatcagaggaaaggtgaaatcgccagatgttggatcaagtactgtctgactttgatgcagaacgctcagctgtcaatgcaggacaacatcggggagctggatcttgataaacagagcgaactgagggctcttcggaagaaagagcttgacgaggaggaatccattcggaagaaagccgtccaatttggtaccggcgagctgtgtgacgcaatctctgccgtagaggagaaagtcagctatctccgacctttagacttcgaggaagccagagaattgttcctgctcggacagcactatgtttttgaggccaaggagttctttcagatagacggctacgtgacggatcacattgaggttgtgcaggaccactcagccctattcaaggtgttagccttcttcgagacagatatggaacgccgctgtaaaatgcataaacggcgaatcgccatgctggaaccactgacagttgatctcaatccccagtactacctgctggtgaaccggcagatccagttcgagattgcccatgcctactacgacatgatggatctcaaagtggccatcgcagacagattgagagacccagatagccacatcgtcaagaagatcaataacctgaataagtccgctctgaaatattaccaactctttctggatagcttgcgggatcctaataaagtgtttcccgagcatattggtgaggatgtcctgcggccagccatgctggccaaattccgtgtcgccaggctatatggaaaaattatcaccgcagatccaaagaaagagcttgaaaatctcgctacaagtctcgaacactataagtttatcgtggactactgtgaaaaacacccagaagcagcacaggaaattgaggtcgagctcgaactcagcaaagagatggtgagcctgctccccaccaagatggaacgctttcgaaccaagatggcgctcacatag

SEQ ID NO: 187599 - DNA, 1866 bp, Artificial Sequence
  derived and/or modified sequence
atggctaatgtgccatgggctgaagtttgtgagaagtttcaagccgcactggccctgtctagagtcgagttgcataagaacccagaaaaagagccttataagagcaaatatagcgctagggctcttttggaagaggtgaaggcattgctcggcccagcaccagaggacgaagatgagcgacccgaggccgaggatggaccaggcgcaggcgatcacgcactggggttgccagctgaggtcgtggaacctgagggccctgtagcccagcgggcagtgagactggctgttatagagtttcacctgggagtgaaccacatagacaccgaggaactctcggctggagaggaacacctcgtgaagtgtttgaggctgttgagaagatatcgattaagccacgattgtatcagtctctgcatccaggcacaaaacaacctgggcatcctgtggagtgagcgggaggagattgaaaccgcccaggcctatctggagagctccgaggcgctatacaatcagtacatgaaggaggtgggctccccccctctcgatccgactgaacggttcctgccagaggaggagaaactgactgagcaggagcggtccaaaagattcgagaaggtctatacccacaacctgtattatctggcccaagtctaccaacacctagaaatgttcgaaaaagctgcccactactgtcacagtacactgaagcggcaactggagcacaatgcctatcatcccatcgaatgggcaattaacgccgctaccctctcccagttctacataaacaagctctgctttatggaggcacggcactgtctgagtgcagcgaacgtgatcttcggacagacaggaaaaataagtgccacagaggatactcccgaagcagagggggaggtacccgaactctatcatcagcgcaaaggagagattgccagatgttggattaaatactgcttgactctgatgcaaaacgcccagctcagtatgcaggacaatattggcgagctcgatcttgataagcaaagcgaactccgcgctcttcgaaagaaagaacttgacgaagaagagagcatcaggaagaaggctgtgcagttcgggaccggagagctttgcgacgctatatccgctgtggaagaaaaagtgagctacctgcgtccccttgacttcgaagaggcccgagagctgtttctcctcgggcaacactacgtttttgaggcgaaagagttctttcaaatcgacggttatgtgacagaccatatcgaagtggtgcaggaccactccgctctgtttaaagtcctggctttctttgagactgacatggagcggaggtgtaaaatgcataagagaagaatcgcaatgctggagcctctgactgttgacctgaaccctcaatattatttgctggtcaacagacaaatacagttcgaaattgcacacgcttactacgatatgatggaccttaaggtcgctattgctgacagactaagggatccggattcgcatattgtgaagaagataaataacctgaacaaatccgccctgaaatactatcagctgttcctggactctctacgagatcctaacaaagtgtttcccgagcatataggagaggacgtgctacgccctgccatgttagcaaagttcagagttgctcggctctatggaaagataattaccgctgacccaaaaaaagagctcgagaacctggcgaccagtttagagcactataaattcatagtggattactgcgaaaaacatccagaggcagcgcaggaaatcgaggtggagcttgagctgtctaaggaaatggtaagcctgctccccaccaaaatggaaaggttccgaaccaagatggctctcacctag

SEQ ID NO: 187600 - DNA, 2534 bp, Artificial Sequence
  derived and/or modified sequence
ggccgcaacgtgtcgagagccgtaagtaaagtgtcgcaaagcagaaggaaggcgggagtcccgactgcaaacattgaggaaagccaggcagtagaggccgctatggcgaacgttccgtgggcagaggtctgcgagaaattccaggcggcgctcgctctgtcgcgggtggaactgcataaaaatccggagaaggaaccatacaagtccaaatacagcgcccgggcgctactggaagaggtcaaggcgctgctcggccctgcgcctgaggacgaggatgagcggcctgaggccgaggacggcccgggtgccggtgaccacgccctggggctgccggctgaggtggtggagcccgaggggcccgtcgcccagcgagcggtgaggctggcagtcatcgagttccacctcggggtgaaccacatcgacacggaggagctgtcggcgggggaggagcacctggtgaaatgcctgcggctgctgcgcaggtaccggctctcgcacgactgcatctctctctgcatccaggcgcagaataacctgggtatcttgtggtctgaaagagaagaaattgaaactgcacaggcttacctagagtcatcagaagcactatataatcagtatatgaaagaggttgggagtcctcctcttgatcctactgagcgttttcttcctgaagaagagaaacttactgaacaagagagatcaaaaagatttgaaaaggtttatactcataacctatattacctagctcaagtctaccagcatctggaaatgtttgagaaggctgctcactattgccatagtacactaaaacgccagcttgagcacaatgcctaccatcctatagagtgggctatcaatgctgctaccttgtcacagttttacatcaataagctatgctttatggaggccaggcactgtttatcagctgctaatgtcatttttggtcaaactggaaagatctcagccacagaagacactcctgaagctgaaggagaagtgccagagctttatcatcaaagaaagggggaaatagcaaggtgctggatcaaatactgtttgactctcatgcagaatgcccaactctccatgcaggacaacataggagagcttgatcttgataaacagtctgaacttagagctttaaggaaaaaagaactagatgaggaggaaagcattcggaaaaaagctgtgcagtttggaaccggtgaactgtgtgatgccatctctgcagtagaagagaaagtgagctacttgagacctttagattttgaagaagccagagaacttttcttattgggtcagcactatgtctttgaggcaaaagagttctttcagattgatggttatgtcactgaccatattgaagttgtccaagaccacagtgctctgtttaaggtgcttgcattctttgaaactgacatggagagacggtgcaagatgcataaacgcagaatagccatgctagagcccctaactgtagacctgaatccacagtattatctgttggtcaacagacagatccagtttgaaattgcacatgcttactatgatatgatggatttgaaggttgccattgctgacaggctaagggatcctgattcacacattgtaaaaaaaataaataatcttaataagtcagcactgaagtactaccagctcttcttagactccctgagagacccaaataaagtattccctgagcatataggggaagatgttcttcgccctgccatgttagctaagtttcgagttgcccgtctctatggcaaaatcattactgcagatcccaagaaagagctggaaaatttggcaacatcattggaacattacaaatttattgttgattactgtgaaaagcatcctgaggccgcccaggaaatagaagttgagctagaacttagtaaagagatggttagtcttctcccaacaaaaatggagagattcagaaccaagatggccctgacttaatccttgtttttaaagaaaggaaatgtgcaatattgaagtgatctttttccctagtcagacaggcccaattccattgtgatgtttacctttatagccaggtgagtgcagtttgaacttgagatacagtcaactgagtgtttgctaggatcctaaggaacataaagttaattaaaaacttacacctaattatgtaaattgccttgttaaagacatgtgatttgtattttagatgcttgtttcctattaaaatacagacatttctaccctcagtttctaaatgtagactatttgttggctagtacttgatagattccttgtaagaaaaaatgctgggtaatgtacctggtaacaagcctgttaatatattaagattgaaaaagtaacttctatagttactccttctaaaatatttgacttcctaaattccccccacccaaaatctttcccttttgaaaatactaaaaactaagttatgttattataaagtgtaaaatggtttgtcttaattataggagaaaaaggccttgttagaaataaaataaactgacttatttcactaatgaaaa

SEQ ID NO: 187601 - DNA, 1866 bp, Artificial Sequence
  derived and/or modified sequence
atggccaacgtgccctgggccgaggtgtgcgagaagttccaggccgccctggccctgagcagagtggagctgcacaagaaccccgagaaggagccctacaagagcaagtacagcgccagagccctgctggaggaggtgaaggccctgctgggccccgcccccgaggacgaggacgagagacccgaggccgaggacggccccggcgccggcgaccacgccctgggcctgcccgccgaggtggtggagcccgagggccccgtggcccagagagccgtgagactggccgtgatcgagttccacctgggcgtgaaccacatcgacaccgaggagctgagcgccggcgaggagcacctggtgaagtgcctgagactgctgagaagatacagactgagccacgactgcatcagcctgtgcatccaggcccagaacaacctgggcatcctgtggagcgagagagaggagatcgagaccgcccaggcctacctggagagcagcgaggccctgtacaaccagtacatgaaggaggtgggcagcccccccctggaccccaccgagagattcctgcccgaggaggagaagctgaccgagcaggagagaagcaagagattcgagaaggtgtacacccacaacctgtactacctggcccaggtgtaccagcacctggagatgttcgagaaggccgcccactactgccacagcaccctgaagagacagctggagcacaacgcctaccaccccatcgagtgggccatcaacgccgccaccctgagccagttctacatcaacaagctgtgcttcatggaggccagacactgcctgagcgccgccaacgtgatcttcggccagaccggcaagatcagcgccaccgaggacacccccgaggccgagggcgaggtgcccgagctgtaccaccagagaaagggcgagatcgccagatgctggatcaagtactgcctgaccctgatgcagaacgcccagctgagcatgcaggacaacatcggcgagctggacctggacaagcagagcgagctgagagccctgagaaagaaggagctggacgaggaggagagcatcagaaagaaggccgtgcagttcggcaccggcgagctgtgcgacgccatcagcgccgtggaggagaaggtgagctacctgagacccctggacttcgaggaggccagagagctgttcctgctgggccagcactacgtgttcgaggccaaggagttcttccagatcgacggctacgtgaccgaccacatcgaggtggtgcaggaccacagcgccctgttcaaggtgctggccttcttcgagaccgacatggagagaagatgcaagatgcacaagagaagaatcgccatgctggagcccctgaccgtggacctgaacccccagtactacctgctggtgaacagacagatccagttcgagatcgcccacgcctactacgacatgatggacctgaaggtggccatcgccgacagactgagagaccccgacagccacatcgtgaagaagatcaacaacctgaacaagagcgccctgaagtactaccagctgttcctggacagcctgagagaccccaacaaggtgttccccgagcacatcggcgaggacgtgctgagacccgccatgctggccaagttcagagtggccagactgtacggcaagatcatcaccgccgaccccaagaaggagctggagaacctggccaccagcctggagcactacaagttcatcgtggactactgcgagaagcaccccgaggccgcccaggagatcgaggtggagctggagctgagcaaggagatggtgagcctgctgcccaccaagatggagagattcagaaccaagatggccctgacctag

SEQ ID NO: 187602 - protein, 522 aa, Artificial Sequence
  derived and/or modified sequence
MAAVAVAVREDSGSGMKAELPPGPGAVGREMTKEEKLQLRKEKKQQKKKRKEEKGAEPETGSAVSAAQCQGPTRELPESGIQLGTPREKVPAGRSKAELRAERRAKQEAERALKQARKGEQGGPPPKASPSTAGETPSGVKRLPEYPQVDDLLLRRLVKKPERQQVPTRKDYGSKVSLFSHLPQYSRQNSLTQFMSIPSSVIHPAMVRLGLQYSQGLVSGSNARCIALLRALQQVIQDYTTPPNEELSRDLVNKLKPYMSFLTQCRPLSASMHNAIKFLNKEITSVGSSKREEEAKSELRAAIDRYVQEKIVLAAQAISRFAYQKISNGDVILVYGCSSLVSRILQEAWTEGRRFRVVVVDSRPWLEGRHTLRSLVHAGVPASYLLIPAASYVLPEVSKVLLGAHALLANGSVMSRVGTAQLALVARAHNVPVLVCCETYKFCERVQTDAFVSNELDDPDDLQCKRGEHVALANWQNHASLRLLNLVYDVTPPELVDLVITELGMIPCSSVPVVLRVKSSDQ

SEQ ID NO: 187603 - protein, 520 aa, Artificial Sequence
  derived and/or modified sequence
MAAVAVAVREDSGSGMKAESPWAWVGREMTKEEKLQLRKEKKQQKKKRKEEKGAEPETGSAVSAAQCQGPTRELPESGIQLGTPREKVPAGRSKAELRAERRAKQEAERALKQARKGEQGGPPPKASPSTAGETPSGVKRLPEYPQVDDLLLRRLVKKPERQQVPTRKDYGSKVSLFSHLPQYSRQNSLTQFMSIPSSVIHPAMVRLGLQYSQGLVSGSNARCIALLRALQQVIQDYTTPPNEELSRDLVNKLKPYMSFLTQCRPLSASMHNAIKFLNKEITSVGSSKREEEAKSELRAAIDRYVQEKIVLAAQAISRFAYQKISNGDVILVYGCSSLVSRILQEAWTEGRRFRVVVVDSRPWLEGRHTLRSLVHAGVPASYLLIPAASYVLPEVSKVLLGAHALLANGSVMSRVGTAQLALVARAHNVPVLVCCETYKFCERVQTDAFVSNELDDPDDLQCKRGEHVALANWQNHASLRLLNLVYDVTPPELVDLVITELGMIPCSSVPVVLRVKSSDQ

SEQ ID NO: 187604 - DNA, 1608 bp, Artificial Sequence
  derived and/or modified sequence
ggagcctaggactgagggcgatggctgctgtggccgtggctgttcgcgaggactcgggatccgggatgaaggcggagcttccccctgggcctggggcagtggggagggaaatgaccaaagaagaaaagctgcagcttcggaaggaaaagaaacagcagaagaagaaacggaaggaagaaaagggggcagaaccagagactggctctgctgtatctgcagcccaatgtcaaggcccaaccagagaactgccagaatcgggcattcagttgggcactcctcgggagaaagttccagctggtcggagtaaggccgaacttcgggctgagcgtcgagccaagcaggaggccgagcgggccctgaaacaggcaagaaaaggggaacaaggaggaccacctcctaaggccagccccagcacagctggagaaaccccctcaggagtgaagcgtctccctgagtaccctcaggttgatgacctacttctgagaaggcttgttaaaaaaccagagcgtcaacaggttcctacacgaaaggattatggatccaaagtcagtctcttctctcacctaccccagtacagcagacaaaactctctgacccagtttatgagcatcccatcctctgtgatccacccagccatggtgcgactcggcctgcagtactcccagggcctggtcagtggctccaatgcccggtgtattgccctgcttcgtgccttgcagcaggtgattcaggattacacaacaccgcctaatgaagaactctccagggatctagtgaataaactaaaaccctacatgagcttcctgactcagtgccgtcccctgtcagcgagcatgcacaacgccatcaagttccttaacaaggaaatcaccagtgtgggcagttccaagcgggaagaggaggccaagtcagaacttcgagcagccattgatcggtatgtgcaagagaagattgtgctagcagctcaggcaatttcacgctttgcttaccagaagatcagtaatggagatgtgatcctggtatatggatgctcatctctggtatcacgaattcttcaggaggcttggacagagggccggcggtttcgggtggtagtggtggacagccggccatggctggaaggaaggcacacactacgttctctagtccatgctggtgtcccagcctcctacctgctgattcctgcagcctcctatgtgctcccagaggtttccaaggtgctattgggagctcatgcactcttggccaacgggtctgtgatgtcacgggtagggacagcacagttagccctggtggctcgagcccataatgtaccagtgctggtttgctgtgaaacatacaagttctgtgagcgtgtgcagactgatgcctttgtctctaatgagctagatgaccctgatgatctgcaatgtaagcggggagaacatgttgcgctggctaactggcagaaccacgcatccctacggttgttgaatctagtctatgatgtgactcccccagagcttgtggatctggtgatcacggagctggggatgatcccttgcagttctgtacctgttgttctacgagtcaagagcagtgaccagtgacgggggaaacacagggtta

SEQ ID NO: 187605 - DNA, 1626 bp, Artificial Sequence
  derived and/or modified sequence
gagcctaggactgagggcgatggctgctgtggccgtggctgttcgcgaggactcgggatccgggatgaaggcggagtccccctgggcctgggtggggagggaaatgaccaaagaagaaaagctgcagcttcggaaggaaaagaaacagcagaagaagaaacggaaggaagaaaagggggcagaaccagagactggctctgctgtatctgcagcccaatgtcaaggcccaaccagagaactgccagaatcgggcattcagttgggcactcctcgggagaaagttccagctggtcggagtaaggccgaacttcgggctgagcgtcgagccaagcaggaggccgagcgggccctgaaacaggcaagaaaaggggaacaaggaggaccacctcctaaggccagccccagcacagctggagaaaccccctcaggagtgaagcgtctccctgagtaccctcaggttgatgacctacttctgagaaggcttgttaaaaaaccagagcgtcaacaggttcctacacgaaaggattatggatccaaagtcagtctcttctctcacctaccccagtacagcagacaaaactctctgacccagtttatgagcatcccatcctctgtgatccacccagccatggtgcgactcggcctgcagtactcccagggcctggtcagtggctccaatgcccggtgtattgccctgcttcgtgccttgcagcaggtgattcaggattacacaacaccgcctaatgaagaactctccagggatctagtgaataaactaaaaccctacatgagcttcctgactcagtgccgtcccctgtcagcgagcatgcacaacgccatcaagttccttaacaaggaaatcaccagtgtgggcagttccaagcgggaagaggaggccaagtcagaacttcgagcagccattgatcggtatgtgcaagagaagattgtgctagcagctcaggcaatttcacgctttgcttaccagaagatcagtaatggagatgtgatcctggtatatggatgctcatctctggtatcacgaattcttcaggaggcttggacagagggccggcggtttcgggtggtagtggtggacagccggccatggctggaaggaaggcacacactacgttctctagtccatgctggtgtcccagcctcctacctgctgattcctgcagcctcctatgtgctcccagaggtttccaaggtgctattgggagctcatgcactcttggccaacgggtctgtgatgtcacgggtagggacagcacagttagccctggtggctcgagcccataatgtaccagtgctggtttgctgtgaaacatacaagttctgtgagcgtgtgcagactgatgcctttgtctctaatgagctagatgaccctgatgatctgcaatgtaagcggggagaacatgttgcgctggctaactggcagaaccacgcatccctacggttgttgaatctagtctatgatgtgactcccccagagcttgtggatctggtgatcacggagctggggatgatcccttgcagttctgtacctgttgttctacgagtcaagagcagtgaccagtgacgggggaaacacagggttaataaatgccatactccctaccctca

SEQ ID NO: 187606 - DNA, 1569 bp, Artificial Sequence
  derived and/or modified sequence
atggccgcagtggccgtcgctgtcagagaagatagcggctccggaatgaaggctgagctgcctcctggtccgggcgccgtgggtcgggaaatgaccaaggaggagaaactgcagctccgcaaggagaagaaacagcagaaaaagaaaagaaaggaggaaaagggcgcagaaccagagactgggtcggcagtctccgcagcacagtgccagggtccaacaagagagctgcccgagagcgggattcagttaggcacccctcgggagaaggtacctgccggcagatccaaggcagagctgagagctgaacggagggccaaacaggaagccgaacgcgccctgaagcaggcaagaaaaggtgaacagggcggtcctccccctaaggcgtctccatcaacagcaggggaaacgcctagcggagtgaagcgcctgcccgagtatccccaagtggatgatctccttcttcgccgcctggtgaagaagccggagcgccagcaggtgccaacacgcaaagattacgggagcaaggtgtccctgtttagccacttgcctcagtacagtagacagaactctctcacacagttcatgagcattccctcttctgtgatccatcccgccatggtgcgactggggctgcagtattcccagggcctggtgtccggctccaatgctaggtgtattgctctgctgagagcactgcagcaggtgatccaggactacacgacacctcccaacgaggagttgtcaagggacctcgtcaacaaattgaaaccatatatgtctttcttgacccagtgcagacccctcagtgccagtatgcacaacgctattaaattcttgaacaaagaaataacttcggtcggtagctccaagcgcgaagaggaggccaagtccgaactgagagctgcaattgatagatatgttcaagagaagattgttctggcggctcaggcgatctcacgtttcgcgtaccagaagatatcaaatggcgacgtgattctcgtctacggctgcagctctctggtgagtcgaatcctacaggaagcttggacagaggggaggcgcttccgcgtggtcgtcgtcgattcacgaccttggctcgaaggtcgccataccctgcgctctctggtccacgccggggtacccgcaagctacctactgatcccagccgcatcctacgtgctccccgaagtgagtaaagtcctgctgggtgcgcacgcccttttggccaatggaagcgtcatgtctcgagtaggcacggctcagctggctctcgtcgctagagcccataatgtgccagtcctcgtctgctgtgaaacttataagttctgcgaaagagtgcagaccgatgccttcgttagtaacgaactcgatgatcccgacgatctacagtgcaagcgtggcgaacatgtagcactggccaactggcagaatcacgccagccttcgactgcttaatcttgtgtatgatgtcacccctcctgagctagtggatctagtgattacggaattgggcatgatcccatgctctagtgttcctgtagttcttcgagtgaagagtagtgaccagtag

SEQ ID NO: 187607 - DNA, 1563 bp, Artificial Sequence
  derived and/or modified sequence
atggctgctgtcgctgtggccgtccgagaggattctgggagtgggatgaaagccgaaagcccttgggcatgggtgggccgagagatgactaaggaagagaaacttcagctccgaaaggagaagaagcagcagaagaaaaagcggaaggaagagaaaggtgctgaacctgaaacgggatccgccgtgtccgcagcacagtgccagggtcctacccgagaattgccagagtctggtatccagctggggacacctagggagaaagtgcctgctgggcggtccaaggccgaactcagagctgaacgccgtgcgaagcaagaagccgagcgggccttgaaacaagcaaggaagggggagcagggggggccacctcctaaagcttccccttcaacagccggggagacccctagcggcgttaagcgtctcccagaatatccccaggtggatgatctccttcttcgcagattagtgaagaaacctgaacgacagcaggtgcccacgcgcaaggattacggatccaaggtctctctgttttctcacctgccacaatactcacgccagaattccctgacacagttcatgtccataccctcttctgtcatacaccccgcaatggttcgcctcggactgcagtactctcagggactagtgtctggctcaaatgctcgttgtattgccttgctcagggctctgcagcaagtaatccaggattatacaactccacccaacgaggagcttagcagggatctggttaacaaattgaagccatatatgtccttcctgacacaatgccgtcccctgagcgcttcaatgcataatgcgattaagttcctcaataaagaaatcaccagcgtggggtcgagcaaacgggaggaggaggctaagagcgagctgagagccgctatagaccggtatgtgcaggagaagattgtgttggcggcccaggcaatctcacgctttgcttaccaaaaaatatcgaacggcgacgtcatcctggtatatggatgctctagtttagtgagtaggatcttacaggaggcatggaccgagggtagaagatttcgcgttgtcgtcgtggactccaggccttggctcgagggcagacataccttaagatcactggtccacgccggagtacctgcatcataccttcttatccctgccgcatcctatgtcctgccagaggtgagtaaggtgctcttaggcgctcatgcgcttctcgccaatggctctgtgatgtcccgcgtggggaccgctcagctggccctggtggcccgagcgcacaatgtgcccgttctggtgtgctgtgaaacatacaaattctgcgaaagggtccagactgacgcctttgtgtctaatgagctcgacgatccagacgacttacagtgtaaacgcggcgaacacgtggccttagccaattggcagaatcacgcctctctccggctgcttaacctggtgtatgacgtgactccacccgagctcgtagatctggtcatcacggaactgggcatgattccatgttctagcgtaccagtggtgctcagagttaagtcatccgaccagtag

SEQ ID NO: 187608 - DNA, 1569 bp, Artificial Sequence
  derived and/or modified sequence
atggctgctgtggccgtggccgtgcgggaggacagcggcagcggcatgaaggccgagctgcccccaggccctggagctgtgggccgggagatgaccaaggaggagaagctgcagctgaggaaggagaagaagcagcagaagaagaagaggaaggaggagaagggagctgagcctgagaccggcagcgctgtgtctgctgcccagtgccagggccccacccgggagctgcctgagagcggcatccagctgggcaccccccgggagaaggtgcctgctggccgcagcaaggccgagctgcgggcagagcggcgggccaagcaggaggccgagcgggccctgaagcaggccaggaagggggagcagggcggccccccacccaaggccagccccagcacagctggggagacccccagcggcgtgaagaggctgcctgagtacccccaggtggatgacctgctgctgcggcggctggtgaagaagccagagcggcagcaggtgcccaccaggaaggactatggcagcaaggtgtccctcttcagccacctgccccagtacagccggcagaacagcctgacccagttcatgagcatccccagcagcgtcatccacccagccatggtgcggctgggcctgcagtacagccagggcctggtgtctggcagcaatgcccgctgcatcgccctgctgcgggccctgcagcaggtgatccaggactacaccaccccaccaaatgaggagctgagccgggacctggtgaacaagctgaagccctacatgtccttcctgacccagtgccggcccctgagcgcctccatgcacaatgccatcaagttcctgaacaaggagatcacctctgtgggcagcagcaagcgggaggaggaggccaagtctgagctgcgggccgccatcgaccgctacgtgcaggagaagatcgtgctggccgcccaggccatcagcagatttgcctaccagaagatcagcaatggagatgtgatcctggtgtatggctgcagcagcctggtgagccgcatcctgcaggaggcctggacagagggccgccgcttccgggtggtggtggtggacagccggccctggctggagggccgccacaccctgcggagcctggtgcacgccggcgtgcctgccagctacctgctgatcccagctgccagctatgtgctgcctgaggtgtccaaggtgctgctgggcgcccacgccctgctggccaacggctctgtgatgagccgggtgggcacagcccagctggccctggtggcccgggcccacaacgtgcctgtgctggtgtgctgtgagacctacaagttctgtgagcgggtgcagacagatgcctttgtgtccaatgagctggatgatcctgatgacctgcagtgcaagagaggagaacatgtggccctggccaactggcagaaccacgccagcctgcggctgctgaacctggtgtatgatgtgaccccacctgagctggtggacctggtgatcacagagctgggcatgatcccctgcagctctgtgcctgtggtgctgcgggtgaagagcagtgaccagtag

SEQ ID NO: 187609 - DNA, 1563 bp, Artificial Sequence
  derived and/or modified sequence
atggctgctgtggccgtggccgtgcgggaggacagcggcagcggcatgaaggccgagagcccctgggcctgggtgggccgggagatgaccaaggaggagaagctgcagctgaggaaggagaagaagcagcagaagaagaagaggaaggaggagaagggagctgagcctgagaccggcagcgctgtgtctgctgcccagtgccagggccccacccgggagctgcctgagagcggcatccagctgggcaccccccgggagaaggtgcctgctggccgcagcaaggccgagctgcgggcagagcggcgggccaagcaggaggccgagcgggccctgaagcaggccaggaagggggagcagggcggccccccacccaaggccagccccagcacagctggggagacccccagcggcgtgaagaggctgcctgagtacccccaggtggatgacctgctgctgcggcggctggtgaagaagccagagcggcagcaggtgcccaccaggaaggactatggcagcaaggtgtccctcttcagccacctgccccagtacagccggcagaacagcctgacccagttcatgagcatccccagcagcgtcatccacccagccatggtgcggctgggcctgcagtacagccagggcctggtgtctggcagcaatgcccgctgcatcgccctgctgcgggccctgcagcaggtgatccaggactacaccaccccaccaaatgaggagctgagccgggacctggtgaacaagctgaagccctacatgtccttcctgacccagtgccggcccctgagcgcctccatgcacaatgccatcaagttcctgaacaaggagatcacctctgtgggcagcagcaagcgggaggaggaggccaagtctgagctgcgggccgccatcgaccgctacgtgcaggagaagatcgtgctggccgcccaggccatcagcagatttgcctaccagaagatcagcaatggagatgtgatcctggtgtatggctgcagcagcctggtgagccgcatcctgcaggaggcctggacagagggccgccgcttccgggtggtggtggtggacagccggccctggctggagggccgccacaccctgcggagcctggtgcacgccggcgtgcctgccagctacctgctgatcccagctgccagctatgtgctgcctgaggtgtccaaggtgctgctgggcgcccacgccctgctggccaacggctctgtgatgagccgggtgggcacagcccagctggccctggtggcccgggcccacaacgtgcctgtgctggtgtgctgtgagacctacaagttctgtgagcgggtgcagacagatgcctttgtgtccaatgagctggatgatcctgatgacctgcagtgcaagagaggagaacatgtggccctggccaactggcagaaccacgccagcctgcggctgctgaacctggtgtatgatgtgaccccacctgagctggtggacctggtgatcacagagctgggcatgatcccctgcagctctgtgcctgtggtgctgcgggtgaagagcagtgaccagtag

SEQ ID NO: 187610 - DNA, 1569 bp, Artificial Sequence
  derived and/or modified sequence
atggccgccgtggccgtggccgtgcgggaggacagcggcagcggcatgaaagccgagctgcctccggggccaggcgccgtgggaagagagatgactaaggaagagaagctgcaactccgcaaagagaagaagcagcagaaaaagaaaagaaaagaggagaagggtgctgaaccagagactggctctgctgtgtccgctgcccagtgccagggtcccacaagagaactccccgagtccggtatccagctcggtacaccccgagagaaagtacctgcagggcgttccaaagctgagctgcgcgcggagcgcagggccaagcaggaggctgagagggctttgaagcaggcgcggaaaggggaacagggaggtccccctcccaaggctagcccctcaactgctggggaaaccccttccggtgtcaagcggctgccagagtatcctcaagtcgacgatctgctcctgagacgcttggtgaaaaagcccgaacgacaacaggttcctacccgcaaagattacggatccaaagtgtcactcttctctcatctcccccagtactcgcggcagaattctctgactcagttcatgagtattccctcctccgtgatccatcctgccatggtacgccttggtctacagtacagccagggcctcgtctctggatctaacgctcggtgtatcgctctgctgagggcgctgcagcaggtcattcaagattacacaacaccacccaatgaagaattgtcacgggatctcgtaaataagttgaagccttatatgtcattcctcacgcagtgtcgcccactatccgcttcaatgcacaatgctataaagttcctgaacaaagagatcacctctgtgggaagctctaaacgtgaggaagaggcaaagtccgaattgagagctgccatcgatcgctacgtgcaggagaagattgtcctcgctgcccaggcaatctccagatttgcctaccaaaagatctcaaatggggacgttattttggtgtatggctgttcttccttagtgtccaggattctgcaggaagcatggaccgaagggcgtaggtttcgcgtcgttgttgtcgattccagaccgtggctggaggggaggcacaccctaagatccctggttcacgccggcgtgccagcatcttacctgctaatcccagctgctagctacgtactgcctgaggtgtcaaaagttctcctcggcgcccacgccctccttgctaacggaagcgtaatgtcccgcgttggaactgctcaactagcccttgttgcccgagcgcataacgtgcctgtcctggtatgttgtgaaacttacaagttctgtgagcgggtgcagactgacgccttcgtgtccaatgagctggatgaccctgatgacctgcagtgtaaacgcggggagcatgtggcgctggcaaattggcagaaccacgcaagccttagattgttaaacttagtctacgatgtgactcccccggagttggtggatctggtgattacagagctgggaatgataccctgttcaagcgtgccagtcgttctgcgggtcaagagttccgaccagtag

SEQ ID NO: 187611 - DNA, 1563 bp, Artificial Sequence
  derived and/or modified sequence
atggccgccgtggccgtggccgtgcgggaggacagcggcagcggcatgaaagctgaatccccttgggcgtgggtcggcagagagatgacgaaggaggagaagctgcaactgcgaaaggagaaaaagcagcaaaagaagaaacgcaaagaggagaagggagcagaacctgaaactggatctgcagtgagcgccgctcaatgtcagggccctaccagagagctgccagaatctgggattcaacttggcacccctcgcgagaaagtgcctgccggccgttccaaggccgagctaagggctgaaagacgggcaaagcaggaagccgagcgagcactgaaacaagcccggaagggggagcaagggggcccaccacccaaggcctccccatcgaccgcaggcgaaacaccttcaggagtgaaacgacttccggaatatccccaagtcgacgacctgctattgcgcaggctggtgaagaagccagagaggcagcaggtccctacacgcaaggactacggctccaaggtgagcctcttttcccatctaccccagtacagtcgccaaaactcactaacccagttcatgtcgataccttcaagtgtcatacatcctgcaatggtgaggttgggacttcaatactcacagggcctcgttagcggtagtaatgcaagatgcattgcattgctgcgggccctccaacaggtgatacaggattacaccaccccacctaatgaagaattgagcagggacctagtcaacaagctcaagccgtacatgtccttcctgactcagtgccgtccactctctgcctccatgcataatgctataaaattcctgaataaagagatcacgtctgttgggagcagcaagcgggaggaagaggccaagagtgagctgagggcagccattgataggtatgtccaggagaagatcgtgcttgcagctcaggctatatccagattcgcctatcagaagattagcaacggggacgtgatccttgtttatggatgtagttcgcttgttagccgcatacttcaagaagcctggactgagggacgtcgttttcgtgtggttgttgtagactcaagaccttggctggagggacgtcacacccttcggagcttggtacacgctggcgtgcccgcctcctatctactaatcccagcagcttcttacgtactgccagaagtcagtaaagtgctgctgggagcccacgcactgctggctaacggaagcgtgatgagtagggtaggaacagctcaactagcccttgtggcgagagctcacaacgttcctgttctcgtgtgttgtgagacttacaagttttgtgagagagtgcagactgatgcttttgtgtctaatgaactcgatgatcctgatgacctccaatgtaaaaggggcgagcacgtggccctcgcaaactggcagaatcatgcgtcgttgaggttactgaatctggtttacgacgttaccccccccgagctcgtggaccttgtgatcacagagttagggatgatcccctgcagctctgtgccagttgtactgagagttaaaagcagcgaccagtag

SEQ ID NO: 187612 - DNA, 1569 bp, Artificial Sequence
  derived and/or modified sequence
atggccgcagttgccgtggctgtgcgagaagatagtggtagtggcatgaaagcagagctgccaccaggcccaggagccgttggaagagagatgacaaaagaggagaaattacagctcagaaaagagaaaaaacagcagaaaaagaaacgcaaggaagaaaagggcgcagagccagagacaggctccgccgttagcgctgcgcagtgtcagggacccacacgcgagcttcccgagagcggcatccagctgggaactcctagagaaaaagttcccgctgggcgatcaaaagctgagttgcgggctgagagacgtgccaagcaagaggcagagagagcactgaaacaggctagaaagggggagcagggcggtccacccccaaaggcctcaccatccaccgctggtgagaccccaagtggcgtgaaaagactgccagagtaccctcaagttgatgacctgctcttaagaagattggtgaaaaagcctgagaggcagcaagtacccacgcgcaaggattacggttccaaagtgagcctatttagtcacctgccccagtacagcagacagaattctcttacccagttcatgtctatcccatccagcgtgattcaccctgcaatggtccgtttggggcttcagtactcgcagggactcgtatctgggtctaatgcacggtgtatcgcattgctgcgggctttgcagcaggtaattcaggattacacaaccccgcctaacgaggagctctctcgggacctagtgaacaagctcaaaccctacatgtcctttttgacccaatgccgacccctgagcgcctccatgcacaacgctattaagttcctgaataaagaaatcacatctgttggctccagcaagcgcgaagaagaagcaaagtccgaactgcgtgccgctatcgacagatatgttcaggaaaaaatcgtgctggccgctcaggctatttcgcggtttgcctaccaaaagatttccaatggagacgtgatcttggtgtatggttgtagttctttagtgtccagaattctgcaagaggcatggactgagggcagacgcttcagagtcgtggtggtggactcacgaccctggctggagggcagacacaccttgcgcagcctcgtgcacgctggggtaccagcatcatacttgctcataccggcagcttcctacgtgctgcctgaggtgtcaaaagtgcttctcggagcccacgccctgcttgcaaacggttctgtgatgtctcgggtgggtacagcgcagctggctctcgtggctcgggctcacaatgtgcctgtgttggtatgctgtgagacttacaagttttgcgaaagggttcagacagacgctttcgtgtcaaacgagcttgacgatccagacgatttgcagtgcaagagaggagagcacgtcgctttggcaaattggcagaatcacgcctcccttcgactgcttaatttggtctatgatgtgactcctcctgaactggtagatctcgtgattaccgagctgggcatgattccatgttcttctgtcccagtggtgctccgggttaaatcgagcgatcaatag

SEQ ID NO: 187613 - DNA, 1563 bp, Artificial Sequence
  derived and/or modified sequence
atggccgctgtagctgtcgcagtaagagaggatagcggctccggcatgaaagctgagtcgccgtgggcctgggttggccgagagatgacaaaggaggagaagctccagctgcggaaagagaagaagcagcagaagaaaaagaggaaagaagagaagggagctgagcccgagaccggctctgccgtgagcgctgctcaatgtcagggaccgactagggaactgcctgagtccggcatccagttgggcactcccagggagaaagtgcctgcaggccgatctaaagccgagctgcgggctgagaggagggctaaacaggaggccgagcgcgctctgaagcaggcaaggaagggtgaacagggcggaccccctcctaaggcctcgccctccacagccggagaaactccttctggagtgaagaggctccccgaatatcctcaggttgacgatctactgctacggagattggttaagaagcctgagaggcagcaggtgcctactcgcaaggattatggcagtaaggtgtctctgttctctcacctcccccagtacagcagacagaattctctgacccagttcatgtctatacccagttcagtcattcatcctgcaatggtgcggctgggattacagtactcccaggggttggtctcaggctctaatgccaggtgcatcgccctgctccgcgcactgcagcaggtcattcaggattacacgacacctccgaacgaagaactgtctagagatctggtaaacaagctgaagccgtacatgagctttttaacgcagtgcagaccgctgtcagcgtctatgcataatgcaattaaattcctcaacaaagagatcaccagtgtagggtcctcaaaacgtgaagaagaagccaaatccgaattgcgtgcggcaatagataggtatgttcaggagaagatagtgttggccgctcaggccatatcaagattcgcctaccaaaagattagtaacggggacgtaattctcgtctatggctgtagcagtctggtgtcgcggattctgcaggaagcctggaccgaaggcaggaggttccgcgtggtcgtggtcgatagccggccttggctggagggccgtcacaccctgcggtctttggtgcacgcgggtgttcccgcatcttatcttttgataccagctgcttcttacgttttgccagaagtttcaaaggtgctgttaggtgctcacgccctgctcgccaacggtagcgtcatgagccgggtcggaacagcccaattggccttggtcgctcgggcacacaacgttccagtgctagtgtgttgcgaaacttacaaattctgcgagagagtgcaaactgacgcgttcgtgtcgaatgaacttgacgaccccgacgacttacagtgcaaacgtggtgagcacgtggcactggcaaattggcagaaccacgcttctctcagattattgaacctggtgtatgatgtgacaccccctgaacttgttgatttggtgataacagaactagggatgatcccttgctcatctgtgcctgtagtgctcagagtgaagtctagcgatcaatag

SEQ ID NO: 187614 - DNA, 1569 bp, Artificial Sequence
  derived and/or modified sequence
atggccgccgtggccgtggccgtgagagaggacagcggcagcggcatgaaggccgagctgccccccggccccggcgccgtgggcagagagatgaccaaggaggagaagctgcagctgagaaaggagaagaagcagcagaagaagaagagaaaggaggagaagggcgccgagcccgagaccggcagcgccgtgagcgccgcccagtgccagggccccaccagagagctgcccgagagcggcatccagctgggcacccccagagagaaggtgcccgccggcagaagcaaggccgagctgagagccgagagaagagccaagcaggaggccgagagagccctgaagcaggccagaaagggcgagcagggcggccccccccccaaggccagccccagcaccgccggcgagacccccagcggcgtgaagagactgcccgagtacccccaggtggacgacctgctgctgagaagactggtgaagaagcccgagagacagcaggtgcccaccagaaaggactacggcagcaaggtgagcctgttcagccacctgccccagtacagcagacagaacagcctgacccagttcatgagcatccccagcagcgtgatccaccccgccatggtgagactgggcctgcagtacagccagggcctggtgagcggcagcaacgccagatgcatcgccctgctgagagccctgcagcaggtgatccaggactacaccaccccccccaacgaggagctgagcagagacctggtgaacaagctgaagccctacatgagcttcctgacccagtgcagacccctgagcgccagcatgcacaacgccatcaagttcctgaacaaggagatcaccagcgtgggcagcagcaagagagaggaggaggccaagagcgagctgagagccgccatcgacagatacgtgcaggagaagatcgtgctggccgcccaggccatcagcagattcgcctaccagaagatcagcaacggcgacgtgatcctggtgtacggctgcagcagcctggtgagcagaatcctgcaggaggcctggaccgagggcagaagattcagagtggtggtggtggacagcagaccctggctggagggcagacacaccctgagaagcctggtgcacgccggcgtgcccgccagctacctgctgatccccgccgccagctacgtgctgcccgaggtgagcaaggtgctgctgggcgcccacgccctgctggccaacggcagcgtgatgagcagagtgggcaccgcccagctggccctggtggccagagcccacaacgtgcccgtgctggtgtgctgcgagacctacaagttctgcgagagagtgcagaccgacgccttcgtgagcaacgagctggacgaccccgacgacctgcagtgcaagagaggcgagcacgtggccctggccaactggcagaaccacgccagcctgagactgctgaacctggtgtacgacgtgaccccccccgagctggtggacctggtgatcaccgagctgggcatgatcccctgcagcagcgtgcccgtggtgctgagagtgaagagcagcgaccagtag

SEQ ID NO: 187615 - DNA, 1563 bp, Artificial Sequence
  derived and/or modified sequence
atggccgccgtggccgtggccgtgagagaggacagcggcagcggcatgaaggccgagagcccctgggcctgggtgggcagagagatgaccaaggaggagaagctgcagctgagaaaggagaagaagcagcagaagaagaagagaaaggaggagaagggcgccgagcccgagaccggcagcgccgtgagcgccgcccagtgccagggccccaccagagagctgcccgagagcggcatccagctgggcacccccagagagaaggtgcccgccggcagaagcaaggccgagctgagagccgagagaagagccaagcaggaggccgagagagccctgaagcaggccagaaagggcgagcagggcggccccccccccaaggccagccccagcaccgccggcgagacccccagcggcgtgaagagactgcccgagtacccccaggtggacgacctgctgctgagaagactggtgaagaagcccgagagacagcaggtgcccaccagaaaggactacggcagcaaggtgagcctgttcagccacctgccccagtacagcagacagaacagcctgacccagttcatgagcatccccagcagcgtgatccaccccgccatggtgagactgggcctgcagtacagccagggcctggtgagcggcagcaacgccagatgcatcgccctgctgagagccctgcagcaggtgatccaggactacaccaccccccccaacgaggagctgagcagagacctggtgaacaagctgaagccctacatgagcttcctgacccagtgcagacccctgagcgccagcatgcacaacgccatcaagttcctgaacaaggagatcaccagcgtgggcagcagcaagagagaggaggaggccaagagcgagctgagagccgccatcgacagatacgtgcaggagaagatcgtgctggccgcccaggccatcagcagattcgcctaccagaagatcagcaacggcgacgtgatcctggtgtacggctgcagcagcctggtgagcagaatcctgcaggaggcctggaccgagggcagaagattcagagtggtggtggtggacagcagaccctggctggagggcagacacaccctgagaagcctggtgcacgccggcgtgcccgccagctacctgctgatccccgccgccagctacgtgctgcccgaggtgagcaaggtgctgctgggcgcccacgccctgctggccaacggcagcgtgatgagcagagtgggcaccgcccagctggccctggtggccagagcccacaacgtgcccgtgctggtgtgctgcgagacctacaagttctgcgagagagtgcagaccgacgccttcgtgagcaacgagctggacgaccccgacgacctgcagtgcaagagaggcgagcacgtggccctggccaactggcagaaccacgccagcctgagactgctgaacctggtgtacgacgtgaccccccccgagctggtggacctggtgatcaccgagctgggcatgatcccctgcagcagcgtgcccgtggtgctgagagtgaagagcagcgaccagtag

SEQ ID NO: 187616 - protein, 421 aa, Artificial Sequence
  derived and/or modified sequence
LNLEVKFKKMGLGHEQGFGAPCLKCKEKCEGFELHFWRKICRNCKCGQEEHDVLLSNEEDRKVGKLFEDTKYTTLIAKLKSDGIPMYKRNVMILTNPVAAKKNVSINTVTYEWAPPVQNQALARQYMQMLPKEKQPVAGSEGAQYRKKQLAKQLPAHDQDPSKCHELSPREVKEMEQFVKKYKSEALGVGDVKLPCEMDAQGPKQMNIPGGDRSTPAAVGAMEDKSAEHKRTQYSCYCCKLSMKEGDPAIYAERAGYDKLWHPACFVCSTCHELLVDMIYFWKNEKLYCGRHYCDSEKPRCAGCDELIFSNEYTQAENQNWHLKHFCCFDCDSILAGEIYVMVNDKPVCKPCYVKNHAVVCQGCHNAIDPEVQRVTYNNFSWHASTECFLCSCCSKCLIGQKFMPVEGMVFCSVECKKRMS

SEQ ID NO: 187617 - protein, 421 aa, Artificial Sequence
  derived and/or modified sequence
MDLENKVKKMGLGHEQGFGAPCLKCKEKCEGFELHFWRKICRNCKCGQEEHDVLLSNEEDRKVGKLFEDTKYTTLIAKLKSDGIPMYKRNVMILTNPVAAKKNVSINTVTYEWAPPVQNQALARQYMQMLPKEKQPVAGSEGAQYRKKQLAKQLPAHDQDPSKCHELSPREVKEMEQFVKKYKSEALGVGDVKLPCEMDAQGPKQMNIPGGDRSTPAAVGAMEDKSAEHKRTQYSCYCCKLSMKEGDPAIYAERAGYDKLWHPACFVCSTCHELLVDMIYFWKNEKLYCGRHYCDSEKPRCAGCDELIFSNEYTQAENQNWHLKHFCCFDCDSILAGEIYVMVNDKPVCKPCYVKNHAVVCQGCHNAIDPEVQRVTYNNFSWHASTECFLCSCCSKCLIGQKFMPVEGMVFCSVECKKRMS

SEQ ID NO: 187618 - protein, 412 aa, Artificial Sequence
  derived and/or modified sequence
MGLGHEQGFGAPCLKCKEKCEGFELHFWRKICRNCKCGQEEHDVLLSNEEDRKVGKLFEDTKYTTLIAKLKSDGIPMYKRNVMILTNPVAAKKNVSINTVTYEWAPPVQNQALARQYMQMLPKEKQPVAGSEGAQYRKKQLAKQLPAHDQDPSKCHELSPREVKEMEQFVKKYKSEALGVGDVKLPCEMDAQGPKQMNIPGGDRSTPAAVGAMEDKSAEHKRTQYSCYCCKLSMKEGDPAIYAERAGYDKLWHPACFVCSTCHELLVDMIYFWKNEKLYCGRHYCDSEKPRCAGCDELIFSNEYTQAENQNWHLKHFCCFDCDSILAGEIYVMVNDKPVCKPCYVKNHAVVCQGCHNAIDPEVQRVTYNNFSWHASTECFLCSCCSKCLIGQKFMPVEGMVFCSVECKKRMS

SEQ ID NO: 187619 - DNA, 1266 bp, Artificial Sequence
  derived and/or modified sequence
ctgaacctggaggtgaagttcaagaagatgggcctgggccacgagcagggcttcggcgccccctgcctgaagtgcaaggagaagtgcgagggcttcgagctgcacttctggagaaagatctgcagaaactgcaagtgcggccaggaggagcacgacgtgctgctgagcaacgaggaggacagaaaggtgggcaagctgttcgaggacaccaagtacaccaccctgatcgccaagctgaagagcgacggcatccccatgtacaagagaaacgtgatgatcctgaccaaccccgtggccgccaagaagaacgtgagcatcaacaccgtgacctacgagtgggccccccccgtgcagaaccaggccctggccagacagtacatgcagatgctgcccaaggagaagcagcccgtggccggcagcgagggcgcccagtacagaaagaagcagctggccaagcagctgcccgcccacgaccaggaccccagcaagtgccacgagctgagccccagagaggtgaaggagatggagcagttcgtgaagaagtacaagagcgaggccctgggcgtgggcgacgtgaagctgccctgcgagatggacgcccagggccccaagcagatgaacatccccggcggcgacagaagcacccccgccgccgtgggcgccatggaggacaagagcgccgagcacaagagaacccagtacagctgctactgctgcaagctgagcatgaaggagggcgaccccgccatctacgccgagagagccggctacgacaagctgtggcaccccgcctgcttcgtgtgcagcacctgccacgagctgctggtggacatgatctacttctggaagaacgagaagctgtactgcggcagacactactgcgacagcgagaagcccagatgcgccggctgcgacgagctgatcttcagcaacgagtacacccaggccgagaaccagaactggcacctgaagcacttctgctgcttcgactgcgacagcatcctggccggcgagatctacgtgatggtgaacgacaagcccgtgtgcaagccctgctacgtgaagaaccacgccgtggtgtgccagggctgccacaacgccatcgaccccgaggtgcagagagtgacctacaacaacttcagctggcacgccagcaccgagtgcttcctgtgcagctgctgcagcaagtgcctgatcggccagaagttcatgcccgtggagggcatggtgttctgcagcgtggagtgcaagaagagaatgagctag

SEQ ID NO: 187620 - DNA, 1266 bp, Artificial Sequence
  derived and/or modified sequence
atggacctggagaacaaggtgaagaagatgggcctgggccacgagcagggcttcggcgccccctgcctgaagtgcaaggagaagtgcgagggcttcgagctgcacttctggagaaagatctgcagaaactgcaagtgcggccaggaggagcacgacgtgctgctgagcaacgaggaggacagaaaggtgggcaagctgttcgaggacaccaagtacaccaccctgatcgccaagctgaagagcgacggcatccccatgtacaagagaaacgtgatgatcctgaccaaccccgtggccgccaagaagaacgtgagcatcaacaccgtgacctacgagtgggccccccccgtgcagaaccaggccctggccagacagtacatgcagatgctgcccaaggagaagcagcccgtggccggcagcgagggcgcccagtacagaaagaagcagctggccaagcagctgcccgcccacgaccaggaccccagcaagtgccacgagctgagccccagagaggtgaaggagatggagcagttcgtgaagaagtacaagagcgaggccctgggcgtgggcgacgtgaagctgccctgcgagatggacgcccagggccccaagcagatgaacatccccggcggcgacagaagcacccccgccgccgtgggcgccatggaggacaagagcgccgagcacaagagaacccagtacagctgctactgctgcaagctgagcatgaaggagggcgaccccgccatctacgccgagagagccggctacgacaagctgtggcaccccgcctgcttcgtgtgcagcacctgccacgagctgctggtggacatgatctacttctggaagaacgagaagctgtactgcggcagacactactgcgacagcgagaagcccagatgcgccggctgcgacgagctgatcttcagcaacgagtacacccaggccgagaaccagaactggcacctgaagcacttctgctgcttcgactgcgacagcatcctggccggcgagatctacgtgatggtgaacgacaagcccgtgtgcaagccctgctacgtgaagaaccacgccgtggtgtgccagggctgccacaacgccatcgaccccgaggtgcagagagtgacctacaacaacttcagctggcacgccagcaccgagtgcttcctgtgcagctgctgcagcaagtgcctgatcggccagaagttcatgcccgtggagggcatggtgttctgcagcgtggagtgcaagaagagaatgagctag

SEQ ID NO: 187621 - DNA, 1266 bp, Artificial Sequence
  derived and/or modified sequence
ctgaacctagaggtgaaattcaagaaaatgggtctaggacacgagcagggtttcggtgccccgtgccttaaatgcaaggagaagtgcgagggctttgagttgcacttctggagaaaaatctgccgcaattgcaagtgtgggcaagaagagcacgatgtgctgctgagcaacgaagaggatagaaaggtggggaaactttttgaagataccaagtacactactctcattgccaagctgaaatcagacgggataccaatgtataagagaaatgttatgatcttgacaaatccagtggccgcgaagaaaaatgtgtccattaacactgtgacctatgagtgggcgcccccagtccagaatcaggcactagcacgtcagtatatgcaaatgctgccaaaggaaaaacagccagtagcaggaagcgagggagcccagtaccggaagaaacagttagcaaaacagctcccagcccacgaccaggatcccagcaaatgtcatgaactatcaccacgggaggtgaaggaaatggaacagtttgtgaagaagtacaagtctgaggctctcggcgtgggagacgtgaagctgccatgcgagatggatgcccagggaccaaaacagatgaatatacccggaggcgaccgaagtacccccgcagcagtcggggcaatggaagataaaagtgctgaacacaagcgaacacagtactcctgttactgttgtaaacttagtatgaaggagggagacccagccatctatgctgagcgcgctggatatgacaagctgtggcaccctgcctgcttcgtttgttccacctgtcatgaactgctggttgacatgatttacttctggaagaacgaaaagttgtattgtggccgccactattgtgattccgaaaaacctcgatgtgctgggtgtgacgagctgatttttagtaacgaatacacgcaggcggagaaccagaactggcaccttaaacacttctgctgcttcgactgtgattccatactggcaggagagatctacgtcatggtaaacgataaacctgtctgcaaaccctgctatgtaaagaatcacgccgtcgtttgtcaaggatgccacaatgctatcgacccggaggtgcaaagggtgacttacaacaatttctcctggcatgcttcgacggagtgtttcctctgttcctgttgtagcaaatgtctgataggacaaaagttcatgcctgtggagggcatggtgttctgctctgtagaatgcaaaaagaggatgtcctag

SEQ ID NO: 187622 - DNA, 1266 bp, Artificial Sequence
  derived and/or modified sequence
atggatcttgagaacaaagtgaaaaagatgggtctgggccatgaacagggattcggcgctccgtgcctgaaatgcaaagagaaatgtgagggctttgagctccacttttggaggaagatctgccgcaattgtaagtgtgggcaagaagagcacgatgtcctgctcagcaacgaagaggacaggaaggtggggaagcttttcgaggatacaaagtataccacgctcatcgcaaagctgaaaagtgacgggattcctatgtataagcgcaatgttatgattctcactaaccctgttgcagctaaaaagaacgtgtccatcaacaccgtcacatacgaatgggctccccccgtacagaatcaagcattagctcggcagtacatgcagatgctacccaaggagaagcagcctgtagcaggttctgaaggagcccagtaccgaaagaagcagctggcaaagcagctccctgctcacgatcaggatcccagcaaatgccacgaactgagtccgcgggaggtcaaggaaatggaacagttcgttaaaaaatacaagtcagaagcactcggcgtcggggacgtaaagctgccgtgcgagatggatgctcagggacccaagcagatgaatatccctggcggggaccgcagcacccccgctgctgtcggcgccatggaagataaaagtgcagaacataaaaggacacaatattcctgttattgctgcaagctatccatgaaggagggggatccagccatatacgcggagcgggctggctatgacaaactgtggcaccccgcttgcttcgtctgctcgacatgccacgagctgttggtggatatgatctacttttggaaaaacgagaaattgtattgtgggcgtcactactgtgacagcgagaagcccagatgcgctggctgcgatgaattgatctttagtaatgagtacacacaggcagagaatcagaactggcatcttaagcatttctgttgctttgactgtgacagtatcctggccggagagatctacgtaatggtcaatgacaagcccgtgtgtaaaccctgctacgtgaaaaaccacgcggtagtgtgtcaagggtgccataacgcaatagatcccgaggtccagcgcgttacctacaataatttttcttggcatgctagtacggaatgcttcttatgttcttgctgcagtaaatgcctgattgggcaaaagtttatgcctgtagagggaatggtgttttgtagtgtagagtgcaagaaaagaatgagttag

SEQ ID NO: 187623 - DNA, 1266 bp, Artificial Sequence
  derived and/or modified sequence
ctcaacctggaggtgaagttcaagaagatgggcctgggccacgagcagggctttggagccccctgcctgaagtgcaaggagaagtgtgagggctttgagctgcacttctggaggaagatctgcaggaactgcaagtgtggccaggaggagcatgatgtgctgctgagcaatgaggaggacaggaaggtgggcaagctgtttgaggacaccaagtacaccaccctcatcgccaagctgaagagtgatggcatccccatgtacaagagaaatgtgatgatcctgaccaaccctgtggccgccaagaagaatgtgtccatcaacacagtgacctatgagtgggcccctcctgtgcagaaccaggccctggcccggcagtacatgcagatgctgcccaaggagaagcagcctgtggccggcagcgagggcgcccagtacaggaagaagcagctggccaagcagctgcctgcccatgaccaggaccccagcaaatgtcatgagctgagcccccgggaggtgaaggagatggagcagtttgtgaagaagtacaagtctgaggccctgggcgtgggagatgtgaagctgccctgtgagatggatgcccagggccccaagcagatgaacatccctggaggagacaggagcaccccagctgctgtgggcgccatggaggacaagtctgctgagcacaagaggacccagtacagctgctactgctgcaagctgtccatgaaggagggggaccctgccatctatgcagagagagctggctatgacaagctgtggcacccagcctgctttgtgtgcagcacctgccacgagctgctggtggacatgatctacttctggaagaatgagaagctgtactgcggccgccactactgtgacagcgagaagccccgctgtgccggctgtgatgagctgatcttcagcaatgagtacacccaggccgagaaccagaactggcacctgaagcacttctgctgctttgactgtgacagcatcctggccggggagatctacgtgatggtgaatgacaagcctgtgtgcaagccctgctacgtgaagaaccacgctgtggtgtgccagggctgccacaatgccatcgaccctgaggtgcagagggtgacctacaacaacttctcctggcacgccagcacagagtgcttcctgtgcagctgctgcagcaagtgcctgattggccagaagttcatgcctgtggagggcatggtgttctgcagcgtggagtgcaagaagaggatgtcctag

SEQ ID NO: 187624 - DNA, 1266 bp, Artificial Sequence
  derived and/or modified sequence
atggacctggagaacaaggtgaagaagatgggcctgggccacgagcagggctttggagccccctgcctgaagtgcaaggagaagtgtgagggctttgagctgcacttctggaggaagatctgcaggaactgcaagtgtggccaggaggagcatgatgtgctgctgagcaatgaggaggacaggaaggtgggcaagctgtttgaggacaccaagtacaccaccctcatcgccaagctgaagagtgatggcatccccatgtacaagagaaatgtgatgatcctgaccaaccctgtggccgccaagaagaatgtgtccatcaacacagtgacctatgagtgggcccctcctgtgcagaaccaggccctggcccggcagtacatgcagatgctgcccaaggagaagcagcctgtggccggcagcgagggcgcccagtacaggaagaagcagctggccaagcagctgcctgcccatgaccaggaccccagcaaatgtcatgagctgagcccccgggaggtgaaggagatggagcagtttgtgaagaagtacaagtctgaggccctgggcgtgggagatgtgaagctgccctgtgagatggatgcccagggccccaagcagatgaacatccctggaggagacaggagcaccccagctgctgtgggcgccatggaggacaagtctgctgagcacaagaggacccagtacagctgctactgctgcaagctgtccatgaaggagggggaccctgccatctatgcagagagagctggctatgacaagctgtggcacccagcctgctttgtgtgcagcacctgccacgagctgctggtggacatgatctacttctggaagaatgagaagctgtactgcggccgccactactgtgacagcgagaagccccgctgtgccggctgtgatgagctgatcttcagcaatgagtacacccaggccgagaaccagaactggcacctgaagcacttctgctgctttgactgtgacagcatcctggccggggagatctacgtgatggtgaatgacaagcctgtgtgcaagccctgctacgtgaagaaccacgctgtggtgtgccagggctgccacaatgccatcgaccctgaggtgcagagggtgacctacaacaacttctcctggcacgccagcacagagtgcttcctgtgcagctgctgcagcaagtgcctgattggccagaagttcatgcctgtggagggcatggtgttctgcagcgtggagtgcaagaagaggatgtcctag

SEQ ID NO: 187625 - DNA, 1266 bp, Artificial Sequence
  derived and/or modified sequence
ctgaacctggaggtgaagttcaagaagatgggcctgggccacgagcagggatttggcgccccctgtctgaagtgcaaagagaagtgtgaggggtttgaactgcacttctggcgcaagatttgcaggaactgcaagtgcggacaggaggagcacgatgttcttctaagcaacgaggaagacaggaaagtcggtaaactttttgaggacactaagtatacgacattaattgcaaaactgaagagtgacggcatcccaatgtacaagcgtaacgtgatgattttgacgaaccccgtcgcagctaaaaagaatgtgtctattaacacagtgacttacgagtgggccccccctgtgcagaatcaagcactcgcccgtcagtacatgcaaatgttgccaaaggagaaacagccagtagcaggatcggagggagcccagtatcggaaaaagcagctggccaaacagctgcccgcccatgaccaggacccatccaaatgccacgagctgtctccacgggaagtcaaggagatggagcagtttgtcaaaaagtataagtctgaggccctgggcgtgggcgacgtcaagctgccctgtgaaatggatgcccagggacctaagcaaatgaacatcccaggcggggatagatcaacaccggcagctgtgggcgctatggaggataagagtgctgagcacaaacgcacacagtactcctgctactgttgcaagctcagcatgaaagaaggcgatcctgcaatatatgccgagagggccggctacgacaagctgtggcacccggcctgtttcgtatgctctacatgtcacgagctgctagtggatatgatatacttttggaagaatgagaaattatactgcggccgtcactactgcgattctgaaaagcccaggtgcgccggctgtgacgaattaatattcagcaatgagtacacccaggcagagaatcaaaattggcatctcaaacatttttgctgtttcgactgtgactccattctggccggtgagatatatgtgatggtcaacgataagccagtttgcaagccatgctatgtgaagaatcacgccgtggtgtgtcaaggatgccataacgcaattgatccagaggtgcagcgcgtgacctataacaacttttcttggcacgctagcactgagtgctttctatgctcgtgctgcagtaaatgccttattggccaaaagttcatgccagtggagggaatggttttttgcagcgttgaatgtaaaaaaagaatgtcatag

SEQ ID NO: 187626 - DNA, 1266 bp, Artificial Sequence
  derived and/or modified sequence
atggacctggagaacaaggtgaagaagatgggcctgggccacgagcaggggttcggcgcaccatgtcttaaatgtaaagagaaatgcgagggatttgagttacacttctggaggaagatctgtcgcaactgtaaatgcggtcaggaggaacatgatgtgcttctatcgaacgaagaggaccgtaaagttgggaaactatttgaggatacgaaatacaccaccctgatcgcaaagttaaaatccgatggaataccaatgtataagagaaacgtgatgatactgactaatccagtggctgctaagaaaaatgtctccatcaatacagtgacgtacgaatgggccccacccgtacagaaccaggcactggcaagacagtatatgcaaatgctcccgaaggagaagcagcccgtggccggaagtgagggtgcccaatataggaaaaaacagctggccaaacagctgccggctcacgatcaggacccatctaaatgtcatgaactgtccccaagggaagtgaaagagatggagcagttcgtcaagaagtacaaatcagaggcccttggcgttggggacgtgaagctaccctgcgagatggacgcccaggggcctaaacagatgaatatacccgggggtgacagatctaccccagccgctgtgggcgcaatggaagataagtcagccgaacataaaaggacccagtacagctgttattgttgcaaactgtcaatgaaagagggagatcccgcaatatacgcggagcgcgctggttacgataagctgtggcatcccgcgtgcttcgtgtgctccacctgtcacgagttactggttgacatgatctacttttggaaaaatgagaagctctattgcgggaggcactactgtgactccgagaagccaagatgcgccggctgcgatgaacttatcttcagtaacgagtatactcaagcagagaatcagaattggcaccttaagcacttctgctgctttgattgcgatagtatactcgctggcgaaatctatgtgatggtaaacgataagccagtctgtaaaccatgttacgttaagaaccatgctgtggtgtgccagggctgtcacaacgctattgatccggaggtacagcgcgtcacatacaacaatttctcctggcacgctagcactgaatgctttctctgtagttgttgctcgaagtgtctgatcggtcaaaaattcatgcccgtggaggggatggtgttctgcagtgtggaatgcaaaaagcgaatgtcctag

SEQ ID NO: 187627 - DNA, 1266 bp, Artificial Sequence
  derived and/or modified sequence
ttgaatctcgaagttaagtttaaaaaaatgggtctgggccatgagcaaggttttggagcgccatgcctgaagtgcaaagagaagtgcgagggtttcgagcttcacttctggcgaaagatttgtcgaaactgcaagtgcggtcaagaggagcacgatgttctgttaagtaacgaggaggaccgtaaggttggtaaactctttgaagacactaagtatacaacacttatagccaaactaaaatctgacggtatccctatgtacaagcgcaatgtgatgatccttaccaatcctgtcgctgctaaaaaaaatgtcagcattaacactgtgacgtatgaatgggccccaccagtgcagaaccaggccctggcacgccaatacatgcaaatgctacctaaagaaaagcagcccgtggcaggcagcgaaggggcacagtacaggaagaagcagcttgcaaagcagctgccagcccacgaccaagacccatctaaatgtcacgaactgtctccacgcgaagtgaaggagatggagcagtttgttaaaaaatataagtcggaggcattaggggttggggacgtgaagctgccttgcgaaatggatgctcaaggcccaaaacagatgaacatcccgggaggtgataggtctacccccgctgccgttggggctatggaagacaagtctgccgagcacaagcgcacacagtacagctgctattgctgtaagttgtctatgaaggaaggtgatccagccatttatgcggagcgcgctggatacgataaactgtggcatcccgcttgctttgtttgttctacgtgtcacgagctgctggtcgatatgatctacttctggaaaaatgaaaagctgtactgcgggcgacattactgcgattctgaaaaacccaggtgtgcagggtgcgacgaattaatttttagtaacgagtatacccaagcagagaaccagaactggcacttaaaacatttttgctgctttgattgcgactctattttggccggagagatctacgtgatggtcaacgacaaaccagtttgtaagccctgttatgttaaaaatcatgctgttgtatgtcagggctgtcataatgccatcgatccggaggtgcaaagggtcacttacaacaatttttcatggcatgcgtctacagagtgctttctttgctcatgttgtagcaagtgccttatcggacagaaattcatgcctgtagaggggatggtattttgctcggtcgagtgtaaaaagcggatgtcttag

SEQ ID NO: 187628 - DNA, 1266 bp, Artificial Sequence
  derived and/or modified sequence
atggatttagaaaacaaggttaagaagatggggctcggacacgaacaggggtttggagctccttgcttgaagtgtaaagaaaaatgcgaaggcttcgagctgcacttctggagaaaaatttgccgaaactgtaagtgtggtcaggaggaacatgatgtacttctcagtaacgaggaagacagaaaagtaggcaagctgtttgaggacactaagtatacaacactgattgccaaacttaagtcggatggcattcccatgtacaaacggaacgttatgattttgacgaacccagtagcagccaagaagaacgtcagcataaacaccgtaacctacgaatgggcgcctccggtgcagaaccaagcgctggcacgccaatacatgcagatgctacccaaagaaaagcagcctgttgccggaagcgagggagcccagtatcgaaagaagcaactggcgaaacagctacccgcacacgaccaggacccctcaaaatgtcacgagctaagcccacgcgaggtgaaggagatggagcaattcgtaaagaagtacaaaagcgaggccttgggtgtcggtgatgtcaagctgccttgcgaaatggacgcccaaggtcccaagcagatgaacatccctggaggggatagaagcacccccgctgccgtcggagccatggaagacaaaagtgctgagcataaaaggacacagtattcttgctattgttgcaagctctccatgaaggaaggggaccccgcaatctatgccgaaagagccggatacgacaaactgtggcaccctgcctgcttcgtgtgcagcacttgccacgagctacttgtggatatgatctatttctggaagaatgaaaaactctactgcgggcgtcattattgcgatagcgagaaaccaaggtgtgcgggatgcgacgagctcatttttagcaacgaatacacccaagccgagaatcaaaactggcatctgaaacacttttgctgttttgactgtgacagcatcctggctggcgaaatctatgtcatggttaatgacaagccggtatgcaagccttgctatgtgaagaaccatgcagtggtgtgtcagggatgccataatgcgatcgatccggaggtacagcgggtcacctacaacaacttttcatggcacgcaagcactgagtgtttcctatgctcttgctgctctaagtgtttaattggccagaagtttatgccagtggagggcatggtattctgctccgtcgagtgcaaaaagcgaatgtcctag

SEQ ID NO: 187629 - DNA, 2565 bp, Artificial Sequence
  derived and/or modified sequence
ttaaatttagaggtcaaattcaaaaaaatgggcttaggtcacgagcaaggatttggagccccttgtttaaaatgcaaagaaaaatgtgaaggattcgaactgcacttctggagaaaaatatgtcgtaactgcaagtgtggccaagaagagcatgatgtcctcttgagcaatgaagaggatcgaaaagtgggaaaactttttgaagacaccaagtataccactctgattgcaaaactaaagtcagatggaattcccatgtataaacgcaatgttatgatattgacgaatccagttgctgccaagaagaatgtctccatcaatacagttacctatgagtgggctcctcctgtccagaatcaagcattggccaggcagtacatgcagatgctacccaaggaaaagcagccagtagcaggctcagagggggcacagtaccggaagaagcagctggcaaagcagctccctgcacatgaccaggacccttcaaagtgccatgagttgtctcccagagaggtgaaggagatggagcagtttgtgaagaaatataagagcgaagctctgggagtaggagatgtcaaacttccctgtgagatggatgcccaaggccccaaacaaatgaacattcctggaggggatagaagcaccccagcagcagtgggggccatggaggacaaatctgctgagcacaaaagaactcaatattcctgctattgctgcaaactgagtatgaaagaaggtgacccagccatctatgccgaaagggctggctatgataaactgtggcacccagcttgttttgtctgcagcacctgccatgaactcctggttgacatgatttatttttggaagaatgagaagctatactgtggcagacattactgtgacagcgagaaaccccgatgtgctggctgtgacgagctgatattcagcaatgagtatacccaggcagaaaaccagaattggcacctgaaacacttctgctgctttgactgtgatagcattctagctggggagatatacgtgatggtcaatgacaagcccgtgtgcaagccctgctatgtgaagaatcacgctgtggtgtgtcaaggatgccacaatgccatcgacccagaagtgcagcgggtgacctataacaatttcagctggcatgcatccacagagtgctttctgtgctcttgctgcagcaaatgcctcattgggcagaagttcatgccagtagaagggatggttttctgttcagtggaatgtaagaagaggatgtcttaggaggagggcacccagaagtatcgagccatagctatccaaagtggtctgcatttctactgtaaaatgcaatttgaaaaaaataaaacgcaaaaaaagaaactgtaaaggaaaccaagagattttgtttaatttttttggccattttttcttcatcaattttttttcggtctcaacttttaaacttggtttaagcatttgatttgtaaaacagtaaataattgtatctttccatagcttttcaaatgtgaaatcatttttggaagcttggatctcattaaacttcatgtctctattccatttgtgccacacacttaaaagttagtgtactgaatggaaagatgagcattcctagttctacacttcttttttccccctcatgtgtaaaatgaaaagaaaactaaatttgccctaataccaaggcgctacgtttattgcctcgtcttattcactgacctttgtaatgatacacagtgaattctttttgacaaagagaaatgcagtgtagtatgcagagctgctgttttaatgcctatgcatttactctttcctgatttaggcagaggtggcattttctttattgcatttctctatttttttaatgtaccctaccttcagtattctctttgtaagttggtgacttgcatctgtggccttgaatattttattatcacatgtggcataacagtatccacactttttagttctttatttttttttttttattttgagcaattctcctgcctcagcctcccaaatagctgggattacaggtgcatgccaccacacccagctaatttttgtatttttagtagagacaggttttcaccatgttagccaggctggtctcaaactcctgacctcagatgatccgcctgccttggcctcccaaagtgctgggattacaggtgtgggagccaccatgcctgacccacacactttttacttgtatagatgatttttggcttggacataaaagccaagccacccatttgcttttaatccaaagaacatgtatagtttttgtacccagagactatgatttatattgattgcacttgcctgccatgatttagataagattttttttgcatggtttttattctttcctaatggatcctgttttataatacttccaagcctgtccatggatatatcaaatgtcttcacttgtatattttcatggctaggtatttctaatgtttattcttccctgtgtacttctacacatagctatgcactatgaaaattaaatggaatgaatgatatgtatattactcaaaataaagtttctttcacttt

SEQ ID NO: 187630 - DNA, 2782 bp, Artificial Sequence
  derived and/or modified sequence
attggctgcccggccccctttgttcccgggtccgggccgcaggcccgctgcggcggactgggcggcggaagttcgacggcgccgggcgagtggctgttgagcggcgccgcgggagttccgcaggtttcccgtgttcgcagcggagccggaggccagctgaacccggccgtgggatcccggataggaggaggaggggacccataggacgcgttaacatggacctggaaaacaaagtgaagaagatgggcttaggtcacgagcaaggatttggagccccttgtttaaaatgcaaagaaaaatgtgaaggattcgaactgcacttctggagaaaaatatgtcgtaactgcaagtgtggccaagaagagcatgatgtcctcttgagcaatgaagaggatcgaaaagtgggaaaactttttgaagacaccaagtataccactctgattgcaaaactaaagtcagatggaattcccatgtataaacgcaatgttatgatattgacgaatccagttgctgccaagaagaatgtctccatcaatacagttacctatgagtgggctcctcctgtccagaatcaagcattggccaggcagtacatgcagatgctacccaaggaaaagcagccagtagcaggctcagagggggcacagtaccggaagaagcagctggcaaagcagctccctgcacatgaccaggacccttcaaagtgccatgagttgtctcccagagaggtgaaggagatggagcagtttgtgaagaaatataagagcgaagctctgggagtaggagatgtcaaacttccctgtgagatggatgcccaaggccccaaacaaatgaacattcctggaggggatagaagcaccccagcagcagtgggggccatggaggacaaatctgctgagcacaaaagaactcaatattcctgctattgctgcaaactgagtatgaaagaaggtgacccagccatctatgccgaaagggctggctatgataaactgtggcacccagcttgttttgtctgcagcacctgccatgaactcctggttgacatgatttatttttggaagaatgagaagctatactgtggcagacattactgtgacagcgagaaaccccgatgtgctggctgtgacgagctgatattcagcaatgagtatacccaggcagaaaaccagaattggcacctgaaacacttctgctgctttgactgtgatagcattctagctggggagatatacgtgatggtcaatgacaagcccgtgtgcaagccctgctatgtgaagaatcacgctgtggtgtgtcaaggatgccacaatgccatcgacccagaagtgcagcgggtgacctataacaatttcagctggcatgcatccacagagtgctttctgtgctcttgctgcagcaaatgcctcattgggcagaagttcatgccagtagaagggatggttttctgttcagtggaatgtaagaagaggatgtcttaggaggagggcacccagaagtatcgagccatagctatccaaagtggtctgcatttctactgtaaaatgcaatttgaaaaaaataaaacgcaaaaaaagaaactgtaaaggaaaccaagagattttgtttaatttttttggccattttttcttcatcaattttttttcggtctcaacttttaaacttggtttaagcatttgatttgtaaaacagtaaataattgtatctttccatagcttttcaaatgtgaaatcatttttggaagcttggatctcattaaacttcatgtctctattccatttgtgccacacacttaaaagttagtgtactgaatggaaagatgagcattcctagttctacacttcttttttccccctcatgtgtaaaatgaaaagaaaactaaatttgccctaataccaaggcgctacgtttattgcctcgtcttattcactgacctttgtaatgatacacagtgaattctttttgacaaagagaaatgcagtgtagtatgcagagctgctgttttaatgcctatgcatttactctttcctgatttaggcagaggtggcattttctttattgcatttctctatttttttaatgtaccctaccttcagtattctctttgtaagttggtgacttgcatctgtggccttgaatattttattatcacatgtggcataacagtatccacactttttagttctttatttttttttttttattttgagcaattctcctgcctcagcctcccaaatagctgggattacaggtgcatgccaccacacccagctaatttttgtatttttagtagagacaggttttcaccatgttagccaggctggtctcaaactcctgacctcagatgatccgcctgccttggcctcccaaagtgctgggattacaggtgtgggagccaccatgcctgacccacacactttttacttgtatagatgatttttggcttggacataaaagccaagccacccatttgcttttaatccaaagaacatgtatagtttttgtacccagagactatgatttatattgattgcacttgcctgccatgatttagataagattttttttgcatggtttttattctttcctaatggatcctgttttataatacttccaagcctgtccatggatatatcaaatgtcttcacttgtatattttcatggctaggtatttctaatgtttattcttccctgtgtacttctacacatagctatgcactatgaaaattaaatggaatgaatgatatgtatattactcaaaataaagtttctttcactttaa

SEQ ID NO: 187631 - protein, 691 aa, Artificial Sequence
  derived and/or modified sequence
MNAAVVRRTQEALGKVIRRPPLTEKLLSKPPFRYLHDIITEVIRMTGFMKGLYTDAEMKSDNVKDKDAKISFLQKAIDVVVMVSGEPLLAKPARIVAGHEPERTNELLQIIGKCCLNKLSSDDAVRRVLAGEKGEVKGRASLTSRSQELDNKNVREEESRVHKNTEDRGDAEIKERSTSRDRKQKEELKEDRKPREKDKDKEKAKENGGNRHREGERERAKARARPDNERQKDRGNRERDRDSERKKETERKSEGGKEKERLRDRDRERDRDKGKDRDRRRVKNGEHSWDLDREKNREHDKPEKKSASSGEMSKKLSDGTFKDSKAETETEISTRASKSLTTKTSKRRSKNSVEGRKEDNISAKSLDSIVSGINNEPNQETTTSEIGTKEANINSTSISDDNSASLRCENIQPNPTEKQKGDSTSDAEGDAGPAGQDKSEVPETPEIPNELSSNIRRIPRPGSARPAPPRVKRQDSMEALQMDRSGSGKTVSNVITESHNSDNEEDDQFVVEAAPQLSEMSEIEMVTAVELEEEEKHGGLVKKILETKKDYEKLQQSPKPGEKERSLFESAWKKEKDIVSKEIEKLRTSIQTLCKSALPLGKIMDYIQEDVDAMQNELQMWHSENRQHAEALQQEQRITDCAVEPLKAELAELEQLIKDQQDKICAVKANILKNEEKIQKMVYSINLTSRR

SEQ ID NO: 187632 - protein, 691 aa, Artificial Sequence
  derived and/or modified sequence
MNAAVVRRTQEALGKVIRRPPLTEKLLSKPPFRYLHDIITEVIRMTGFMKGLYTDAEMKSDNVKDKDAKISFLQKAIDVVVMVSGEPLLAKPARIVAGHEPERTNELLQIIGKCCLNKLSSDDAVRRVLAGEKGEVKGRASLTSRSQELDNKNVREEESRVHKNTEDRGDAEIKERSTSRDRKQKEELKEDRKPREKDKDKEKAKENGGNRHREGERERAKARARPDNERQKDRGNRERDRDSERKKETERKSEGGKEKERLRDRDRERDRDKGKDRDRRRVKNGEHSWDLDREKNREHDKPEKKSASSGEMSKKLSDGTFKDSKAETETEISTRASKSLTTKTSKRRSKNSVEGRKEDNISAKSLDSIVSGINNEPNQETTTSEIGTKEANINSTSISDDNSASLRCENIQPNPTEKQKGKNGSEREGDAGPAGQDKSEVPETPEIPNELSSNIRRIPRPGSARPAPPRVKRQDSMEALQMDRSGSGKTVSNVITESHNSDNEEDDQFVVEAAPQLSEMSEIEMVTAVELEEEEKHGGLVKKILETKKDYEKLQQSPKPGEKERSLFESAWKKEKDIVSKEIEKLRTSIQTLCKSALPLGKIMDYIQEDVDAMQNELQMWHSENRQHAEALQQEQRITDCAVEPLKAELAELEQLIKDQQDKICAVKANILKNEEKIQKMVYSINLTSRR

SEQ ID NO: 187633 - DNA, 2076 bp, Artificial Sequence
  derived and/or modified sequence
atgaacgccgccgtggtgagaagaacccaggaggccctgggcaaggtgatcagaagaccccccctgaccgagaagctgctgagcaagccccccttcagatacctgcacgacatcatcaccgaggtgatcagaatgaccggcttcatgaagggcctgtacaccgacgccgagatgaagagcgacaacgtgaaggacaaggacgccaagatcagcttcctgcagaaggccatcgacgtggtggtgatggtgagcggcgagcccctgctggccaagcccgccagaatcgtggccggccacgagcccgagagaaccaacgagctgctgcagatcatcggcaagtgctgcctgaacaagctgagcagcgacgacgccgtgagaagagtgctggccggcgagaagggcgaggtgaagggcagagccagcctgaccagcagaagccaggagctggacaacaagaacgtgagagaggaggagagcagagtgcacaagaacaccgaggacagaggcgacgccgagatcaaggagagaagcaccagcagagacagaaagcagaaggaggagctgaaggaggacagaaagcccagagagaaggacaaggacaaggagaaggccaaggagaacggcggcaacagacacagagagggcgagagagagagagccaaggccagagccagacccgacaacgagagacagaaggacagaggcaacagagagagagacagagacagcgagagaaagaaggagaccgagagaaagagcgagggcggcaaggagaaggagagactgagagacagagacagagagagagacagagacaagggcaaggacagagacagaagaagagtgaagaacggcgagcacagctgggacctggacagagagaagaacagagagcacgacaagcccgagaagaagagcgccagcagcggcgagatgagcaagaagctgagcgacggcaccttcaaggacagcaaggccgagaccgagaccgagatcagcaccagagccagcaagagcctgaccaccaagaccagcaagagaagaagcaagaacagcgtggagggcagaaaggaggacaacatcagcgccaagagcctggacagcatcgtgagcggcatcaacaacgagcccaaccaggagaccaccaccagcgagatcggcaccaaggaggccaacatcaacagcaccagcatcagcgacgacaacagcgccagcctgagatgcgagaacatccagcccaaccccaccgagaagcagaagggcgacagcaccagcgacgccgagggcgacgccggccccgccggccaggacaagagcgaggtgcccgagacccccgagatccccaacgagctgagcagcaacatcagaagaatccccagacccggcagcgccagacccgccccccccagagtgaagagacaggacagcatggaggccctgcagatggacagaagcggcagcggcaagaccgtgagcaacgtgatcaccgagagccacaacagcgacaacgaggaggacgaccagttcgtggtggaggccgccccccagctgagcgagatgagcgagatcgagatggtgaccgccgtggagctggaggaggaggagaagcacggcggcctggtgaagaagatcctggagaccaagaaggactacgagaagctgcagcagagccccaagcccggcgagaaggagagaagcctgttcgagagcgcctggaagaaggagaaggacatcgtgagcaaggagatcgagaagctgagaaccagcatccagaccctgtgcaagagcgccctgcccctgggcaagatcatggactacatccaggaggacgtggacgccatgcagaacgagctgcagatgtggcacagcgagaacagacagcacgccgaggccctgcagcaggagcagagaatcaccgactgcgccgtggagcccctgaaggccgagctggccgagctggagcagctgatcaaggaccagcaggacaagatctgcgccgtgaaggccaacatcctgaagaacgaggagaagatccagaagatggtgtacagcatcaacctgaccagcagaagatag

SEQ ID NO: 187634 - DNA, 2076 bp, Artificial Sequence
  derived and/or modified sequence
atgaacgccgccgtggtgagaagaacccaggaggccctgggcaaggtgatcagaagaccccccctgaccgagaagctgctgagcaagccccccttcagatacctgcacgacatcatcaccgaggtgatcagaatgaccggcttcatgaagggcctgtacaccgacgccgagatgaagagcgacaacgtgaaggacaaggacgccaagatcagcttcctgcagaaggccatcgacgtggtggtgatggtgagcggcgagcccctgctggccaagcccgccagaatcgtggccggccacgagcccgagagaaccaacgagctgctgcagatcatcggcaagtgctgcctgaacaagctgagcagcgacgacgccgtgagaagagtgctggccggcgagaagggcgaggtgaagggcagagccagcctgaccagcagaagccaggagctggacaacaagaacgtgagagaggaggagagcagagtgcacaagaacaccgaggacagaggcgacgccgagatcaaggagagaagcaccagcagagacagaaagcagaaggaggagctgaaggaggacagaaagcccagagagaaggacaaggacaaggagaaggccaaggagaacggcggcaacagacacagagagggcgagagagagagagccaaggccagagccagacccgacaacgagagacagaaggacagaggcaacagagagagagacagagacagcgagagaaagaaggagaccgagagaaagagcgagggcggcaaggagaaggagagactgagagacagagacagagagagagacagagacaagggcaaggacagagacagaagaagagtgaagaacggcgagcacagctgggacctggacagagagaagaacagagagcacgacaagcccgagaagaagagcgccagcagcggcgagatgagcaagaagctgagcgacggcaccttcaaggacagcaaggccgagaccgagaccgagatcagcaccagagccagcaagagcctgaccaccaagaccagcaagagaagaagcaagaacagcgtggagggcagaaaggaggacaacatcagcgccaagagcctggacagcatcgtgagcggcatcaacaacgagcccaaccaggagaccaccaccagcgagatcggcaccaaggaggccaacatcaacagcaccagcatcagcgacgacaacagcgccagcctgagatgcgagaacatccagcccaaccccaccgagaagcagaagggcaagaacggcagcgagagagagggcgacgccggccccgccggccaggacaagagcgaggtgcccgagacccccgagatccccaacgagctgagcagcaacatcagaagaatccccagacccggcagcgccagacccgccccccccagagtgaagagacaggacagcatggaggccctgcagatggacagaagcggcagcggcaagaccgtgagcaacgtgatcaccgagagccacaacagcgacaacgaggaggacgaccagttcgtggtggaggccgccccccagctgagcgagatgagcgagatcgagatggtgaccgccgtggagctggaggaggaggagaagcacggcggcctggtgaagaagatcctggagaccaagaaggactacgagaagctgcagcagagccccaagcccggcgagaaggagagaagcctgttcgagagcgcctggaagaaggagaaggacatcgtgagcaaggagatcgagaagctgagaaccagcatccagaccctgtgcaagagcgccctgcccctgggcaagatcatggactacatccaggaggacgtggacgccatgcagaacgagctgcagatgtggcacagcgagaacagacagcacgccgaggccctgcagcaggagcagagaatcaccgactgcgccgtggagcccctgaaggccgagctggccgagctggagcagctgatcaaggaccagcaggacaagatctgcgccgtgaaggccaacatcctgaagaacgaggagaagatccagaagatggtgtacagcatcaacctgaccagcagaagatag

SEQ ID NO: 187635 - DNA, 2076 bp, Artificial Sequence
  derived and/or modified sequence
atgaacgccgcagtcgtgaggcgcactcaggaggcgctggggaaggtgatacggcgcccccccttaaccgagaaactgctgtctaaacctcccttccggtatcttcacgatatcatcacagaagttataaggatgacaggcttcatgaaaggcctctacactgatgccgaaatgaaaagtgataacgttaaagacaaagatgctaagatctccttcttgcagaaggcgatcgacgtggtcgtgatggtgtccggggagcccctgttagccaaaccagcgcgaatagtggccgggcatgagccagaaaggacgaacgaactgctgcagatcatcgggaagtgctgcctgaataagctgtccagcgacgacgctgtgcgcagagtgcttgcaggcgaaaagggcgaggtgaaaggccgcgcatcacttactagcagaagccaggagttagataacaagaatgttcgtgaagaggagtccagggtgcataagaacacggaagaccgcggcgatgccgagatcaaggaaaggagcacttcacgggatagaaagcagaaggaggagctaaaggaagaccgcaagcctcgggaaaaagataaagataaagaaaaagccaaagaaaacggtggcaataggcaccgggagggcgaaagggagcgggctaaggcccgagccagacctgacaatgaaagacagaaggacagaggaaacagggaacgagaccgagattctgagcgcaaaaaagaaacggaacggaagagcgagggcggcaaagagaaggagcgactgagggaccgggacagggagcgcgaccgggataaaggcaaggacagggatcgacgacgcgtgaaaaacggtgaacactcttgggacctagacagagagaaaaaccgggaacacgacaagcccgaaaagaaatccgccagctccggcgagatgtccaaaaaattgagcgatggaaccttcaaggatagtaaggccgaaacggaaactgagatatctacaagagcatcaaaatcactgaccacaaaaaccagcaagcggaggagtaaaaacagtgtcgaaggccggaaagaggacaatatctccgcaaagtcccttgatagcattgtctccggcatcaacaatgaaccgaatcaggaaacaacaacttcagagattgggactaaggaagctaacatcaactccacgagcatctctgacgataactccgccagcctgaggtgtgagaacatccagccaaatccaactgagaagcaaaaaggtgatagtacgagtgacgccgagggcgatgccggccctgcaggacaggataagagcgaagtgccagagactcccgaaatccccaacgagttgtcttcaaacattagacgcattccacgacctggttctgcacgccccgcgccaccccgtgtgaagcggcaggactcaatggaggcactccagatggatcggtcaggtagtggaaagaccgtatccaatgtcattactgaaagtcataattctgataatgaagaggatgatcagtttgtcgtggaagccgcgcctcagctctctgaaatgagcgagatagagatggtgaccgcagtcgagctggaagaggaggagaaacacggaggcctagtgaaaaaaattcttgagacaaaaaaggattacgagaaactgcagcagagtccaaagcctggagagaaagagcgtagcctgtttgaaagcgcctggaaaaaggaaaaggacattgtgagcaaggaaatcgagaagctacgaacgagcatccagaccctatgcaagagcgccctccctctgggaaagatcatggattacatccaggaagatgttgacgctatgcagaatgagctgcagatgtggcattctgagaacaggcagcatgctgaagcactgcagcaggagcaacgcatcaccgactgtgctgtcgaacctcttaaggccgaattggcggagttagagcagctgataaaggaccagcaagacaagatctgtgcagttaaggccaacattttaaaaaatgaagagaagattcagaagatggtttacagtattaacctgacaagccgacggtag

SEQ ID NO: 187636 - DNA, 2076 bp, Artificial Sequence
  derived and/or modified sequence
atgaacgccgccgtggtgagacgaacacaggaggccctgggcaaggttattcgcaggcctcccctgacggaaaaattgctgagcaaaccccccttccggtatttacacgatatcattacagaagtaataaggatgactggcttcatgaagggcctgtacactgatgctgagatgaagagcgacaatgttaaagataaagacgctaagatttcatttcttcagaaagccattgacgtagtggtgatggtgtctggtgagcccttgctagctaaacccgcccgtattgtagcgggacatgaaccagagagaaccaacgagctgctgcagatcataggcaaatgctgcctaaataaactttcttccgatgacgcggttcgaagggtcctggccggcgaaaaaggcgaagtgaagggccgggcttctctgacctctaggtcacaggagctggacaacaaaaatgtgcgggaggaagagtccagagtgcataaaaataccgaagataggggagatgccgagattaaagaacgctcgacctcccgggaccggaagcagaaggaggaattaaaggaagatcgtaagcccagggaaaaagataaggataaggagaaagcaaaagaaaatgggggaaaccgtcatagggaaggcgagcgagaacgagccaaggcccgcgctcgaccagacaacgagcgacaaaaggatcgcgggaatagggagagggaccgcgactcggaacgcaagaaggagaccgagagaaaatctgaaggggggaaggagaaagagaggctgcgcgatagagatcgagagagggacagagataaaggcaaggatagggatcgccgcagggtgaagaatggagagcactcctgggacttggaccgagagaagaatagagaacatgataagccggagaaaaaatccgcgtcctccggggagatgtccaagaagctcagtgacgggaccttcaaggattccaaggccgagacggaaacagaaatttccacacgggctagcaagagcttgaccaccaaaacatccaaaaggcgctctaagaattctgtggagggccgtaaagaggacaatatctccgctaaaagtttggatagtattgtgagcgggatcaataatgaacccaaccaggaaaccacaactagcgagatcggcaccaaggaagcaaatatcaactcaacctcaatttctgacgacaactccgcttcccttcggtgtgagaacatccaacccaatccaaccgagaagcaaaagggaaaaaacgggtcagagcgagaaggcgatgctgggccagcagggcaagacaagtcagaggtgccagagacaccagagatacccaatgagctgtccagcaacattcgacggatacctcgccctggatccgctcgcccggccccgccacgcgttaaacgccaggacagcatggaggcactgcagatggataggtccggatccgggaagaccgtctccaacgtcatcaccgagagccacaactccgacaatgaggaagatgaccagttcgtagtagaggcagccccccaactgtcagaaatgtctgaaattgagatggtgaccgcagtggaactggaagaggaggaaaagcacggtggcttggtcaagaaaatcctcgaaacgaagaaagattacgagaaattacagcagagccccaagccaggagaaaaggagaggagcctcttcgagagtgcctggaagaaggaaaaggacatcgtgtcgaaggaaattgagaagcttaggaccagtatccagaccctctgcaagtcggcacttcctcttggaaagattatggattacatccaggaagatgtcgatgccatgcagaatgagctgcaaatgtggcactctgaaaaccgtcagcacgcagaggccttacagcaggaacaacggatcactgattgcgccgtggaaccactgaaagccgagctcgctgagctcgaacagcttataaaagatcagcaggataaaatctgtgccgtgaaggccaacattttgaagaacgaggaaaagatccagaagatggtctattctattaatctgacctccaggcggtag

SEQ ID NO: 187637 - DNA, 2076 bp, Artificial Sequence
  derived and/or modified sequence
atgaatgctgctgtggtgcggaggacccaggaggccctgggcaaggtgatccggcggccccccctgacagagaagctgctgagcaagccacccttccgctacctgcatgacatcatcacagaggtgatccgcatgacaggcttcatgaagggcctgtacacagatgctgagatgaagagtgacaacgtgaaggacaaggatgccaagatctccttcctgcagaaggccattgatgtggtggtgatggtgtctggagagcccctgctggccaagccagccagaattgtggccggccacgagcctgagaggaccaatgagctgctgcagatcatcggcaagtgctgcctgaacaagctgagcagtgatgatgctgtgcggcgggtgctggccggggagaagggggaggtgaagggccgggccagcctgaccagccgcagccaggagctggacaacaagaatgtgcgggaggaggagagccgggtgcacaagaacacagaggacagaggagatgctgagatcaaggagaggagcaccagccgggacaggaagcagaaggaggagctgaaggaggacaggaagccccgggagaaggacaaggacaaggagaaggccaaggaaaatggaggcaacagacaccgggagggggagcgggagcgggccaaggcccgggcccggccagacaatgaaaggcagaaggaccggggcaaccgggagcgggaccgggacagcgagaggaagaaggagacagagaggaagtctgagggcggcaaggagaaggagcggctgcgggaccgggaccgggagcgggaccgggacaagggcaaggaccgggacagaagaagagtgaagaatggagagcacagctgggacctggaccgggagaagaaccgggagcatgacaagccagagaagaagagcgccagcagtggagagatgagcaagaagctgagtgatggcaccttcaaggacagcaaggccgagacagaaacagagatcagcacccgggccagcaagagcctgaccaccaagaccagcaagagaagaagcaagaacagcgtggagggcaggaaggaggacaacatcagcgccaagagcctggacagcatcgtgtctggcatcaacaatgagcccaaccaggagaccaccaccagcgagatcggcaccaaggaggccaacatcaacagcaccagcatcagtgatgacaacagcgccagcctgcgctgtgagaacatccagcccaaccccacagagaagcagaagggggacagcaccagtgatgctgaaggagatgctggccctgctggccaggacaagtctgaggtgcctgagaccccagagatccccaatgagctgagcagcaacatccgccgcatccccaggcctggcagcgcccggcctgccccaccccgggtgaagaggcaggacagcatggaggccctgcagatggacagaagtggcagcggcaagacagtgtccaatgtcatcacagagagccacaacagcgacaatgaagaagatgaccagtttgtggtggaggccgccccccagctgtctgagatgtctgaaattgagatggtgacagctgtggagctggaggaggaggagaagcatggaggcctggtgaagaagatcctggagaccaagaaggactatgagaagctgcagcagagccccaagccaggagagaaggagaggagcctgtttgagagcgcctggaagaaggagaaggacatcgtgtccaaggagattgagaagctgcggaccagcatccagaccctgtgcaagagcgccctgcccctgggcaagatcatggactacatccaggaggatgtggatgccatgcagaatgagctgcagatgtggcacagcgagaaccggcagcacgccgaggccctgcagcaggagcagaggatcacagactgtgctgtggagcccctgaaggccgagctggccgagctggagcagctgatcaaggaccagcaggacaagatctgtgctgtgaaggccaacatcctgaagaatgaggagaagatccagaagatggtgtacagcatcaacctgaccagcagaagatag

SEQ ID NO: 187638 - DNA, 2076 bp, Artificial Sequence
  derived and/or modified sequence
atgaatgctgctgtggtgcggaggacccaggaggccctgggcaaggtgatccggcggccccccctgacagagaagctgctgagcaagccacccttccgctacctgcatgacatcatcacagaggtgatccgcatgacaggcttcatgaagggcctgtacacagatgctgagatgaagagtgacaacgtgaaggacaaggatgccaagatctccttcctgcagaaggccattgatgtggtggtgatggtgtctggagagcccctgctggccaagccagccagaattgtggccggccacgagcctgagaggaccaatgagctgctgcagatcatcggcaagtgctgcctgaacaagctgagcagtgatgatgctgtgcggcgggtgctggccggggagaagggggaggtgaagggccgggccagcctgaccagccgcagccaggagctggacaacaagaatgtgcgggaggaggagagccgggtgcacaagaacacagaggacagaggagatgctgagatcaaggagaggagcaccagccgggacaggaagcagaaggaggagctgaaggaggacaggaagccccgggagaaggacaaggacaaggagaaggccaaggaaaatggaggcaacagacaccgggagggggagcgggagcgggccaaggcccgggcccggccagacaatgaaaggcagaaggaccggggcaaccgggagcgggaccgggacagcgagaggaagaaggagacagagaggaagtctgagggcggcaaggagaaggagcggctgcgggaccgggaccgggagcgggaccgggacaagggcaaggaccgggacagaagaagagtgaagaatggagagcacagctgggacctggaccgggagaagaaccgggagcatgacaagccagagaagaagagcgccagcagtggagagatgagcaagaagctgagtgatggcaccttcaaggacagcaaggccgagacagaaacagagatcagcacccgggccagcaagagcctgaccaccaagaccagcaagagaagaagcaagaacagcgtggagggcaggaaggaggacaacatcagcgccaagagcctggacagcatcgtgtctggcatcaacaatgagcccaaccaggagaccaccaccagcgagatcggcaccaaggaggccaacatcaacagcaccagcatcagtgatgacaacagcgccagcctgcgctgtgagaacatccagcccaaccccacagagaagcagaagggcaagaatggaagtgagcgggagggagatgctggccctgctggccaggacaagtctgaggtgcctgagaccccagagatccccaatgagctgagcagcaacatccgccgcatccccaggcctggcagcgcccggcctgccccaccccgggtgaagaggcaggacagcatggaggccctgcagatggacagaagtggcagcggcaagacagtgtccaatgtcatcacagagagccacaacagcgacaatgaagaagatgaccagtttgtggtggaggccgccccccagctgtctgagatgtctgaaattgagatggtgacagctgtggagctggaggaggaggagaagcatggaggcctggtgaagaagatcctggagaccaagaaggactatgagaagctgcagcagagccccaagccaggagagaaggagaggagcctgtttgagagcgcctggaagaaggagaaggacatcgtgtccaaggagattgagaagctgcggaccagcatccagaccctgtgcaagagcgccctgcccctgggcaagatcatggactacatccaggaggatgtggatgccatgcagaatgagctgcagatgtggcacagcgagaaccggcagcacgccgaggccctgcagcaggagcagaggatcacagactgtgctgtggagcccctgaaggccgagctggccgagctggagcagctgatcaaggaccagcaggacaagatctgtgctgtgaaggccaacatcctgaagaatgaggagaagatccagaagatggtgtacagcatcaacctgaccagcagaagatag

SEQ ID NO: 187639 - DNA, 2076 bp, Artificial Sequence
  derived and/or modified sequence
atgaacgccgccgtggtgcggcggacccaggaggccctgggcaaggtcataaggaggcctccattgactgaaaaacttctgagcaaaccccccttcagataccttcacgatattatcacagaggtgatccgcatgactggcttcatgaaagggctttacaccgatgctgaaatgaaaagtgacaatgtgaaggacaaggacgctaagatctcatttttacagaaagccatcgatgtggttgtgatggtgtccggagagccccttctggccaagcctgcccgtatagtcgccgggcacgaacccgagcgtacaaacgagctattgcagatcatcggcaaatgctgtctaaacaaactgtcttcagatgacgctgttagacgggtgctggctggggagaagggcgaggtcaaggggcgagcaagcctgacaagtaggtcacaggaacttgacaacaaaaatgttagggaggaggaaagtcgagtacacaaaaatacggaggaccgtggagacgccgaaattaaagagcgatccaccagtcgagacaggaagcagaaggaggagctgaaagaagacaggaagcctagggaaaaggacaaagacaaggagaaagcgaaagaaaacgggggcaataggcacagggagggagaaagggaacgggctaaggccagagcccgccctgataacgagaggcagaaagacagggggaaccgagaacgcgatcgagattcagagcgcaagaaggaaaccgaacgcaaaagtgagggcggtaaggagaaagaacgcctccgtgatagagatagggagagagatagagataaagggaaagaccgggaccgaaggagggtcaaaaacggcgagcatagctgggatctggatagagagaagaaccgggagcacgataaacccgaaaaaaaaagtgcctcgtctggtgaaatgagtaagaaactatcagacgggactttcaaggactcaaaagcagagacggaaactgagatctcaacacgtgctagtaaatcactaaccaccaagacctctaagagaagatcaaagaactctgtggaaggtaggaaagaggataatatttctgccaaatccctggactctattgttagcggtatcaacaatgaacccaatcaggaaaccacaacgagcgaaatcgggactaaggaagctaatatcaatagcacaagcatttccgatgacaactccgcctccctgcggtgtgagaacatccagcccaatcctactgagaaacaaaaaggcgattctacgagtgatgctgagggagatgccggccctgctggacaggacaaatcagaggtgcccgaaacacccgagatccctaacgaacttagttctaacatcaggcggatcccgcgaccaggatcagcacgccccgcacccccccgcgtcaagcgtcaggatagtatggaagctttgcagatggatcgatccgggtccggcaaaaccgtcagtaacgtaataaccgagagccacaattcagataatgaagaggacgatcagtttgtggtggaagcggcccctcagctgagcgaaatgtcagagattgagatggttacggctgtagagttggaggaagaggaaaaacacggggggctggtcaaaaaaatccttgagaccaaaaaagactacgaaaaattgcaacaaagtcctaagcctggggaaaaggagcggtccctctttgagagcgcctggaaaaaggagaaggatattgtgtcaaaagagattgagaaactgagaacctccatccagaccctgtgtaaaagcgccctccccctgggtaaaataatggattatatccaggaggacgtggatgcgatgcagaatgagctgcaaatgtggcactcagagaatagacagcacgccgaagctctgcagcaggaacaaaggattacagactgcgccgtcgagcccctgaaggctgagctggctgagctggaacagctgattaaagatcagcaagacaagatatgcgctgtgaaagcaaatatcttgaagaatgaagagaaaattcaaaagatggtttattccatcaatctgacgagccggcgctag

SEQ ID NO: 187640 - DNA, 2076 bp, Artificial Sequence
  derived and/or modified sequence
atgaacgccgccgtggtgcggcggacccaggaggccctgggcaaggtcattcggcgcccaccactcactgaaaagcttctgtctaaacctcccttccgctacctgcacgatatcattacggaagtaatccggatgaccgggtttatgaagggcctctacaccgatgctgagatgaagtcagacaacgtcaaggataaagatgctaaaattagctttcttcagaaagccattgacgtagtggtaatggtgtctggtgagcccctccttgctaaacctgccagaattgttgcgggccatgaaccagaacggactaatgagctcctgcagattattggcaaatgttgtttgaacaagctttcctctgatgatgccgtgaggcgcgtgttagctggcgaaaaaggtgaagtcaaaggaagagcctcactgacttctcggagtcaggaactggacaataaaaacgtccgggaggaagaatctagggtgcataagaacaccgaagatcgcggcgacgcagagataaaagaacggagtacatctagggacagaaagcaaaaggaggagctcaaagaggaccggaagccccgcgagaaggacaaggataaagagaaagccaaggaaaacggtggaaatcgccaccgggagggcgagcgagagagagctaaggccagagcaagacccgacaatgaaagacagaaggaccggggcaaccgagagagggaccgggattctgagagaaaaaaggagaccgagcgcaagtcagaaggagggaaagaaaaagaaaggctgagggacagagacagggaaagggacagggataagggtaaggatagagacagaaggcgggtgaagaatggagaacactcttgggacttggatagggaaaagaatagagagcatgacaagcccgagaaaaagagcgccagctccggcgaaatgagtaagaagctttcagatggaacattcaaggattccaaagctgaaactgagactgagatctccactcgagcctctaaaagcctgactactaaaacttcaaagcggaggtctaaaaattcagtcgaggggcgaaaagaagataatattagcgccaagagcctggactctattgtgtcagggatcaacaatgagccgaaccaggaaacaacaacctccgagattggtacgaaagaggcgaatatcaacagcaccagtatcagtgacgacaatagtgcttccttacggtgtgagaacattcaaccaaatccgacagagaaacagaagggcaaaaatgggtcagaacgggagggggatgcaggacccgccgggcaggacaaatctgaggttcctgagacgccagagatccctaacgagctctcatctaatatccgacgcatcccccgaccaggtagcgcacgacccgctcctcctcgggtgaagaggcaggactccatggaggcccttcagatggatcgttctggtagtgggaagactgtgtcaaacgtaatcacagaaagccataattccgataacgaggaggacgatcaattcgtggtggaggccgcccctcagctgagtgaaatgtccgaaattgaaatggtaacggctgtagaactggaagaggaggagaagcacggcggcctggtgaaaaagatcctagaaactaaaaaggactatgagaaactgcagcaaagccccaagcctggcgagaaagagcggtctctttttgagagcgcatggaaaaaagaaaaggacatcgtcagcaaggagattgagaagctgcgcacaagcatccaaactctctgcaaatccgctctacccctgggtaaaattatggactacatccaggaagacgtggacgcgatgcagaatgagctacaaatgtggcattcagagaatcggcagcacgcagaggccctgcagcaggaacaaaggattaccgattgcgcggtggagcctctcaaggcagagcttgctgaattggagcaactgatcaaggaccaacaagataagatttgtgctgtaaaggctaatattctgaaaaatgaggagaaaattcagaagatggtttattccatcaatttgacttccagacgctag

SEQ ID NO: 187641 - DNA, 2076 bp, Artificial Sequence
  derived and/or modified sequence
atgaacgctgccgtggtccgcagaacacaagaagccctcggaaaggtgatccgcagacccccactaacggagaagctgcttagtaaacctcctttccgatatctccacgacatcatcaccgaagtcattaggatgaccggttttatgaaggggctatatacggacgccgagatgaaatccgacaacgtgaaggacaaagatgccaaaataagcttcctgcagaaggccatcgacgttgtggttatggtgtcgggggaacccttgctagcaaagccagcacggatagtggcagggcatgaacccgaaagaactaatgaactgcttcagatcatcggcaaatgctgtctgaataagctttccagcgatgatgcagtgaggagagttctggcgggtgagaagggcgaagtcaaaggaagggcttccttaacttcacgctcccaggagctcgataacaaaaacgtgcgggaggaagaatcaagggtgcacaagaacacggaggataggggcgacgccgaaatcaaggaaagatcaacaagccgcgatagaaagcaaaaggaagagctgaaagaagacagaaagccacgcgagaaggataaagacaaggagaaggctaaggaaaacggaggcaatcgtcacagggaaggtgaacgggagcgggctaaggccagggcccgtcccgataacgagcgccaaaaagacaggggaaatagagagagagatcgtgacagcgagcgcaaaaaggagacagagagaaaaagcgagggtggtaaagaaaaggagagattgagagatcgtgatcgcgaacgcgatcgggataaagggaaagaccgagacagaaggcgcgttaaaaacggcgaacacagctgggatctcgatcgagaaaagaatcgagagcatgacaagcctgaaaaaaaatctgccagctctggcgagatgtccaaaaaactgtccgacggtacctttaaggacagtaaagcagagacagagacagaaatctctacacgcgcatcaaagtccctgactacaaagactagtaaaagacggagtaagaattcggtcgaggggaggaaagaggacaatatcagtgccaaatccctggacagtatcgtgtccgggattaacaatgagcctaaccaggagaccacaacctcagaaatcggcacaaaagaagcaaacattaactcaacgtcaatttcagatgataactcagccagtcttaggtgcgagaatattcagcccaatcctactgaaaagcagaaaggggatagcacatccgatgccgagggcgacgctggcccagccggacaggacaagtcagaagtgccagaaaccccagaaatccccaatgagctgtcttctaacatacgccgtatccccaggccagggtcagctcggcctgcccctcccagggtaaagcgtcaggattcaatggaggccctccagatggataggagcgggagcgggaaaaccgttagcaacgtcataacagaatcccataactcagacaacgaagaggacgaccaatttgtggtggaagctgccccacagctgtccgagatgagcgaaatcgagatggtcaccgctgtcgaactggaagaagaggagaagcatgggggtctcgtaaaaaagatcctcgagacaaagaaagattatgagaagctccagcagagccctaagcccggagagaaggaacgctcgctttttgaaagtgcatggaagaaagagaaggatatagtgtcaaaggaaatagaaaaactcaggacaagtatacagaccttgtgtaagagcgccctgcctctagggaaaatcatggattacattcaggaggacgtcgatgcaatgcagaacgagctccagatgtggcacagtgagaaccgtcaacacgctgaagctttgcagcaggaacagcgtattaccgattgtgcagtggagcccctgaaagccgagttggccgagctcgagcagctcatcaaagaccagcaggacaagatctgcgctgttaaggccaatattcttaaaaacgaggaaaaaatacaaaagatggtgtatagcatcaaccttacctcacgcagatag

SEQ ID NO: 187642 - DNA, 2076 bp, Artificial Sequence
  derived and/or modified sequence
atgaatgcagctgtggttcggcgaactcaagaagccttgggcaaggtcattcgcagaccccctctaacggagaagttacttagcaagccaccattccggtacctccacgatataattacagaggtgatcaggatgactggctttatgaaaggactatacactgacgcagagatgaaaagcgacaatgtgaaggataaggacgccaaaatttcgtttctccagaaggcaatcgatgtagtggtcatggtgtccggtgaacctctccttgctaagccagctcgaattgtagcaggccatgagcccgaacgaacgaatgaactgctgcagattatcggcaaatgctgtttgaacaaactgtcgagcgacgatgcagtgcgccgagtgcttgccggagaaaagggcgaagtgaagggaagggcatcgctgaccagccgctcccaagaactggataataagaatgtgagggaagaggaatctagggtacacaaaaataccgaggatcggggagacgcggagatcaaggaaaggagcacttccagggacagaaaacagaaagaagagttgaaggaggaccggaagccgagagaaaaagataaggacaaagagaaagcgaaagagaatggaggcaataggcaccgagaaggcgagagagaaagagctaaggccagagctaggcccgacaatgagagacagaaggaccggggtaatcgggagcgcgacagagactctgagagaaaaaaggaaactgagcgcaagtccgaagggggaaaggagaaggagcggctccgggatcgagacagggagcgcgacagagacaagggaaaggaccgagatcgccgtcgggtgaaaaacggagagcatagttgggacctggatcgcgagaagaatcgagaacacgacaagccagagaaaaagtctgcatcctccggggagatgtcaaaaaagctaagtgacggcaccttcaaagattccaaggctgagacagagactgagatcagtacccgcgctagcaagagcttgacaacgaagactagcaagagacgcagcaaaaactccgtcgagggccgtaaagaggacaacatcagcgccaaatcactggattccattgtaagcggtataaacaatgagcctaaccaggagacgacaactagcgagatcgggacaaaagaagctaatatcaacagcacctctatctccgatgacaatagcgcatctctgcgctgcgagaatatacagccaaatcctacggagaagcaaaagggtaagaacggatctgagagagaaggagacgccggacccgcaggtcaagacaaatctgaggtgcccgaaacgcctgagatcccaaacgagttatcgtctaatatccggaggattcctaggcctggctcggccagaccagcacctccccgtgtgaagagacaggatagtatggaggctcttcagatggaccgatccggcagtggaaagacggtaagcaatgttattactgagtctcacaatagcgacaatgaagaggacgatcagttcgtggtagaagctgcaccccagctaagcgagatgtccgaaatcgaaatggtcaccgctgtggagctcgaggaagaagaaaagcatggtggactggttaaaaagatcctagaaaccaagaaggattacgaaaagctacagcaaagtccaaagccaggcgagaaagagaggtccctcttcgaatctgcatggaagaaagaaaaagatatagtgagcaaggagatagagaaactcagaactagcatacagaccttgtgcaagtccgcccttcccctaggaaagatcatggattatatacaggaggacgtggacgccatgcagaatgaactccagatgtggcattctgagaacaggcagcacgcagaagctctgcagcaggagcagaggatcacagactgtgcggtggagcccctcaaggcggagcttgctgagctcgagcagcttatcaaggatcagcaagataaaatttgtgctgttaaagccaatatcttaaagaacgaagaaaagatccaaaagatggtttactccattaatctgacctcacggagatag

SEQ ID NO: 187643 - DNA, 4279 bp, Artificial Sequence
  derived and/or modified sequence
gtccgttgctaaggccgcgcagccctagtgaccgaacgccctgcggcggccgcgcaggcgctgtggtgggctccggtgcactgtgggatggaaaccggagcggcgcgtcctggcaggaccgggcggcggcggcggcggggccggcggcggccagggacccgggcttaggctcggccaggccggctgaggggcgcgggcggccagcgggcggcggacgccgtcatgaacgcggcggtggtgaggcggacgcaggaggcgctggggaaagtgattcggaggccgccgctgaccgagaagctgctgagcaagcccccgttccgctacctgcacgacatcatcacggaggtgattagaatgactggtttcatgaagggcctctacacagacgccgagatgaagtctgataatgtgaaggataaagatgcaaaaattagcttcctacaaaaggccatagacgtggttgtaatggtgtcgggagagccactgttggccaaaccagcccgaatcgtggcggggcatgagcctgaaagaacaaacgagctgctccagataattggaaaatgctgtctcaacaagctctctagtgacgatgcggtgcggagggttttagctggagagaagggagaagtgaaaggccgggcctcactgacctcaagatctcaggaattggataataagaatgtgcgagaagaagagtccagagttcacaaaaatacagaggatagaggagacgctgaaataaaagagagaagtacaagcagagatcgaaaacagaaggaagaattgaaagaagaccgcaagccaagagaaaaggacaaggacaaggagaaggccaaggagaatggcggaaacagacacagagaaggggagagagagagagccaaagcccgggccaggccagacaacgagcgacagaaagacagaggcaacagggagcgggacagagactccgagcgcaagaaggagacagagagaaagagtgagggggggaaagagaaggagagactgagagacagggaccgagagcgcgaccgggacaaagggaaggacagggacagacggagagtgaaaaacggggagcactcctgggacctggacagggagaagaacagagagcatgacaaacctgagaaaaagtcagcaagctcaggggagatgtctaaaaagttatcagatggaacttttaaagactccaaggctgaaacagagactgagatttccactagagcttccaagtcattgacaacaaaaacatcaaaacggcgatccaaaaattcagtggaaggaaggaaggaggataatatttcagctaaaagtttagactccatagtgtctggaataaataatgagccaaatcaggaaacgacaacatcagaaataggaacaaaagaagctaatattaactcaactagtatttcagatgataattcagctagtctgcggtgtgagaatattcagcccaaccccacagagaagcagaaaggtgactccaccagtgatgcagaaggagatgctggacctgctggccaagataagtctgaggtgccagagactccagaaattcctaatgagctttcatccaacatcagaagaattcctcggcctgggagtgcaagaccagcccctccccgggtcaaacggcaagacagcatggaggcgctacaaatggataggtcagggagtggtaaaaccgtttcaaatgtgattacagagtcacacaattctgacaatgaagaggatgatcaatttgtggtggaagctgcccctcagctctctgaaatgtcagaaattgaaatggtaacagcagtggaactagaagaagaggagaagcatggtggacttgtgaaaaaaattttggagacgaagaaagattatgagaaattgcagcagtcacccaaacctggggagaaggagcgatctctctttgagtcggcatggaagaaggagaaggacatcgtttccaaggagatagagaagctccgcacgtccatccagaccctgtgcaagagcgcacttcccctggggaagatcatggactacatccaggaagacgtggatgccatgcagaatgagctgcagatgtggcacagcgagaacaggcagcacgccgaggccctgcagcaggagcagaggatcacagactgtgccgtggagcccttaaaggctgagctcgcggagctggagcagctgatcaaagaccagcaagacaagatctgtgctgtgaaggccaacatcctcaagaatgaagaaaaaatccagaaaatggtatatagtatcaatttgacttcgagaaggtgaacactcaaaagtttcagagatgaaaagtcacctcagtttaaaagcaaaaaggaagatagaaaatcattactcttttaagttccagtttgctaagaaaatgaacagtttacaatgttattatccagctaattttcagagctttaaaactgtaagcatgttaagtgtattaaaaaaaccatgttttcttacctccttccagatggaatactggctagttataaatagcgcttccaaacacctctgtgaaaagtttttttgaaagcctgttctttgtgtttctgctgtaacctgtttagttctgtaccagaactctctagcaggtaagtggtgtgggcataccaagggaacagtagtcctttattttggtttagtggaaagactttcagaggtcagtgccgaatgaaggatgactgtgtactttttgataggcacttgataagtagaatgaggcctgaaaatgaatacattatatttttagttaatttccaatggaaagggctaacctcagcctgtctccatatcaggtacctatcaactggattgttttcatttttgttttttgacctctttgtaattgcatgtacttctctatgtaattttcctcttgatctctactatcgtttgcttgtgtttctagtccttaaagttcataaatttaaaaaggagatttcaggatggcctttatggacgttgtctggacatacatcctcactttcttccgcagtttaccctggttttcctcagacagaggctagcgcagccccccggagtccttgttctccttaagagggtctcgctctgcaaagcattggcgccatggcttttcctttgcatgggtgtgcataccgagagacaggcagcttaggaaaaacaacataaggaagacttaaaaggatgcactgatttacgacgttttttgatgttagccatttttttggaaattgttttttaaagcaaaagttttttaaaaacatggtttatagtttttcacttacatatactattgtaaatacttagcagagtcttaagttactgtataaaacatttcattgtgtttgaagacatacttatgggtcttgaggtctgggtcctaatacttttaaatagtgtatttattatgtaaactgaggagtgccatttaaagtgtgaggattgcctgaaaaggttttgtttctttcttttttttttttttttgagatggagtcttactctgtcgcccaggctggagtgcagtggcgcaatctcggctcactgcaaccaccgcctcccgagttcaagtgattctcctgcctcagcctcctgagtaactgggactacaggcgcacgccaccatgcccagctaatttttgtattttcagtagagatggggtttcaccgtgttgaccaggatggtctccacctcctgacctcgtgatccgcctgcctcggcctcccaaagtgctgggattacaggcatgagccactgcacccggccaggttttgtttctttaaggattagcacaaatggcaccgttgggtttttcttcatacaatttccaaaataaattctgtactcaggttgttatatgattttctgagctgaataagttcaggagcagattattaagatctgccattctgaaacgctggtctttttctccttcctatagtgcaccataaaattctgtttgatcagattatattacatacattttgggggagtggagggacatgagttaagtagcccttcatgtatttataatctcttttctactgaatcaaatgacttagccatgaccctgaatggaccttgttttacttcaagttgagatgtctgccttttatgaatttgtatatgtgaatagagtttgggggttgccaaaaattgcatacattgtatgtaagtaaaattttttatgaagtagtctgtcaaattgtatcataaagtttatttttcttttatacgtaaatcattaaaaataatcacatattttttccataa

SEQ ID NO: 187644 - DNA, 4172 bp, Artificial Sequence
  derived and/or modified sequence
cgcgtcctggcaggaccgggcggcggcggcggcggggccggcggcggccagggacccgggcttaggctcggccaggccggctgaggggcgcgggcggccagcgggcggcggacgccgtcatgaacgcggcggtggtgaggcggacgcaggaggcgctggggaaagtgattcggaggccgccgctgaccgagaagctgctgagcaagcccccgttccgctacctgcacgacatcatcacggaggtgattagaatgactggtttcatgaagggcctctacacagacgccgagatgaagtctgataatgtgaaggataaagatgcaaaaattagcttcctacaaaaggccatagacgtggttgtaatggtgtcgggagagccactgttggccaaaccagcccgaatcgtggcggggcatgagcctgaaagaacaaacgagctgctccagataattggaaaatgctgtctcaacaagctctctagtgacgatgcggtgcggagggttttagctggagagaagggagaagtgaaaggccgggcctcactgacctcaagatctcaggaattggataataagaatgtgcgagaagaagagtccagagttcacaaaaatacagaggatagaggagacgctgaaataaaagagagaagtacaagcagagatcgaaaacagaaggaagaattgaaagaagaccgcaagccaagagaaaaggacaaggacaaggagaaggccaaggagaatggcggaaacagacacagagaaggggagagagagagagccaaagcccgggccaggccagacaacgagcgacagaaagacagaggcaacagggagcgggacagagactccgagcgcaagaaggagacagagagaaagagtgagggggggaaagagaaggagagactgagagacagggaccgagagcgcgaccgggacaaagggaaggacagggacagacggagagtgaaaaacggggagcactcctgggacctggacagggagaagaacagagagcatgacaaacctgagaaaaagtcagcaagctcaggggagatgtctaaaaagttatcagatggaacttttaaagactccaaggctgaaacagagactgagatttccactagagcttccaagtcattgacaacaaaaacatcaaaacggcgatccaaaaattcagtggaaggaaggaaggaggataatatttcagctaaaagtttagactccatagtgtctggaataaataatgagccaaatcaggaaacgacaacatcagaaataggaacaaaagaagctaatattaactcaactagtatttcagatgataattcagctagtctgcggtgtgagaatattcagcccaaccccacagagaagcagaaaggtaagaatgggtctgaacgtgaaggagatgctggacctgctggccaagataagtctgaggtgccagagactccagaaattcctaatgagctttcatccaacatcagaagaattcctcggcctgggagtgcaagaccagcccctccccgggtcaaacggcaagacagcatggaggcgctacaaatggataggtcagggagtggtaaaaccgtttcaaatgtgattacagagtcacacaattctgacaatgaagaggatgatcaatttgtggtggaagctgcccctcagctctctgaaatgtcagaaattgaaatggtaacagcagtggaactagaagaagaggagaagcatggtggacttgtgaaaaaaattttggagacgaagaaagattatgagaaattgcagcagtcacccaaacctggggagaaggagcgatctctctttgagtcggcatggaagaaggagaaggacatcgtttccaaggagatagagaagctccgcacgtccatccagaccctgtgcaagagcgcacttcccctggggaagatcatggactacatccaggaagacgtggatgccatgcagaatgagctgcagatgtggcacagcgagaacaggcagcacgccgaggccctgcagcaggagcagaggatcacagactgtgccgtggagcccttaaaggctgagctcgcggagctggagcagctgatcaaagaccagcaagacaagatctgtgctgtgaaggccaacatcctcaagaatgaagaaaaaatccagaaaatggtatatagtatcaatttgacttcgagaaggtgaacactcaaaagtttcagagatgaaaagtcacctcagtttaaaagcaaaaaggaagatagaaaatcattactcttttaagttccagtttgctaagaaaatgaacagtttacaatgttattatccagctaattttcagagctttaaaactgtaagcatgttaagtgtattaaaaaaaccatgttttcttacctccttccagatggaatactggctagttataaatagcgcttccaaacacctctgtgaaaagtttttttgaaagcctgttctttgtgtttctgctgtaacctgtttagttctgtaccagaactctctagcaggtaagtggtgtgggcataccaagggaacagtagtcctttattttggtttagtggaaagactttcagaggtcagtgccgaatgaaggatgactgtgtactttttgataggcacttgataagtagaatgaggcctgaaaatgaatacattatatttttagttaatttccaatggaaagggctaacctcagcctgtctccatatcaggtacctatcaactggattgttttcatttttgttttttgacctctttgtaattgcatgtacttctctatgtaattttcctcttgatctctactatcgtttgcttgtgtttctagtccttaaagttcataaatttaaaaaggagatttcaggatggcctttatggacgttgtctggacatacatcctcactttcttccgcagtttaccctggttttcctcagacagaggctagcgcagccccccggagtccttgttctccttaagagggtctcgctctgcaaagcattggcgccatggcttttcctttgcatgggtgtgcataccgagagacaggcagcttaggaaaaacaacataaggaagacttaaaaggatgcactgatttacgacgttttttgatgttagccatttttttggaaattgttttttaaagcaaaagttttttaaaaacatggtttatagtttttcacttacatatactattgtaaatacttagcagagtcttaagttactgtataaaacatttcattgtgtttgaagacatacttatgggtcttgaggtctgggtcctaatacttttaaatagtgtatttattatgtaaactgaggagtgccatttaaagtgtgaggattgcctgaaaaggttttgtttctttcttttttttttttttttgagatggagtcttactctgtcgcccaggctggagtgcagtggcgcaatctcggctcactgcaaccaccgcctcccgagttcaagtgattctcctgcctcagcctcctgagtaactgggactacaggcgcacgccaccatgcccagctaatttttgtattttcagtagagatggggtttcaccgtgttgaccaggatggtctccacctcctgacctcgtgatccgcctgcctcggcctcccaaagtgctgggattacaggcatgagccactgcacccggccaggttttgtttctttaaggattagcacaaatggcaccgttgggtttttcttcatacaatttccaaaataaattctgtactcaggttgttatatgattttctgagctgaataagttcaggagcagattattaagatctgccattctgaaacgctggtctttttctccttcctatagtgcaccataaaattctgtttgatcagattatattacatacattttgggggagtggagggacatgagttaagtagcccttcatgtatttataatctcttttctactgaatcaaatgacttagccatgaccctgaatggaccttgttttacttcaagttgagatgtctgccttttatgaatttgtatatgtgaatagagtttgggggttgccaaaaattgcatacattgtatgtaagtaaaattttttatgaagtagtctgtcaaattgtatcataaagtttatttttcttttatacgtaaatcattaaaaataatcacatattttttcc

SEQ ID NO: 187645 - protein, 166 aa, Artificial Sequence
  derived and/or modified sequence
MENRALDPGTRDSYGATSHLPNKGALAKVKNNFKDLMSKLTEGQYVLCRWTDGLYYLGKIKRVSSSKQSCLVTFEDNSKYWVLWKDIQHAGVPGEEPKCNICLGKTSGPLNEILICGKCGLGYHQQCHIPIAGSADQPLLTPWFCRRCIFALAVRKGGALKKGAIA

SEQ ID NO: 187646 - protein, 309 aa, Artificial Sequence
  derived and/or modified sequence
MRQNDKIMCILENRKKRDRKNLCRAINDFQQSFQKPETRREFDLSDPLALKKDLPARQSDNDVRNTISGMQKFMGEDLNFHERKKFQEEQNREWSLQQQREWKNARAEQKCAEALYTETRLQFDETAKHLQKLESTTRKAVCASVKDFNKSQAIESVERKKQEKKQEQEDNLAEITNLLRGDLLSENPQQAASSFGPHRVVPDRWKGMTQEQLEQIRLVQKQQIQEKLRLQEEKRQRDLDWDRRRIQGARATLLFERQQWRRQRDLRRALDSSNLSLAKEQHLQKKYMNEVYTNQPTGDYFTQFNTGSR

SEQ ID NO: 187647 - protein, 377 aa, Artificial Sequence
  derived and/or modified sequence
MAVALPRDLRQDANLAKRRHAELCRQKRVFNARNRIIGGDTEAWDVQVHDQKIKEATEKARHETLAAEMRQNDKIMCILENRKKRDRKNLCRAINDFQQSFQKPETRREFDLSDPLALKKDLPARQSDNDVRNTISGMQKFMGEDLNFHERKKFQEEQNREWSLQQQREWKNARAEQKCAEALYTETRLQFDETAKHLQKLESTTRKAVCASVKDFNKSQAIESVERKKQEKKQEQEDNLAEITNLLRGDLLSENPQQAASSFGPHRVVPDRWKGMTQEQLEQIRLVQKQQIQEKLRLQEEKRQRDLDWDRRRIQGARATLLFERQQWRRQRDLRRALDSSNLSLAKEQHLQKKYMNEVYTNQPTGDYFTQFNTGSR

SEQ ID NO: 187648 - DNA, 1134 bp, Artificial Sequence
  derived and/or modified sequence
atggccgtggccctgcccagagacctgagacaggacgccaacctggccaagagaagacacgccgagctgtgcagacagaagagagtgttcaacgccagaaacagaatcatcggcggcgacaccgaggcctgggacgtgcaggtgcacgaccagaagatcaaggaggccaccgagaaggccagacacgagaccctggccgccgagatgagacagaacgacaagatcatgtgcatcctggagaacagaaagaagagagacagaaagaacctgtgcagagccatcaacgacttccagcagagcttccagaagcccgagaccagaagagagttcgacctgagcgaccccctggccctgaagaaggacctgcccgccagacagagcgacaacgacgtgagaaacaccatcagcggcatgcagaagttcatgggcgaggacctgaacttccacgagagaaagaagttccaggaggagcagaacagagagtggagcctgcagcagcagagagagtggaagaacgccagagccgagcagaagtgcgccgaggccctgtacaccgagaccagactgcagttcgacgagaccgccaagcacctgcagaagctggagagcaccaccagaaaggccgtgtgcgccagcgtgaaggacttcaacaagagccaggccatcgagagcgtggagagaaagaagcaggagaagaagcaggagcaggaggacaacctggccgagatcaccaacctgctgagaggcgacctgctgagcgagaacccccagcaggccgccagcagcttcggcccccacagagtggtgcccgacagatggaagggcatgacccaggagcagctggagcagatcagactggtgcagaagcagcagatccaggagaagctgagactgcaggaggagaagagacagagagacctggactgggacagaagaagaatccagggcgccagagccaccctgctgttcgagagacagcagtggagaagacagagagacctgagaagagccctggacagcagcaacctgagcctggccaaggagcagcacctgcagaagaagtacatgaacgaggtgtacaccaaccagcccaccggcgactacttcacccagttcaacaccggcagcagatag

SEQ ID NO: 187649 - DNA, 1134 bp, Artificial Sequence
  derived and/or modified sequence
atggcggtcgctcttcctcgagacttgcgccaagacgcaaacctggccaagcgcagacacgccgagttatgccgccaaaaacgcgttttcaacgctcggaataggattatcggaggagacaccgaagcctgggatgtgcaggtgcacgaccagaagattaaggaagccaccgaaaaggcacgccacgagacattggccgcagaaatgcggcagaatgataagatcatgtgtatcctggagaaccgaaagaaaagggaccggaagaatctatgcagggccatcaatgatttccaacagtcttttcagaaaccggagactaggagagagttcgacctgtctgatccactcgctcttaaaaaagacctgccagcccgtcagtccgataatgacgtgcgcaacaccatttctgggatgcagaagtttatgggagaagatcttaattttcatgagcgaaaaaaattccaagaggaacagaaccgagagtggtccctacaacaacagcgggaatggaagaatgcccgtgccgagcagaaatgtgcggaagctctctatacagaaacaagactgcaatttgacgaaacagccaagcatctgcagaaattggaaagcactactcgtaaggccgtgtgcgcgtcagtcaaagattttaataagtctcaagcaatcgaatctgtggagcggaaaaagcaagaaaagaaacaggagcaggaggataacctcgccgaaatcacaaaccttctgaggggtgaccttttgtccgaaaaccctcaacaggctgccagcagctttgggcctcatcgggtagtgcctgaccggtggaaagggatgacccaagagcagctggagcagatcagactggtacaaaaacagcaaatccaggagaaactgcggctgcaggaggaaaaacggcaacgagatctggattgggaccgcagacgcattcagggggcaagagccacgctcctctttgaacgtcagcagtggaggaggcaaagggaccttaggcgggccctggatagcagtaatctgtcactggcgaaggaacagcatctgcagaaaaagtatatgaatgaagtatacacaaatcagcctaccggcgactacttcacacagttcaataccggctctaggtag

SEQ ID NO: 187650 - DNA, 1134 bp, Artificial Sequence
  derived and/or modified sequence
atggctgtggccctgccccgggacctgcggcaggatgccaacctggccaagagaagacatgctgagctgtgccggcagaagagggtcttcaatgccaggaaccgcatcattggaggagacacagaggcctgggatgtgcaggtgcatgaccagaagatcaaggaggccacagagaaggcccggcatgagaccctggccgctgagatgaggcagaatgacaagatcatgtgcatcctggagaacaggaagaagagggacaggaagaacctgtgccgggccatcaatgacttccagcagagcttccagaagccagagacccggcgggagtttgacctgagtgaccccctggccctgaagaaggacctgcctgcccggcagagcgacaatgatgtgaggaacaccatcagcggcatgcagaagttcatgggagaggacctgaacttccacgagaggaagaagttccaggaggagcagaaccgggagtggagcctgcagcagcagcgggagtggaagaatgcccgggcagagcagaagtgtgccgaggccctgtacacagagacccggctgcagtttgatgaaacagccaagcacctgcagaagctggagagcaccaccaggaaggctgtgtgtgcctctgtgaaggacttcaacaagagccaggccatcgagagcgtggagaggaagaagcaggagaagaagcaggagcaggaggacaacctggccgagatcaccaacctgctgcggggggacctgctgtctgagaacccccagcaggccgccagcagctttggcccccaccgggtggtgcctgaccgctggaagggcatgacccaggagcagctggagcagatccggctggtgcagaagcagcagatccaggagaagctgcggctgcaggaggagaagaggcagagggacctggactgggacagaagacgcatccagggcgcccgggccaccctgctgtttgagcggcagcagtggaggcggcagagggacctgcggcgggccctggacagcagcaacctgagcctggccaaggagcagcacctgcagaagaagtacatgaatgaggtgtacaccaaccagcccactggagactacttcacccagttcaacacaggcagcaggtag

SEQ ID NO: 187651 - DNA, 1134 bp, Artificial Sequence
  derived and/or modified sequence
atggccgtggccctgccccgggacctgcggcaggacgccaacctggctaagaggcgccatgccgagctctgccgtcaaaaaagggtctttaatgctcgcaacagaatcattggaggcgacaccgaggcctgggacgtccaagtacacgaccaaaagattaaggaggctaccgaaaaggcccggcacgaaaccctcgcagcagagatgcgacagaatgacaaaattatgtgcattcttgagaatagaaagaagagggaccgcaaaaatctgtgtcgcgcgattaatgattttcagcaatccttccaaaaaccggaaacaaggcgcgagttcgatttgagcgacccactcgcattaaagaaggacttgccagctcgtcagagcgataatgacgtgcggaatacaatctccggtatgcaaaagttcatgggcgaagaccttaactttcacgagcgcaaaaagttccaagaggaacaaaatcgggaatggtcgttgcagcagcagagagagtggaaaaatgcacgtgcggagcagaaatgtgccgaagctctttacacggagacaagattgcaattcgacgagaccgctaagcatctacaaaaattggaaagcacgactcgtaaagcagtctgcgcctcagttaaagattttaataagtctcaggctatcgagtcagtcgagcgaaagaaacaagaaaaaaagcaagagcaggaggataacctcgcggaaattacaaacctgcttagaggcgatcttttgtctgaaaacccacaacaggctgccagttcattcggcccacatagagtcgttcctgatcgctggaagggcatgacacaagaacaactcgagcaaatccggcttgtacagaaacaacaaatccaagaaaaactgcggctccaagaggaaaaacgacaaagagacctcgattgggatagaagacgcattcagggggctagagccactctgctgtttgagcggcagcagtggaggcggcagagggacctgaggcgggccctggactcatctaatctttccctggccaaagaacagcaccttcagaagaagtacatgaatgaagtgtatacgaaccagcccacaggcgactactttacccagttcaataccggtagcagatag

SEQ ID NO: 187652 - DNA, 1134 bp, Artificial Sequence
  derived and/or modified sequence
atggccgtggctttgccccgagatctccggcaagacgccaatttggcaaaacgaagacacgccgaactgtgtcgccagaagcgggtgttcaacgcaaggaaccggatcattggcggtgatacagaagcctgggacgtccaggtgcatgaccagaaaatcaaggaggctacggagaaggctcgacacgagacgctcgctgccgaaatgcgccaaaacgataagatcatgtgcattctcgagaacagaaagaagcgtgatcggaaaaacctttgccgagccatcaacgacttccagcaaagcttccaaaagcccgaaaccagacgggaatttgatctcagcgaccccctggcactgaaaaaagatttacctgccagacaaagcgataacgacgttagaaataccatcagcgggatgcaaaaattcatgggggaagacttaaacttccatgaacgcaaaaagttccaagaagagcaaaaccgcgagtggagcttacaacaacagagggagtggaagaacgcgagggccgagcagaagtgtgctgaggccctttataccgaaacgaggttgcagtttgacgaaactgcaaagcacctgcagaaattggagtcaaccacacgcaaagcagtttgtgccagcgttaaggatttcaacaagtcgcaggccatcgagtccgttgagaggaaaaaacaggaaaagaagcaggagcaggaagataacctcgccgagattacaaacctgttgaggggcgacctactgtctgaaaacccacagcaagctgcaagctcctttggaccacacagggtggtcccagatagatggaaggggatgactcaagaacagctcgagcagattagactggtgcagaagcagcagatccaggagaagcttcgtctgcaggaggagaagagacagcgagacctagactgggaccggcgtcgaatacaaggcgctcgggctacgttgctgttcgagcgccagcagtggaggcgccagcgggacctcaggcgggcacttgacagtagcaacctgagcctggcgaaggaacagcatctgcagaagaagtacatgaatgaggtgtacactaaccagcccacaggagactactttacacagtttaacactgggtcacggtag

SEQ ID NO: 187653 - DNA, 1478 bp, Artificial Sequence
  derived and/or modified sequence
gagttgttgacatttccgagagagcgggagcgtctgtacctctgcggcgtcactgggagcccgacggaaaactgcgctaaaggcttgtctttcccctgcccgaccgaaggagccgaccttgcctgcgctacagcttccttattttcgtcgcctgttctcctgatcctgcgtgttctaaaaaccccttaggctttccatgggttcccagaccatggcggtggcgctgcccagggacttgcggcaggacgccaacctggcaaagaggaggcacgcggagctgtgcaggcagaagcgggtcttcaacgccagaaacaggataattgggggagacactgaagcctgggatgttcaagttcatgaccagaagataaaagaagctactgaaaaagctagacatgaaactttgctgctgaaatgaggcaaaatgacaaaatcatgtgcatattggaaaaccggaaaaagagggataggaaaaatctctgtagggctatcaatgacttccaacagagctttcagaagccagaaactcgccgtgaatttgatctgtccgaccccctagcccttaagaaagatcttccagcccggcagtcagataatgatgttcggaatacgatatcaggaatgcagaaattcatgggagaggatttaaacttccatgagaggaagaaattccaagaggaacaaaacagagaatggtctttgcagcagcaaagggaatggaagaacgcccgtgctgaacaaaaatgcgcagaggccctctacacagagacaaggctgcagtttgacgagacagccaagcacctccagaagctggaaagcaccaccagaaaggcagtttgtgcatctgtgaaagacttcaacaagagccaggccatcgagtcagtggaaaggaaaaagcaagagaaaaagcaagaacaagaggacaacttggccgagatcaccaacctcctgcgtggggacctgctctccgagaacccgcagcaggcagccagctccttcgggccccaccgcgtggtccctgaccgctggaagggcatgacccaggagcagctggagcagatccgcctagtccagaagcagcaaatccaggagaagctgaggctccaggaagaaaagcgccagcgagacctggactgggaccggcggaggattcagggggctcgcgccaccctgctgtttgagcggcagcagtggcggcggcagcgcgacctgcgcagagctctggacagcagcaacctcagcctggccaaggagcagcatttgcagaaaaaatatatgaatgaagtctatacaaatcaacccacgggagactatttcacacaatttaatacaggaagtcgataatgaggaacacacccttgttcccgtcattcacgtataaagagtggctaccttaaagagtcacgtttcttttttaaagatacactccttgggccacaagtacccttcagctgtaatcgtccactgtggacaaaaca

SEQ ID NO: 187654 - DNA, 1394 bp, Artificial Sequence
  derived and/or modified sequence
gttgttgacatttccgagagagcgggagcgtctgtacctctgcggcgtcactgggagcccgacggaaaactgcgctaaaggcttgtctttcccctgcccgaccgaaggagccgaccttgcctgcgctacagcttccttattttcgtcgcctgttctcctgatcctgcgtgttctaaaaaccccttaggctttccatgggttcccagaccatggcggtggcgctgcccagggacttgcggcaggacgccaacctggcaaagaggaggcacgcggagctgtgcaggcagaagcgggtcttcaacgccagaaacaggataattgggggagacactgaagcctgggatgttcaagttcatgaccagaagataaaagaagctactgaaaaagctagacatgaaactttggctgctgaaatgaggcaaaatgacaaaatcatgtgcatattggaaaaccggaaaaagagggataggaaaaatctctgtagggctatcaatgacttccaacagagctttcagaagccagaaactcgccgtgaatttgatctgtccgaccccctagcccttaagaaagatcttccagcccggcagtcagataatgatgttcggaatacgatatcaggaatgcagaaattcatgggagaggatttaaacttccatgagaggaagaaattccaagaggaacaaaacagagaatggtctttgcagcagcaaagggaatggaagaacgcccgtgctgaacaaaaatgcgcagaggccctctacacagagacaaggctgcagtttgacgagacagccaagcacctccagaagctggaaagcaccaccagaaaggcagtttgtgcatctgtgaaagacttcaacaagagccaggccatcgagtcagtggaaaggaaaaagcaagagaaaaagcaagaacaagaggacaacttggccgagatcaccaacctcctgcgtggggacctgctctccgagaacccgcagcaggcagccagctccttcgggccccaccgcgtggtccctgaccgctggaagggcatgacccaggagcagctggagcagatccgcctagtccagaagcagcaaatccaggagaagctgaggctccaggaagaaaagcgccagcgagacctggactgggaccggcggaggattcagggggctcgcgccaccctgctgtttgagcggcagcagtggcggcggcagcgcgacctgcgcagagctctggacagcagcaacctcagcctggccaaggagcagcatttgcagaaaaaatatatgaatgaagtctatacaaatcaacccacgggagactatttcacacaatttaatacaggaagtcgataatgaggaacacacccttgttcccgtcattcacgtataaagagtggctacctt

SEQ ID NO: 187655 - protein, 1882 aa, Artificial Sequence
  derived and/or modified sequence
MVGRGVPLCAAQPAVAEGGPAREPPPLLEVSPRKRLPAGPDQDPCGSRPAPEGAGAGPEQGHSAGGGGWCRHCHTKLVELKRQAWKLVSGPGTTLRDPCLSALLLDKLPAPGALPACRPEAERRCDVCATHLQQLTREAMHLLQAPASHEDLDAPHGGPSLAPPSTTTSSRDTPGPAGPAGRQPGRAGPDRTKGLAWSPGPSVQVSVAPAGLGGALSTVTIQAQQCLEGMWSVSRVNSFLPPACLAEAAVAAVAVADTVRECPPVAGPDGLSKAWGRGGVCTSALVTPTPGSVGGSTGPSAAASFFIRAMQKLSLASKRKKPHPPPPPATRGTSTYPTDFSGVLQLWPPPAPPCLLRAASKTKDNPGSIGKVKVMLRIWPAQGAQRSAEAMSFLKVDPRKKQVILYDPAAGPPGSAGPRRAATAAVPKMFAFDAVFPQDSEQAEVCSGTVADVLQSVVSGADGCIFSFGHMSLGKSYTMIGKDSSPQSLGIVPCAISWLFRLIEERRERTGTRFSVRVSAVEVCGRDQSLRDLLAEVAPGSLQDTQSPGVYLREDPVCGAQLQNQSELRAPTAEKAAFYLDAALAARSTSRAGCGEDARRSSHMLFTLHVYQYRMEKCGRGGMSGGRSRLHLIDLGSCEAAAGRAGEAAGGPLCLSLSALGSVILALVNGAKHVPYRDHRLTMLLRESLATAGCRTTMIAHVSDAPAQHAETLSTVQLAARIHRLRRKKAKYASSSSGGESSCEEGRARRPPHLRPFHPRTVALDPDRTPPCLPGDPDYSSSSEQSCDTVIYVGPGGAALSDRELTDNEGPPDFVPIIPALSRHRPSKGPRDADHFRCSTFAELQERLECMDGNEGPSGGPGGTDGAQASPARGGRKPSPPEAASPRKAVGTPMAASTPRGSSGPDTHQGTPEPCKAIVWGDQREDSSAWPELLVPEKAAVSGGRRPLPSPAPPPPQLLEACRAPEEPGGGGTDGVARTPPVGMSGQVAGSPMLPGATCPRLAAGSRCPERGLLTTTVTLQRPVELNGEDELVFTVVEELSLGALAGAGRPTSLASFDSDCSLRALASGSRPVSIISSINDEFDAYTSQAPEGGPLEGAAWAGSSHGSSISSWLSEVSVCTADSRDPTPQPRFSPDSLAGLDPGGPPALDGSLGDGSSGFLGPDRPDSPGPTWGPCPGEVAAVAPSRPGREPQAGPSRWASAAQTIHSSLPRKPRTASATTRVGCARLGQSPPGRGGLFEDPWLLRVGECDTQAASAGRAPSPTLGSPRLPEAQVMLACAQRVVDGCEVAARAARRPEAVARIPPLRRGATTLGVTTPAVSWGDAPTEVVACSGSLKASPTSKKGLAPKAGFLPRPSGAAPPAPPTRKSSLEQRSSPASAPPHAVNPARVGAAAVLRGEEEPRPSSRADHSVPRATSSLKARASKVEAAHRLAGHASLERYEGLAHSSSKGREAPGRPPRAVPKLGVPPSSPTHGPAPACRSGAAKAVGAPKPPVGGGKGRGLVAGGSRALGPSVKLSTASVTGRSPGGPVAGPRAAPRAGPSVGAKAGRGTVMGTKQALRAAHSRVHELSASGAPGRGGSSWGSADSDSGHDSGVNVGEERPPTGPALPSPYSKVTAPRRPQRYSSGHGSDNSSVLSGELPPAMGRTALFHHSGGSSGYESLRRDSEATGSASSAPDSMSESGAASPGARTRSLKSPKKRATGLQRRRLIPAPLPDTTALGRKPSLPGQWVDLPPPLAGSLKEPFEIKVYEIDDVERLQRPRPTPREAPTQGLACVSTRLRLAERRQQRLREVQAKHKHLCEELAETQGRLMLEPGRWLEQFEVDPELEPESAEYLAALERATAALEQCVNLCKAHVMMVTCFDISVAASAAIPGPQEVDV

SEQ ID NO: 187656 - DNA, 5649 bp, Artificial Sequence
  derived and/or modified sequence
atggttggtcggggcgtgcccctatgcgctgcacaaccggcagtggcagaggggggcccggctcgtgagccgccgcctcttctcgaggtgtctccccggaagcggctgcccgccggtcctgatcaagacccatgtgggagtcgcccagcgccagaaggggccggcgctggcccggagcagggccactccgctggagggggcggctggtgccggcattgtcacaccaaactggtcgaattgaagaggcaggcttggaagttggtgagtggacctggaacaacattgcgcgacccgtgcctctctgcattgcttcttgacaaactgccagcccctggggctcttccagcgtgccgaccagaagccgaaagacgctgtgatgtctgcgccacccatctgcagcagctcacaagggaggccatgcacctactgcaggctccagcatctcacgaggatctggacgcccctcacggcggtccaagcctggctcctccctctactactacgtccagtcgtgacaccccggggcccgcaggccccgctgggcggcagccgggtcgtgcgggaccagatcgcacaaaggggctggcctggtctccaggccctagtgtgcaggtgagcgtagcacccgccggcctcggaggcgcactatcgacagtaactatccaggcacagcaatgtctcgagggcatgtggagcgtgtcaagggtgaactcatttttgcctcctgcctgcctagccgaggccgctgtggctgcggtcgctgtggccgacaccgtgcgggagtgtccacctgtcgccggcccagatggactctcaaaagcctgggggagaggaggtgtgtgtacatccgccctagtgacacctacacccgggtccgtcggcggctctacgggacccagcgccgccgccagcttctttatccgggccatgcagaaactgagccttgctagcaaaagaaagaagccgcacccgccacctccacctgctacccgaggcacatcgacgtacccaactgacttctcaggcgtgcttcagctgtggcccccgccggccccaccatgtcttcttagggcagccagcaagactaaggacaacccggggtccattggcaaggttaaagtgatgcttcgtatttggcccgcgcagggcgcccagaggagcgctgaagctatgtcctttttaaaagtagatccaaggaaaaagcaagtaatcctgtacgaccccgctgctgggcctcctggatccgccggcccacgcagagccgccacagcggctgtcccaaaaatgtttgctttcgacgctgtctttccccaggacagcgagcaggctgaggtgtgtagtggcacagtggcagatgttctgcaaagcgttgtgtcaggggccgacggctgcatctttagttttggacacatgagcctggggaagtcgtataccatgatcggcaaggattcctcaccgcagagtctgggaatcgtaccatgtgcaattagctggcttttccgattaattgaagaaagaagagaaaggaccgggactagattcagcgtgagggtgagcgcagtagaggtgtgcggcagggaccaatccttgagagacttgcttgccgaggtggctccggggagccttcaggacacccaaagccctggcgtataccttagggaagacccagtgtgcggagctcagctgcagaatcagtctgagctgagggcgccgaccgctgagaaggcggcattttacttggatgctgctctggcggctaggagcacaagccgcgctgggtgtggagaagatgcaaggaggtcctctcatatgttgttcacattacacgtctatcaatatcgcatggagaaatgcggccggggggggatgagtggtggacgcagtaggctgcatctcattgacctgggatcatgtgaggccgccgcaggcagagcgggggaggcggccggcggtccactttgcctgagtctctctgccctgggctccgtcatcctcgctctggtcaacggagccaagcatgttccctacagagatcacagactgaccatgctattgcgggaatcgctcgctactgccgggtgcagaaccaccatgatcgcacatgtttcggacgcgccagctcaacatgcagaaacactgagcaccgtgcagttagccgcccgcatccaccggctcaggcgtaaaaaggctaagtacgccagttctagcagcggcggtgagtcatcgtgtgaagagggcagggctagaaggcccccacacctgcgccctttccacccgaggaccgtggccctggacccagatcggacccccccatgtctacccggggacccggactacagctcctcctctgaacagagctgtgacactgtgatatatgtgggtcccgggggcgcagccctttccgaccgagaactgacagacaacgaagggcccccagactttgtccccattatcccagcgctgtcccgccatcgcccctctaaaggacctagagatgctgatcacttcagatgctccacctttgctgagctccaagaacggctggaatgtatggacggaaacgagggaccctccgggggtcctggaggcacagacggagctcaggcatcccccgcaaggggtgggcgtaagccttccccacccgaagcagcctcacctagaaaagccgtcggcacccctatggcagcctccacaccccgtgggagctcggggcccgacacacatcaggggacacctgaaccttgtaaagccatcgtgtggggggaccagcgcgaagattcttcagcctggccggagctccttgtgccggaaaaggcagccgtatctggaggcagacgcccgctgccaagccccgcaccaccaccaccgcaactgctcgaggcctgtagggccccagaggaacccggtggaggaggcacagatggtgtagcgcgaacaccacccgtcggtatgtcagggcaggtagcagggtctccaatgttgccgggagcaacctgtcccaggcttgctgctggctcaaggtgtccggaacggggtctcctaactaccacagtgaccttgcagaggccggtggagctcaacggcgaggatgaactggtctttaccgtcgtggaggagctgagccttggagctcttgccggcgctggaaggcccactagtctggcatcttttgattctgactgcagcctccgggccttggcttccggatcccgacctgtgagtataattagctctatcaatgacgagtttgatgcgtatacgtctcaggcgcctgagggtggaccgctggaaggggcagcttgggccgggtcttcccacggttcctctatcagcagctggctctccgaagtgtcagtttgcaccgccgactctcgagaccctaccccccaaccccgtttctcacctgatagtctcgccggacttgatccaggtggcccacctgctctggacggaagcctgggtgatggcagttcaggctttctgggcccagatcggcccgactcccctgggcccacatggggcccatgtccaggcgaggtcgcagcggttgcaccaagccgcccaggcagagaaccgcaggctggcccctcgcgatgggcctctgcagctcagacaattcacagttcgctcccacgaaaaccaaggaccgcctcagcgaccacccgggttggttgcgcaaggctcggacagtccccccccgggagggggggactgttcgaggacccttggctactgagagtgggggagtgcgacactcaagcggcatctgccggccgggccccttctccaaccttggggtcaccgcgcctccctgaagctcaggtgatgctggcatgtgcccagcgggttgtagacgggtgcgaagtagccgcccgggctgcgagaaggccggaggcagtggccagaattccgcccctccgacggggagcaaccacactaggtgtcaccacccccgctgtaagctggggcgatgcaccgacggaggtggtggcatgctccggatcgctgaaagcttcaccaacttcaaaaaaaggtctcgctcctaaggccggcttccttccgcgtccctcaggcgcggctcctccagctccacctacccggaaatcaagcctcgagcagaggtccagccccgcatctgcccctccccatgccgtaaaccccgctcgggtaggcgctgcagctgtactcaggggcgaagaggaaccccgcccaagcagtcgggctgatcacagcgtgccaagggctactagctctctgaaggcccgggcctcaaaggtcgaagccgcccatagacttgccggacacgcctccctggaacgctacgaaggcctggcacacagcagcagcaaagggagagaagcaccaggtcggccccctcgggcagttccaaagctgggggtgccaccctcctcacctacacatgggcccgcacccgcttgcagatccggtgccgccaaagcagtcggagctcctaagcctccggtcggcggtggcaaaggcaggggcctggtcgcaggagggtcccgagcactgggaccgtctgtcaagctctctactgctagcgttacgggccggagtcctggcggccccgttgcaggacccagggctgccccacgggccggtccaagtgtaggtgcaaaagctgggcggggcaccgttatgggcacaaaacaggccctgagggccgcccacagtagagttcacgagctgagcgctagtggggcaccgggtcgggggggctctagctggggtagtgctgactcggactccgggcacgacagcggggtgaacgttggcgaagagagaccccctaccgggcctgcactgccgtccccttactccaaagtgaccgccccacgccgcccccagaggtatagctctggacatggatctgacaattcatcagtgttgtctggcgagctgccaccggccatgggcagaactgccctattccaccacagtggcggcagcagcggttatgagagcctacggagagacagcgaagcaactggatctgcttcaagtgcccccgacagcatgtctgagtcgggagcagcgagtcccggggcgcgcacgaggtcactcaagagccctaagaagagggccactgggctgcagcgtcgcaggcttatacccgcaccattgcctgatacaactgctctggggaggaagccatcgcttcccgggcagtgggtcgaccttcccccgccacttgcagggtccctgaaagagcctttcgagatcaaggtttatgagattgatgacgtggagcggcttcaaagaccgcggcccaccccacgggaagctcctacgcaaggattagcgtgtgttagcaccaggttaagactggcagagaggaggcagcagcggcttagagaggtccaagctaaacataaacacctctgcgaggaacttgccgagacccagggaagactaatgttggagcccgggcggtggctggaacagttcgaagtggacccagagcttgaaccagagtccgctgaatatcttgctgccctggagcgagccacagcagcattagagcaatgcgttaacctctgtaaagctcacgtgatgatggtaacctgcttcgatatcagcgtagccgcaagcgccgcaattcccggtcctcaagaagtcgacgtctag

SEQ ID NO: 187657 - DNA, 5649 bp, Artificial Sequence
  derived and/or modified sequence
atggtcggccgcggcgtccctctgtgcgctgcgcagcccgcggtggccgagggcggcccggcccgcgagccgccgccgctgctggaggtgtccccccgaaagaggctacccgccgggcccgaccaggacccatgcggcagccgccctgctcccgaaggcgccggggccggcccagagcagggccactcggccggcggaggcggctggtgccgccactgccacacgaagctggtggagctcaagcgacaggcgtggaagctggtcagcgggcccgggaccaccctccgggatccttgcctctctgccctgcttctcgacaagctaccagcacctggggccctgccagcctgtcgcccagaggccgagcgccgctgtgacgtctgcgccacacacctgcagcagctcacacgggaggccatgcacctgctgcaggcccctgccagccatgaggaccttgacgccccccatggaggccccagcctcgcaccccccagcaccacgaccagctcgagggacacgccaggaccagcgggtcctgcagggaggcagccaggacgagctgggccagacaggaccaaggggctggcctggtcccccgggcccagtgtccaggtgtctgtagcacctgcgggtcttggaggggcgctgagcacggtcaccatccaggcccagcagtgcctggagggcatgtggagtgtctcgcgggtcaacagcttcctcccgccggcgtgcctggccgaggcagcggtggcggccgtggcggtggcagacacggtccgagaatgcccccccgtggccggccctgatggcttgtcgaaggcctggggccgtggtggagtctgcacgtcagccctggtcacccccaccccgggctcggtggggggctccacaggcccctcagctgcagcctccttcttcataagggctatgcagaagctcagcctggcctccaagaggaagaagccccacccgccaccgcctccagccacccgcggcacctccacctaccccaccgacttcagcggggtcctgcagctgtggccgcccccggcgcccccctgcctgctcagggccgcctccaagaccaaggacaaccctggcagcatcgggaaggtgaaggttatgctgcggatctggcccgcacagggggcccagcgctcggccgaggccatgtccttcctgaaggtggaccctcggaagaagcaggtgatcctctacgatcccgccgccggtcccccaggcagcgcaggcccccggcgagccgccactgctgcagttcccaagatgtttgccttcgatgccgtcttcccccaggactccgagcaggccgaagtctgctcggggaccgtggccgacgtgctccagtcggtggtcagtggggctgatggctgcattttttcctttggccacatgagcctgggcaagtcgtacaccatgatcgggaaggacagctcaccccagagcctgggcatcgtgccctgcgccatctcctggctcttcaggctcatcgaggagcgcagggagaggacgggcacccgcttctccgtccgggtctcagccgtggaggtgtgcgggcgcgaccagagcctgcgggacctgctggccgaggtggcccctggcagcctccaggacacccagtctccgggagtgtacctgcgggaggaccccgtgtgtggggcgcagctccagaaccaaagcgagctgcgggcacccacggccgagaaggcggctttctacctggatgcggccctggcggcccgcagcaccagccgagcgggctgtggcgaggacgcccgacgcagctcccacatgttgttcacgctgcacgtctaccagtaccgcatggagaagtgcggccggggaggaatgtccggaggccgcagccgcctgcacctcatcgacctgggcagctgtgaggcggcggctggcagggccggggaggctgctgggggtcccctgtgtctgtccctgtcggccctgggcagcgtcatcttggccctggtcaacggagccaagcatgtgccgtatcgggaccacaggctcaccatgctgctgcgtgaatccctggccaccgctggctgccgcaccaccatgatcgcccacgtgtcggatgcgccagcccagcacgcagagacactcagcaccgtgcagctcgccgcccgcatccaccgcctgcgcaggaagaaggccaagtacgcctccagctcctctggcggggagagctcctgtgaggaaggccgggcccgtcggcccccgcacctgcggcccttccacccacgcactgtggccctggaccccgaccgcacgcctccctgcctgcccggtgaccccgattactcctccagcagcgagcagtcctgtgacacggtcatctacgtggggcccggtggggcggcgctgtcagaccgggagctcaccgacaacgaaggtccgcctgacttcgtgcccatcatccctgccctgagccgccaccggccctccaagggtccccgagacgcagaccacttccgctgcagcaccttcgcggagctgcaggagcggctggaatgcatggacggcaacgagggtccctcaggaggtccaggtggcaccgacggagctcaggccagccccgcccgagggggccggaagccctcgccaccagaggctgcatcccccaggaaggccgtgggcaccccgatggctgccagcacccctcgaggcagttctggtccagacacccaccagggtacccctgagccctgcaaggccattgtctggggtgaccagagagaggacagcagcgcttggcctgagctgctggtcccggaaaaggctgcagtgagtggaggcaggaggccactgcccagcccggctcccccacctcctcagttgctggaagcctgcagagccccagaagagcctgggggagggggcactgatggagtggcacggacccctcccgtgggcatgagtgggcaggtggctgggtccccgatgcttcctggggccacctgcccccgcctggctgctggcagtcgctgtccggagcggggcctgctcaccaccacagtgaccctgcagcggccagtggagctcaacggcgaggacgagctggtgttcacggtggtggaggagctgtccctgggggcgcttgccggagctgggcggcccaccagcctggctagcttcgacagtgactgctccctgcgggccctggcctcggggtcccggccagtcagcatcatcagcagcatcaatgatgagtttgacgcctacacctctcaggcccctgagggggggcccctggagggggcagcctgggccggcagcagtcacggctcctccatcagctcctggctcagcgaggtcagcgtctgcactgccgacagccgtgaccccacgccgcagccccgcttcagccccgactcgctggcagggcttgaccctgggggcccccctgccctggatggttccctgggggatggaagctctgggttcctggggccagacagacctgacagtcctgggccaacctggggtccgtgccctggggaagtggctgcagtggccccatcccgacccggcagggagccccaggccgggccctcgcggtgggcatccgcagcccagaccatccactccagcctcccccggaaaccgaggactgcctctgccaccacccgtgtgggctgtgctcgcctgggccagagcccacctggccgtggaggcctgtttgaggacccatggctgctccgggtaggggagtgtgatacccaggcagcttctgctggcagggcccccagccccacacttggctccccccggctgcctgaggcccaggtgatgctagcctgtgcccagagagtggtggacgggtgtgaggtggcagccagggcggcccgcaggccagaggctgtggctcggatcccaccgctgcggaggggtgccaccacgctgggtgtgacaacgccagctgtgtcctggggagatgctcccacggaggtggtggcctgctcggggagcctgaaggcctcccccaccagcaagaagggtctggctcccaaggcgggcttcctcccgaggcccagtggggcggcccccccggccccacccacgcggaagtccagcctggagcagaggagcagcccggcctcggcccctccgcatgctgtgaacccggcgcgggtcggggctgctgctgtccttcgaggggaggaggagcccagacccagcagccgggctgaccactctgtccccagggccacgtccagcctgaaggcccgggccagcaaggtagaagcagcacaccgtcttgccggacacgcgtctctggagcggtacgaaggcctggcgcacagcagcagcaagggccgggaagcccctgggcggcctccccgggctgtacccaagctgggtgtgccaccctccagccccacacacggtccagctcccgcctgtaggagcggcgcagccaaggctgtgggggcccccaagccccctgttggtggaggcaagggccgtggcctagtggctggtgggtcgcgggctctggggccttcggtgaagctgtctacggcctctgtgacgggcaggagccctggcggccctgtggccggtcccagagcagccccacgggccgggcccagtgtcggggcgaaggctggccggggtaccgtcatgggcacaaagcaggcgctccgggctgctcacagccgcgtccatgagctgtcagccagtggagccccgggccgaggtggctcctcgtggggctcggcggactcagacagcggccatgacagcggcgtgaacgtgggggaggagcggccacccacgggcccggccctgccctccccctacagcaaggtgaccgccccacggcggccccagcgctacagcagcggccatggcagcgacaacagcagcgtgctgagtggagagctgccgcccgccatgggccgcaccgcccttttccaccacagcggtggcagcagtggctatgagagcctgcggcgcgacagcgaggccaccggcagcgcctcctccgcccctgactccatgagcgagagtggggctgcctccccaggcgcccgcacccgcagcctcaagtcccccaagaagagggccacaggtctgcagcggcggcgcctgattcccgccccactgcccgacaccactgccctgggccgtaagcccagcctccccgggcagtgggtggacctgcccccgcccctggctggctccctgaaggagccgttcgagatcaaggtgtacgagatcgatgacgtggagcgccttcagcggccccgccccaccccgagggaggcccccacccagggtctggcgtgcgtcagtacaaggctgcggctggcggagcgcaggcagcagcggctgcgggaggtgcaggccaagcacaagcacctgtgtgaggagctggccgagacccagggccggctgatgctggagcctggccgctggctggagcagtttgaggtggacccggagctggagcccgagtcggccgagtacctggcggccctggagcgagccacggcggccctggagcagtgcgtgaacctgtgcaaggcgcacgtcatgatggtcacctgcttcgacatcagcgttgcagccagtgctgccatcccggggccgcaggaggtggacgtctga

SEQ ID NO: 187658 - DNA, 5649 bp, Artificial Sequence
  derived and/or modified sequence
atggtgggccggggcgtgcccctgtgtgccgcccagcctgctgtggccgagggcggccctgcccgggagcccccacccctgctggaggtgagccccaggaagaggctgcctgctggccctgaccaggacccctgtggcagcaggcctgcccctgagggcgctggggccggccctgagcagggccacagcgctgggggcggcggctggtgccgccactgccacaccaagctggtggagctgaagaggcaggcctggaagctggtgtctggccctggcaccaccctgcgggacccctgcctgagcgccctgctgctggacaagctgcctgcccctggggccctgcctgcctgcaggcctgaggccgagcggcgctgtgatgtgtgtgccacccacctgcagcagctgacccgggaggccatgcacctgctgcaggccccagccagccatgaggacctggatgccccccacggcggccccagcctggccccacccagcaccaccaccagcagccgggacaccccaggccctgctggccctgctggccggcagcccggccgggccggccctgacaggaccaagggcctggcctggagccctggccccagcgtgcaggtgtctgtggccccagctggcctgggcggggccctgagcacagtgaccatccaggcccagcagtgcctggagggcatgtggagcgtgtcccgggtgaacagcttcctgcccccagcctgcctggccgaggccgctgtggccgctgtggccgtggccgacacagtgagagaatgtcctcctgtggccggcccagatggcctgagcaaggcctggggccggggcggcgtgtgcaccagcgccctggtgacccccaccccaggctctgtgggcggcagcacaggccccagcgctgctgccagcttcttcatccgggccatgcagaagctgagcctggccagcaagaggaagaagccccaccccccacctcctccagccacccggggcaccagcacctaccccacagacttctctggagtgctgcagctgtggcccccaccagccccaccctgcctgctgcgggccgccagcaagaccaaggacaaccctggcagcatcggcaaggtgaaggtgatgctgcgcatctggccagcccagggcgcccagaggtctgctgaggccatgtccttcctgaaggtggaccccaggaagaagcaggtgatcctgtatgaccctgctgctggccccccaggcagcgctggccccaggagagctgccacagctgctgtgcccaagatgtttgcctttgatgctgtgttcccccaggacagcgagcaggccgaggtgtgcagcggcaccgtggctgatgtgctgcagagcgtggtgtctggagcagatggctgcatcttctcctttggccacatgagcctgggcaagagctacaccatgattggcaaggacagcagcccccagagcctgggcatcgtgccctgtgccatctcctggctgttccggctgattgaggagcggcgggagaggacaggcacccgcttctctgtgcgggtgtctgctgtggaggtgtgtggccgggaccagagcctgcgggacctgctggccgaggtggcccctggcagcctgcaggacacccagagccctggggtgtacctgcgggaggaccctgtgtgtggggcccagctgcagaaccagagcgagctgcgggcccccacagctgagaaggccgccttctacctggatgctgccctggccgcccggagcaccagccgggccggctgtggggaggatgcccggcgcagcagccacatgctgttcaccctgcacgtgtaccagtacaggatggagaagtgtggccggggcggcatgtctgggggccgcagccggctgcacctgattgacctgggcagctgtgaggccgccgccggccgggccggggaggccgccggcggccccctgtgcctgagcctgagcgccctgggcagcgtcatcctggccctggtgaatggagccaagcacgtgccctacagagaccaccggctgaccatgctgctgcgggagagcctggccacagctggctgcaggaccaccatgattgcccacgtgtctgatgccccagcccagcacgccgagaccctgagcacagtgcagctggccgcccgcatccaccggctgcggaggaagaaggccaagtatgccagcagcagcagtggaggagagagcagctgtgaggagggccgggcccggcggcccccccacctgcggcccttccaccccaggacagtggccctggaccctgacaggaccccaccctgcctgcccggggaccctgactacagcagcagcagcgagcagagctgtgacaccgtcatctacgtgggccctggaggagctgccctgagtgaccgggagctgacagacaatgaaggacctccagactttgtgcccatcatcccagccctgagccgccaccggcccagcaagggccccagagatgctgaccacttccgctgcagcacctttgctgagctgcaggagcggctggagtgcatggatggaaatgaaggccccagcggcggccctgggggcacagatggagcccaggccagccctgcccggggcggcaggaagcccagccccccagaggccgccagccccaggaaggctgtgggcacccccatggccgccagcaccccccggggcagcagcggccctgacacccaccagggcaccccagagccctgcaaggccatcgtgtggggagaccagcgggaggacagcagcgcctggccagagctgctggtgcctgagaaggctgctgtgtctgggggcagaagacccctgcccagccctgcccctcctccaccccagctgctggaggcctgccgggcccctgaggagcccggcggcggcggcacagatggagtggcccggaccccacctgtgggcatgagcggccaggtggccggcagccccatgctgcccggggccacctgcccccggctggccgccggcagccgctgcccagagcggggcctgctgaccaccaccgtgaccctgcagaggcctgtggagctgaatggagaagatgagctggtgttcaccgtggtggaggagctgagcctgggcgccctggccggggccggccggcccaccagcctggccagctttgacagcgactgcagcctgcgggccctggccagcggcagcaggcctgtgtccatcatcagcagcatcaatgatgaatttgatgcctacaccagccaggcccctgagggcggccccctggagggcgccgcctgggccggcagcagccacggcagcagcatcagctcctggctgtctgaggtgtctgtgtgcacagctgacagccgggaccccaccccccagccccgcttctccccagacagcctggccggcctggaccccggcggccccccagccctggatggcagcctgggagatggcagcagcggcttcctgggccctgacagaccagacagccctggccccacctggggcccctgccctggagaggtggccgctgtggcccccagccggcccggccgggagccccaggccggccccagccgctgggccagcgctgcccagaccatccacagcagcctgcccaggaagcccaggacagccagcgccaccaccagggtgggctgtgcccggctgggccagagccccccaggccggggcggcctgtttgaggacccctggctgctgcgggtgggagaatgtgacacccaggccgccagcgctggccgggcccccagccccaccctgggcagcccccggctgcctgaggcccaggtgatgctggcctgtgcccagagggtggtggatggctgtgaggtggccgcccgggccgcccggcggcctgaggccgtggcccgcatcccccccctgcggcggggggccaccaccctgggcgtgaccaccccagctgtgtcctggggagatgcccccacagaggtggtggcctgcagcggcagcctgaaggccagccccaccagcaagaagggcctggcccccaaggccggcttcctgccccggcccagcggggccgcccccccagccccacccaccaggaagagcagcctggagcagaggagcagccctgccagcgcccctcctcatgctgtgaacccagcccgggtgggcgctgctgctgtgctgcggggggaggaggagccccggcccagcagcagagctgaccacagcgtgccccgggccaccagcagcctgaaggcccgggccagcaaggtggaggccgcccaccggctggccggccacgccagcctggagagatatgagggcctggcccacagcagcagcaagggccgggaggcccctggccggccccccagggctgtgcccaagctgggcgtgccccccagcagccccacccacggccctgccccagcctgccgcagcggggccgccaaggctgtgggcgcccccaagccccctgtgggcggcggcaagggccggggcctggtggccggcggcagccgggccctgggccccagcgtgaagctgagcacagcctctgtgacaggccgcagccctgggggccctgtggccggcccccgggccgccccccgggccggccccagcgtgggcgccaaggccggccggggcaccgtgatgggcaccaagcaggccctgcgggccgcccacagccgggtgcatgagctgagcgccagcggggcccctggccggggcggcagctcctggggcagcgctgacagcgacagcggccatgacagcggcgtgaatgtgggggaggagcggcccccaactggacctgccctgcccagcccctacagcaaggtgacagccccccggcggccccagcgctacagcagcggccacggcagtgacaacagctctgtgctgagcggggagctgcccccagccatgggccgcacagccctcttccaccacagcggcggcagcagcggctatgagagcctgcggcgggacagcgaggccaccggcagcgccagcagcgccccagacagcatgtctgagagcggggccgccagccctggggcccggaccaggagcctgaagagccccaagaagagggccaccggcctgcagaggcggcggctcatcccagcccccctgcctgacaccacagccctgggcaggaagcccagcctgcccggccagtgggtggacctgcccccacccctggccggcagcctgaaggagccctttgagatcaaggtgtatgaaattgatgatgtggagcggctgcagaggccccggcccaccccccgggaggcccccacccagggcctggcctgtgtgtccacccggctgcggctggccgagcggcggcagcagaggctgcgggaggtgcaggccaagcacaagcacctgtgtgaggagctggccgagacccagggccgcctgatgctggagcccggccgctggctggagcagtttgaggtggaccctgagctggagcctgagagcgctgagtacctggccgccctggagcgggccacagctgccctggagcagtgtgtgaacctgtgcaaggcccacgtgatgatggtgacctgctttgacatctctgtggccgccagcgctgccatccctggcccccaggaggtggatgtgtag

SEQ ID NO: 187659 - DNA, 5649 bp, Artificial Sequence
  derived and/or modified sequence
atggtgggccggggcgtgcccctgtgcgccgcccagcccgccgtggctgagggcgggcctgctcgtgagcctccgccactgctagaggtatctccgaggaagcgtcttccagccggacctgaccaggatccttgtggcagcaggccagcacctgaaggagctggagccggtccagaacaagggcacagtgccggcggaggtgggtggtgtagacactgccatacaaaactggtagaactgaagagacaggcttggaaactggttagcggcccagggactactctgcgggacccttgcctaagcgctctgcttctcgataagctgccagcccccggcgccttgcccgcttgcaggccagaggcagagcggcgctgtgatgtgtgtgccacacacctgcagcagctcactagagaggctatgcatctcttgcaagctccagccagccatgaggacctggatgcccctcatggcggcccaagcctggccccaccttcaaccacaaccagttcaagagatacacctgggccagcagggcctgctggacgtcagcccggaagagcgggaccggacaggactaaaggcctggcatggtctccgggaccaagcgttcaggtatccgtggcacctgccgggttgggcggcgccctgtccacagtgaccatccaggcacaacagtgtctggaagggatgtggtccgtgagcagggtgaactcgttcctgcctcccgcttgcctagcagaggccgccgtcgctgccgttgcagtggcagacactgttcgcgaatgccctccggtggcaggtcccgatggacttagcaaagcctgggggaggggtggagtctgtacctctgccctggtgacccctacacctgggtccgtgggcgggtctacgggaccctctgcggccgcatccttcttcatccgagcaatgcaaaagctgtcccttgcttctaagaggaagaagccccatccccccccaccccctgctacaaggggaaccagtacctatccgaccgatttcagcggagtgctgcagctgtggcccccccctgcacctccctgtctcctgcgggccgccagtaaaaccaaggacaaccccgggtccattgggaaagtcaaagtgatgctgaggatctggccagctcagggcgcccaacggtccgccgaagctatgtccttcctgaaagtggatccacggaagaaacaggtgatcctgtatgaccccgctgcgggcccgcccggctcagctggccctagacgggcagctacggcggctgtgccgaagatgttcgccttcgatgccgtcttccctcaggactctgagcaggccgaagtctgttccggaacggtggcagacgtgctgcagagcgttgtctcaggagcagatggctgcatcttcagcttcgggcacatgagcctcgggaagtcctacacaatgattggcaaggatagcagcccacagagcctggggattgtgccctgcgccatctcatggctattccgcctgattgaggagcgtcgcgaaaggacgggaacccgtttttcggttcgcgtctcggccgtggaagtttgtggtagagaccagtccctcagagacctgctagctgaagtggctccaggtagcttacaggatacccaatcccctggagtgtaccttcgcgaagaccctgtgtgcggcgcccagctccagaaccagagcgaactgcgcgcccccaccgctgagaaagctgcgttctacctcgatgccgcgctagccgcgcgaagcaccagccgggctggctgtggtgaagatgcaaggcggagctcacatatgctgttcaccctgcatgtataccagtaccgaatggaaaaatgcggaagagggggaatgtcaggtgggaggtcacggttgcatctgatcgatctgggcagctgcgaggctgccgcgggtcgggccggggaagcagctggaggccccttatgcctcagcctgagcgcattgggatccgtcatactggcgttggtcaacggcgctaagcatgtgccctatagagaccacagactgacaatgctgttgcgggaatctctggctaccgccggttgccggacaacaatgatcgcccatgtatccgacgccccagcgcagcatgcagagacactgagtactgtccaactggccgccaggatccataggttgagaagaaagaaggctaaatacgctagttctagtagcgggggagagtccagctgcgaggaaggcagagcccgacgccccccacacttgaggcccttccatccacgaactgtagctctggatcctgatcggactcctccctgcctgccgggggatccggattactcgtcatcttctgagcaaagttgtgacacagtgatctatgtgggtcccggcggagcagccctgtccgatcgcgagctgacagacaatgaaggtccccctgattttgtgccaatcattccagccctgagccgacatcgcccctcgaagggacccagagatgctgaccactttcgttgcagcacgttcgctgaactccaggagcggctcgaatgtatggacggtaacgagggcccatcggggggacctggcggcacggatggggctcaggcatcccctgccaggggcgggaggaagccatcaccccctgaggcggcctctccacgaaaagccgtaggcacgccgatggctgccagcacccccagaggatcatctgggcccgacacccaccagggcacaccagagccctgcaaggctatcgtgtggggtgatcagcgcgaggactcatctgcttggcccgagttgctcgtcccagaaaaggccgccgtgtccggggggcgccgtccactgccaagtccagccccacccccacctcagttactggaggcctgtcgagctcctgaagagcctgggggtgggggcactgatggggtggctcggacaccaccagtgggaatgagcggccaggtggccggctcacccatgctccccggagctacctgcccacggcttgccgcagggagccggtgccctgaaaggggtttgttgaccacaacagtaactctccagcgcccagtggagctgaacggagaagacgagttggtgttcaccgtagttgaagagctgtctcttggggctctggctggcgccggaagacctacctcccttgcaagctttgatagcgactgctccctccgagcgctcgcttctggctcaagacctgtgagtataataagctccattaatgatgagtttgacgcttacaccagtcaggcacctgagggcgggcccctggagggagccgcttgggcggggagctcgcatggttcctcaatatcttcttggctgtccgaagtttctgtatgcaccgctgattcccgagaccccacgccacaacctaggttcagtcctgatagcttggcaggactggatcccgggggacccccagctctggatgggtccttgggagatggaagcagtggcttcttaggcccagaccgcccagatagcccagggccaacatggggcccctgtccaggtgaggtagccgctgtcgccccctccagacccggcagggagcctcaggccggaccttccagatgggcgagtgcagcacagaccattcacagcagcttgcctcgaaaaccacgcacggcttccgccacaacacgtgtggggtgtgcacgtctgggacagtccccgcccggacggggtggccttttcgaggatccctggctgctgagggttggggaatgtgacactcaagctgcctcagccgggcgggcgccctctcctactttgggaagccctagactccctgaggcacaggttatgctcgcgtgcgcacaaagagtggtcgatgggtgtgaggttgccgcccgcgccgcaaggcgtcctgaagcagtagcgcgtatcccgccactgaggcggggagcaactaccctgggtgttaccactccggctgtgtcctggggcgacgcccccacagaggtggtggcgtgctccggttcactgaaagcaagcccgacttcaaagaaaggtcttgcacccaaggcaggattcctcccaaggccctcaggagccgccccccccgctcctcctacgcgaaaaagtagcctggagcaaagaagctcccctgcttctgctccgccacacgccgtgaaccccgccagagtgggcgccgccgccgtgctcaggggcgaagaagaaccacgaccgagtagccgagctgatcactccgtgcctagggccacctcgtcactcaaggcaagggctagcaaggtggaggctgcccacaggctcgctgggcacgcctctctggaacgttatgagggcctggcccatagctcgagtaaagggcgggaggcgcctgggaggcccccccgagcggttcctaaactgggagttccccccagcagtccgacccatgggccagcacctgcttgtaggtcaggagctgctaaggcagtcggagccccaaagcccccagtgggtggcggcaaagggagagggcttgttgccggtggctcccgggctctcggcccttctgttaaactctccacagcatcagtgactggacgctctccagggggacctgtggccggtccacgcgccgcccctcgggcgggcccctccgtcggcgctaaagccggccgtggtacagtcatgggcacaaagcaggccctaagggctgcgcatagccgtgtgcacgagttgtctgcttcgggagcacccggaaggggagggagctcatggggatccgcggatagcgacagcggccatgactccggagtgaatgtgggggaagagcgacccccaaccggccccgcacttccctccccttacagtaaggtaactgccccaagaaggccacagcggtactcctccggccatggatcagataattccagtgtgttaagtggagaattaccaccagcgatggggcggactgccctctttcatcactctggcggcagcagcggatatgagtccctcaggcgcgattctgaggccaccgggtcagcttccagcgcacccgatagtatgagcgaaagcggcgccgctagccctggtgcaagaactcgctcactcaagtccccgaaaaaaagagccacaggcttacagagaagaagactaattccggcccccttaccagatacaacggccctggggaggaagccgtcactaccaggacagtgggtcgacctgccgcctcccctggcagggtccctgaaagaacccttcgagattaaggtgtacgagattgacgacgtggagcgtctgcagcgcccaagacccaccccgcgggaagcaccgacccagggcctggcatgcgtctccaccaggctcaggcttgctgaaaggcgacagcagcgcctccgggaagtccaggctaagcacaagcacctatgcgaagaactggccgaaacccaggggcgactcatgctcgaacccggtaggtggctggaacagtttgaagtcgatcctgagctggagcccgagagtgcagaatatctggctgccctggagagggccacggccgccctggaacagtgcgtgaacctgtgcaaagctcacgtcatgatggttacctgttttgacatcagcgtggccgcttccgctgccattccaggtccccaggaggtcgatgtgtag

SEQ ID NO: 187660 - DNA, 5648 bp, Artificial Sequence
  derived and/or modified sequence
atggtcgggagaggagtcccactctgcgccgctcagccggctgttgctgagggcggtccagctagggagccccctcctttactcgaggtgagtccaaggaaacgcttaccggctggtcccgaccaggacccctgcggctcacgcccagccccagagggcgctggagcgggaccagagcagggccactcagcgggaggtggcggatggtgcaggcattgtcatacaaagctcgttgagttaaaaagacaagcttggaagctggtctctggacccggaacaacactgagggatccctgcttatcagcgttgcttttggacaaactgcccgctcccggtgctttaccagcctgcaggccagaggccgaaagacggtgcgacgtgtgtgctacccacctgcagcagctcactagggaggctatgcatctgctgcaggccccagcatcccatgaagatttggacgcaccacatgggggtccctcccttgctcccccttccactacgacctccagcagggacactccaggccctgccggacctgccggtcggcagccagggcgagccggtcctgatcggaccaaaggtctggcttggtcccctggccctagcgtgcaggtgagcgtcgccccagctggtttagggggagcactgagtacggtcacaatccaggctcaacagtgtcttgaaggcatgtggtcggtgtctagggttaatagcttcttgcccccagcttgtttggccgaagctgcggtcgccgctgtagcagtggccgacactgtcagggagtgtccgcctgtcgccggtcctgatggcctttccaaggcatggggaaggggcggagtttgcactagtgctctcgtgacgccaacacccggatccgtcgggggaagcactggaccctcagctgccgctagtttctttatccgcgcaatgcaaaagctgagtctcgcctctaagcgcaagaaaccccaccctcctcctccacctgcgactagagggacttctacataccctacagactttagtggcgtccttcagctgtggccaccgcctgcacccccttgcctattgagggcggctagtaaaacaaaagacaatcctggatcaattgggaaagttaaggtcatgttgaggatctggcccgcacagggcgcacagagatcagccgaggctatgtctttcttgaaggtcgatcctagaaaaaagcaggtgatcctgtacgatcctgcagccggaccccctgggtcagccggtcccagacgcgctgccacagccgcagtgccaaagatgtttgcgtttgatgccgtgtttccacaggactccgaacaggcagaagtatgctctgggaccgttgcggacgttctccagtcagtggtgtcaggagccgatggctgcatcttctccttcggccacatgtccttgggtaaatcctacacaatgatagggaaagacagttctccacagtcacttgggatcgtgccttgtgctattagttggttatttcgcctcatcgaagaacgtagggaacggacgggtaccagattcagcgtcagggtgtcagcagtggaagtttgtggtcgtgatcagagtctgcgcgatcttttagccgaagtggcccctggatctctgcaagacacccagagcccgggtgtgtacctaagggaggatccagtatgtggtgctcagctgcaaaaccagagcgaactgagagcgccaactgcggaaaaagccgcattttatctagacgctgcccttgccgcaagatccacgtcacgcgctggctgtggcgaagacgcgagacgcagctcccacatgctttttacactccacgtgtaccagtacaggatggaaaagtgcggacggggaggcatgagcggtggccgatcccgcctccacctcattgacttgggttcttgtgaggcagctgccggtagggctggggaagctgccggtggcccattatgtttgtcactgtccgcattgggcagtgtcatccttgccctggttaatggcgctaagcacgtgccctaccgcgatcacaggctaactatgctcctgcgggaatccctcgccactgccggatgtcgaaccactatgatcgcccacgtgagtgacgctcctgcccaacatgccgagaccttgagtactgtccagcttgctgctagaattcaccgtctccgaaggaaaaaagccaagtacgcatcgagcagttctggtggggaatcatcttgtgaagaaggtagagctaggcgccctcctcacttgcgcccattccacccaaggacagtcgcattagacccggataggactccaccgtgtctgcccggagatcccgattactcttccagctcagaacagagctgcgacaccgtgatctatgttggtcctggcggagctgccctctcagacagggagctgacagataacgagggcccaccagatttcgtgcccataatccccgcactgagcagacacagaccgtctaagggtcctagagacgccgaccatttcaggtgttctacctttgccgagctgcaggaacggctggagtgtatggatggaaatgagggaccaagtggagggccaggcggaacagatggcgcacaggcatctcctgctcggggtggcagaaaaccatccccccctgaagcagcctcccctcgcaaagccgtgggcacacctatggctgcttccaccccaagaggaagttcaggtccggatactcaccagggtacgcctgaaccctgcaaagccatcgtgtggggcgaccagagggaagactcaagcgcctggcccgagctcctcgtgccagaaaaagccgcagtgagcgggggtcggagacccctcccttctcctgctcctcctccgccacagcttctggaggcttgtcgggctccggaggagcccggaggcggtgggactgatggcgtggcacggactccacccgtgggtatgagcggacaggtggcaggaagccccatgctgccaggagcgacttgccccagacttgcagcaggtagccggtgccctgagcggggtctgcttaccaccactgtcacactgcagcgcccagtcgagctcaatggcgaggacgagctcgtattcacggtggtcgaagaactctccctaggcgctttggcaggagcaggccgtcccactagcctcgcaagtttcgactcagactgcagtcttagagcgctcgcctctggcagcagaccggtgtcaattattagcagcattaatgacgagtttgatgcttataccagtcaggctccagaggggggtcccctcgagggggctgcatgggcgggatcaagccatggatccagtatcagcagctggctctctgaggtctctgtctgcaccgctgattccagggatccaacaccccagcctaggttttcacccgacagcctcgcaggcctggatccagggggacctcccgctttagatggatcattgggcgatggaagctcagggttcttggggccagataggcccgactctccaggacccacatggggcccttgcccgggtgaggtcgccgctgtagcaccatcccgccctgggagagagccgcaagcaggcccatccaggtgggcatccgccgcacagacgatccacagtagcttaccgagaaaaccgagaactgcaagtgctaccaccagagtcgggtgcgccaggttgggacagtctccaccaggcagaggcggattgttcgaagatccatggctgctacgcgtgggcgagtgtgacacccaagcggcaagcgcaggacgtgctccctctcctactttgggcagtcctcgactgccagaggctcaagtaatgttggcttgtgctcagagggtggtggatgggtgtgaggttgctgccagggccgcaagaagacccgaggcagtcgctagaatcccgccactgcggagaggagccaccaccctgggagtgaccacccccgcagtctcttggggggacgccccaacagaagtggtggcatgtagtgggagcctgaaagcgtcccctaccagcaaaaaaggactggcaccgaaagctggcttcctcccaagaccaagtggggcagcaccccctgctccccctacaaggaaatcaagccttgagcagcggtcatctccagcaagtgcccctcctcacgctgtgaatcccgcaagggtcggggctgccgcagttctgcgcggtgaagaagagccacgcccttcaagtcgcgctgatcattcagttcctcgagccacaagctctctaaaggccagagcatccaaggtggaagcagcacaccgcctcgcaggccacgccagcctggaacggtacgagggcctcgctcatagtagttctaaaggcagggaggcacctggcaggccccctagagccgtccctaaattgggcgttcctccctcctcgccgacacacgggcctgctcctgcctgcaggtccggtgccgctaaggcagtgggagctcccaagcccccagtgggcggaggaaagggtcgtgggctcgtggctgggggttctagggcactgggcccttcagttaaactttctactgcttccgtgactgggcgatctcctgggggtccggttgctggcccaagggcagcccctcgggcagggccaagcgtaggggcaaaagccggtcggggaacagttatgggtactaagcaggcactgcgggcagcccattcgcgcgttcacgaactgtctgccagtggagcaccgggtcgtggcggatcttcgtggggctcggcggattcagatagtggacatgactcgggagtaaacgtgggagaagaaaggccaccgacggggcctgcgctaccaagtccctactctaaggtgaccgcacccaggaggccccaacgctactctagcggacacggctcggacaatagttccgtactctcaggtgagttacccccagccatgggacggactgcactgttccatcattctggtggatctagcggctacgaatccttgaggagagattcggaggctaccgggagtgcctcatccgctccagatagtatgtctgaatcgggcgcagcaagcccaggggctcggactagaagccttaagtctccaaaaaagcgggctaccggactacaacgcagacgcctgatcccagcacctctaccagataccactgcactcggcaggaagccatcgctgcccggacagtgggtcgacttacccccaccattagcaggatccttaaaggagccattcgagattaaagtctatgagattgacgatgttgaaagacttcagaggcccagaccaaccccgagggaggcacctacccaggggctcgcgtgcgtgagtaccaggctcaggctggcagaacgtagacaacagagactccgtgaggtccaggcaaaacacaagcatctatgtgaggaactcgcagagactcagggtaggctgatgctggagccgggtcgatggctggagcagtttgaagtggatcctgaactggagccagagtccgcagagtacctggccgcactcgagcgcgctaccgctgcactcgagcagtgcgtcaatttgtgcaaagctcatgtgatgatggttacgtgtttcgacatctcagtcgcagctagcgccgcaattccgggaccccaggaggttgatgtgta

SEQ ID NO: 187661 - DNA, 5649 bp, Artificial Sequence
  derived and/or modified sequence
atggtgggcagaggcgtgcccctgtgcgccgcccagcccgccgtggccgagggcggccccgccagagagcccccccccctgctggaggtgagccccagaaagagactgcccgccggccccgaccaggacccctgcggcagcagacccgcccccgagggcgccggcgccggccccgagcagggccacagcgccggcggcggcggctggtgcagacactgccacaccaagctggtggagctgaagagacaggcctggaagctggtgagcggccccggcaccaccctgagagacccctgcctgagcgccctgctgctggacaagctgcccgcccccggcgccctgcccgcctgcagacccgaggccgagagaagatgcgacgtgtgcgccacccacctgcagcagctgaccagagaggccatgcacctgctgcaggcccccgccagccacgaggacctggacgccccccacggcggccccagcctggccccccccagcaccaccaccagcagcagagacacccccggccccgccggccccgccggcagacagcccggcagagccggccccgacagaaccaagggcctggcctggagccccggccccagcgtgcaggtgagcgtggcccccgccggcctgggcggcgccctgagcaccgtgaccatccaggcccagcagtgcctggagggcatgtggagcgtgagcagagtgaacagcttcctgccccccgcctgcctggccgaggccgccgtggccgccgtggccgtggccgacaccgtgagagagtgcccccccgtggccggccccgacggcctgagcaaggcctggggcagaggcggcgtgtgcaccagcgccctggtgacccccacccccggcagcgtgggcggcagcaccggccccagcgccgccgccagcttcttcatcagagccatgcagaagctgagcctggccagcaagagaaagaagccccaccccccccccccccccgccaccagaggcaccagcacctaccccaccgacttcagcggcgtgctgcagctgtggcccccccccgcccccccctgcctgctgagagccgccagcaagaccaaggacaaccccggcagcatcggcaaggtgaaggtgatgctgagaatctggcccgcccagggcgcccagagaagcgccgaggccatgagcttcctgaaggtggaccccagaaagaagcaggtgatcctgtacgaccccgccgccggcccccccggcagcgccggccccagaagagccgccaccgccgccgtgcccaagatgttcgccttcgacgccgtgttcccccaggacagcgagcaggccgaggtgtgcagcggcaccgtggccgacgtgctgcagagcgtggtgagcggcgccgacggctgcatcttcagcttcggccacatgagcctgggcaagagctacaccatgatcggcaaggacagcagcccccagagcctgggcatcgtgccctgcgccatcagctggctgttcagactgatcgaggagagaagagagagaaccggcaccagattcagcgtgagagtgagcgccgtggaggtgtgcggcagagaccagagcctgagagacctgctggccgaggtggcccccggcagcctgcaggacacccagagccccggcgtgtacctgagagaggaccccgtgtgcggcgcccagctgcagaaccagagcgagctgagagcccccaccgccgagaaggccgccttctacctggacgccgccctggccgccagaagcaccagcagagccggctgcggcgaggacgccagaagaagcagccacatgctgttcaccctgcacgtgtaccagtacagaatggagaagtgcggcagaggcggcatgagcggcggcagaagcagactgcacctgatcgacctgggcagctgcgaggccgccgccggcagagccggcgaggccgccggcggccccctgtgcctgagcctgagcgccctgggcagcgtgatcctggccctggtgaacggcgccaagcacgtgccctacagagaccacagactgaccatgctgctgagagagagcctggccaccgccggctgcagaaccaccatgatcgcccacgtgagcgacgcccccgcccagcacgccgagaccctgagcaccgtgcagctggccgccagaatccacagactgagaagaaagaaggccaagtacgccagcagcagcagcggcggcgagagcagctgcgaggagggcagagccagaagacccccccacctgagacccttccaccccagaaccgtggccctggaccccgacagaacccccccctgcctgcccggcgaccccgactacagcagcagcagcgagcagagctgcgacaccgtgatctacgtgggccccggcggcgccgccctgagcgacagagagctgaccgacaacgagggcccccccgacttcgtgcccatcatccccgccctgagcagacacagacccagcaagggccccagagacgccgaccacttcagatgcagcaccttcgccgagctgcaggagagactggagtgcatggacggcaacgagggccccagcggcggccccggcggcaccgacggcgcccaggccagccccgccagaggcggcagaaagcccagcccccccgaggccgccagccccagaaaggccgtgggcacccccatggccgccagcacccccagaggcagcagcggccccgacacccaccagggcacccccgagccctgcaaggccatcgtgtggggcgaccagagagaggacagcagcgcctggcccgagctgctggtgcccgagaaggccgccgtgagcggcggcagaagacccctgcccagccccgcccccccccccccccagctgctggaggcctgcagagcccccgaggagcccggcggcggcggcaccgacggcgtggccagaaccccccccgtgggcatgagcggccaggtggccggcagccccatgctgcccggcgccacctgccccagactggccgccggcagcagatgccccgagagaggcctgctgaccaccaccgtgaccctgcagagacccgtggagctgaacggcgaggacgagctggtgttcaccgtggtggaggagctgagcctgggcgccctggccggcgccggcagacccaccagcctggccagcttcgacagcgactgcagcctgagagccctggccagcggcagcagacccgtgagcatcatcagcagcatcaacgacgagttcgacgcctacaccagccaggcccccgagggcggccccctggagggcgccgcctgggccggcagcagccacggcagcagcatcagcagctggctgagcgaggtgagcgtgtgcaccgccgacagcagagaccccaccccccagcccagattcagccccgacagcctggccggcctggaccccggcggcccccccgccctggacggcagcctgggcgacggcagcagcggcttcctgggccccgacagacccgacagccccggccccacctggggcccctgccccggcgaggtggccgccgtggcccccagcagacccggcagagagccccaggccggccccagcagatgggccagcgccgcccagaccatccacagcagcctgcccagaaagcccagaaccgccagcgccaccaccagagtgggctgcgccagactgggccagagcccccccggcagaggcggcctgttcgaggacccctggctgctgagagtgggcgagtgcgacacccaggccgccagcgccggcagagcccccagccccaccctgggcagccccagactgcccgaggcccaggtgatgctggcctgcgcccagagagtggtggacggctgcgaggtggccgccagagccgccagaagacccgaggccgtggccagaatcccccccctgagaagaggcgccaccaccctgggcgtgaccacccccgccgtgagctggggcgacgcccccaccgaggtggtggcctgcagcggcagcctgaaggccagccccaccagcaagaagggcctggcccccaaggccggcttcctgcccagacccagcggcgccgccccccccgccccccccaccagaaagagcagcctggagcagagaagcagccccgccagcgcccccccccacgccgtgaaccccgccagagtgggcgccgccgccgtgctgagaggcgaggaggagcccagacccagcagcagagccgaccacagcgtgcccagagccaccagcagcctgaaggccagagccagcaaggtggaggccgcccacagactggccggccacgccagcctggagagatacgagggcctggcccacagcagcagcaagggcagagaggcccccggcagaccccccagagccgtgcccaagctgggcgtgccccccagcagccccacccacggccccgcccccgcctgcagaagcggcgccgccaaggccgtgggcgcccccaagccccccgtgggcggcggcaagggcagaggcctggtggccggcggcagcagagccctgggccccagcgtgaagctgagcaccgccagcgtgaccggcagaagccccggcggccccgtggccggccccagagccgcccccagagccggccccagcgtgggcgccaaggccggcagaggcaccgtgatgggcaccaagcaggccctgagagccgcccacagcagagtgcacgagctgagcgccagcggcgcccccggcagaggcggcagcagctggggcagcgccgacagcgacagcggccacgacagcggcgtgaacgtgggcgaggagagaccccccaccggccccgccctgcccagcccctacagcaaggtgaccgcccccagaagaccccagagatacagcagcggccacggcagcgacaacagcagcgtgctgagcggcgagctgccccccgccatgggcagaaccgccctgttccaccacagcggcggcagcagcggctacgagagcctgagaagagacagcgaggccaccggcagcgccagcagcgcccccgacagcatgagcgagagcggcgccgccagccccggcgccagaaccagaagcctgaagagccccaagaagagagccaccggcctgcagagaagaagactgatccccgcccccctgcccgacaccaccgccctgggcagaaagcccagcctgcccggccagtgggtggacctgcccccccccctggccggcagcctgaaggagcccttcgagatcaaggtgtacgagatcgacgacgtggagagactgcagagacccagacccacccccagagaggcccccacccagggcctggcctgcgtgagcaccagactgagactggccgagagaagacagcagagactgagagaggtgcaggccaagcacaagcacctgtgcgaggagctggccgagacccagggcagactgatgctggagcccggcagatggctggagcagttcgaggtggaccccgagctggagcccgagagcgccgagtacctggccgccctggagagagccaccgccgccctggagcagtgcgtgaacctgtgcaaggcccacgtgatgatggtgacctgcttcgacatcagcgtggccgccagcgccgccatccccggcccccaggaggtggacgtgtag

SEQ ID NO: 187662 - protein, 2277 aa, Artificial Sequence
  derived and/or modified sequence
MFTYIKIITSGDSDNITHVWNEDDGQTLSPSSLAAQLLILENFEDALLNISANSPYIPYLACVRNVTDSLARGSPENLRLLQSTIRFKKSFLRNGSYEDYFPPVPEVLKSKLSQLRNLTELLCESETFSLIEKSCQLSDMSFGSLCEESEFDLQLLEAAELGTEIAASLLYHDNVISKKVRDLLTGDPSKINLNMDQFLEQALQMNYLENITQLIPIIEAMLHVNNSADASEKPGQLLEMFKNVEELKEDLRRTTGMSNRTIDKLLAIPIPDNRAEIISQVFWLHSCDTNITTPKLEDAMKEFCNLSLSERSRQSYLIGLTLLHYLNIYNFTYKVFFPRKDQKPVEKMMELFIRLKEILNQMASGTHPLLDKMRSLKQMHLPRSVPLTQAMYRSNRMNTPQGSFSTISQALCSQGITTEYLTAMLPSSQRPKGNHTKDFLTYKLTKEQIASKYGIPINSTPFCFSLYKDIINMPAGPVIWAFLKPMLLGRILYAPYNPVTKAIMEKSNVTLRQLAELREKSQEWMDKSPLFMNSFHLLNQAIPMLQNTLRNPFVQVFVKFSVGLDAVELLKQIDELDILRLKLENNIDIIDQLNTLSSLTVNISSCVLYDRIQAAKTIDEMEREAKRLYKSNELFGSVIFKLPSNRSWHRGYDSGNVFLPPVIKYTIRMSLKTAQTTRSLRTKIWAPGPHNSPSHNQIYGRAFIYLQDSIERAIIELQTGRNSQEIAVQVQAIPYPCFMKDNFLTSVSYSLPIVLMVAWVVFIAAFVKKLVYEKDLRLHEYMKMMGVNSCSHFFAWLIESVGFLLVTIVILIIILKFGNILPKTNGFILFLYFSDYSFSVIAMSYLISVFFNNTNIAALIGSLIYIIAFFPFIVLVTVENELSYVLKVFMSLLSPTAFSYASQYIARYEEQGIGLQWENMYTSPVQDDTTSFGWLCCLILADSFIYFLIAWYVRNVFPGTYGMAAPWYFPILPSYWKERFGCAEVKPEKSNGLMFTNIMMQNTNPSASPEYMFSSNIEPEPKDLTVGVALHGVTKIYGSKVAVDNLNLNFYEGHITSLLGPNGAGKTTTISMLTGLFGASAGTIFVYGKDIKTDLHTVRKNMGVCMQHDVLFSYLTTKEHLLLYGSIKVPHWTKKQLHEEVKRTLKDTGLYSHRHKRVGTLSGGMKRKLSISIALIGGSRVVILDEPSTGVDPCSRRSIWDVISKNKTARTIILSTHHLDEAEVLSDRIAFLEQGGLRCCGSPFYLKEAFGDGYHLTLTKKKSPNLNANAVCDTMAVTAMIQSHLPEAYLKEDIGGELVYVLPPFSTKVSGAYLSLLRALDNGMGDLNIGCYGISDTTVEEVFLNLTKESQKNSAMSLEHLTQKKIGNSNANGISTPDDLSVSSSNFTDRDDKILTRGERLDGFGLLLKKIMAILIKRFHHTRRNWKGLIAQVILPIVFVTTAMGLGTLRNSSNSYPEIQISPSLYGTSEQTAFYANYHPSTEALVSAMWDFPGIDNMCLNTSDLQCLNKDSLEKWNTSGEPITNFGVCSCSENVQECPKFNYSPPHRRTYSSQVIYNLTGQRVENYLISTANEFVQKRYGGWSFGLPLTKDLRFDITGVPANRTLAKVWYDPEGYHSLPAYLNSLNNFLLRVNMSKYDAARHGIIMYSHPYPGVQDQEQATISSLIDILVALSILMGYSVTTASFVTYVVREHQTKAKQLQHISGIGVTCYWVTNFIYDMVFYLVPVAFSIGIIAIFKLPAFYSENNLGAVSLLLLLFGYATFSWMYLLAGLFHETGMAFITYVCVNLFFGINSIVSLSVVYFLSKEKPNDPTLELISETLKRIFLIFPQFCFGYGLIELSQQQSVLDFLKAYGVEYPNETFEMNKLGAMFVALVSQGTMFFSLRLLINESLIKKLRLFFRKFNSSHVRETIDEDEDVRAERLRVESGAAEFDLVQLYCLTKTYQLIHKKIIAVNNISIGIPAGECFGLLGVNGAGKTTIFKMLTGDIIPSSGNILIRNKTGSLGHVDSHSSLVGYCPQEDALDDLVTVEEHLYFYARVHGIPEKDIKETVHKLLRRLHLMPFKDRATSMCSYGTKRKLSTALALIGKPSILLLDEPSSGMDPKSKRHLWKIISEEVQNKCSVILTSHSMEECEALCTRLAIMVNGKFQCIGSLQHIKSRFGRGFTVKVHLKNNKVTMETLTKFMQLHFPKTYLKDQHLSMLEYHVPVTAGGVANIFDLLETNKTALNITNFLVSQTTLEEVFINFAKDQKSYETADTSSQGSTISVDSQDDQMES

SEQ ID NO: 187663 - DNA, 6834 bp, Artificial Sequence
  derived and/or modified sequence
atgtttacctatattaaaatcataacgagtggcgattctgataatattacccatgtgtggaatgaggatgacgggcaaacgctctctccgagtagcttagctgcccaactgctgatcctggagaattttgaggacgccctcttgaatatatcagccaattccccgtacatcccgtatctggcttgcgttagaaacgtgactgactctttagcacgcgggtcccctgaaaaccttcggcttctacaatccaccatccgcttcaaaaagagtttcctacgcaatgggagctatgaggattattttccaccagtccccgaagtcctgaagagcaaactgtctcaactgaggaatttaaccgaactgctctgcgaaagtgaaaccttctcgttaatagaaaaatcctgtcagctatctgatatgtcatttggcagtctttgcgaggagagtgagttcgatctgcaattattggaggccgctgaacttggaaccgagatagctgccagtctcttgtaccacgacaacgtcatcagcaaaaaggttcgggacttgctgacgggggaccctagtaagatcaacctgaatatggaccagttcctggagcaggcccttcagatgaactatctggagaacatcactcaactcatacctatcatcgaggccatgctgcacgtgaacaacagcgccgatgccagcgagaaaccgggtcagctcctcgaaatgtttaagaatgtcgaggaattgaaagaggacctgagaagaaccaccggtatgagtaatcgtactatcgataaactcctggctatcccaatacccgataatcgggctgaaataatttcacaggtgttctggctgcattcttgtgacactaacatcacgaccccaaagctggaagacgccatgaaggaattttgcaacctgtcactgagcgagcgaagcaggcaatcttacctcattggattgacactgctgcattatctcaacatctacaattttacgtacaaagtgttttttcctcggaaggaccagaaacccgtagaaaagatgatggaactcttcattagactaaaggagatcctgaaccagatggcatcgggcacccatcctctgctggacaagatgcgctcattaaaacagatgcatttaccccgctccgtacccttaacccaggccatgtacaggtccaatcggatgaatacaccacaaggatcattttctactatcagccaagcactgtgtagccaagggataaccaccgaatatctgacggcaatgctcccgtccagtcagcggcccaaaggtaaccacacaaaggactttctaacatataagctcacaaaggaacaaatcgctagtaagtacggcatccccattaattctacccccttctgcttcagtctttataaggacatcatcaacatgcctgccgggcccgtgatttgggcttttctaaagccaatgttgctcggccgaatcctgtacgccccgtataatcctgtgaccaaggcaatcatggagaaaagtaatgtgaccctgcgacaattagcagaattaagagagaagtcccaggagtggatggataaaagccccctgttcatgaatagttttcacctcctgaatcaggctattccaatgctgcagaacacccttcggaaccccttcgtgcaggtgttcgtgaaattttccgtcgggctggatgcggtggagctacttaaacagattgacgaattagacattctgagactgaagttggaaaacaacatcgacattatagaccaactgaacactctgagctccctcacggttaatatctcctcatgcgtgctgtacgaccgcatccaggctgccaaaacaatcgacgaaatggaaagagaagccaagcgactttataagtccaatgagttgtttggtagcgtgatttttaaactgccgagcaaccgctcatggcaccgcggttacgattcaggcaatgtctttctccccccagtaatcaagtatactattaggatgtctctgaagaccgcacagaccacacggtcactcagaacaaagatatgggctcccggcccccacaatagcccctcacacaaccagatttatggacgagctttcatatatttgcaggacagcattgagcgcgcaattatcgagctgcagaccgggagaaatagccaggagatcgcagtccaggtgcaggctattccgtatccatgctttatgaaggacaacttcctcacatcggtgagttattcactcccgattgtgctgatggtcgcttgggttgtgtttatagccgcctttgttaagaagctggtttatgaaaaagacctgaggctgcatgagtatatgaaaatgatgggcgtgaatagctgcagccacttttttgcttggttaatagaatctgtggggttcctgctggtcaccatcgtgatcctgattattatcctgaagtttggtaatattctgcccaaaaccaacggctttatactcttcctgtatttctcggactacagcttctctgtgatagctatgtcttacctcattagcgttttctttaacaacactaatattgctgcactaatcggatcacttatttacattatcgctttcttcccgtttattgttctcgttacagtagaaaacgagctgtcgtacgtcctcaaggtgtttatgagccttctgagcccaaccgccttctcgtacgctagtcaatacatcgccagatatgaagagcagggaatcggactgcagtgggagaatatgtatacatccccagtacaggacgacactaccagctttggctggctctgctgcttaattttggcagattcattcatttactttctcatagcatggtatgtccggaacgtatttcctggaacatacggaatggccgccccgtggtacttccccatcctcccctcctattggaaggagcgcttcggatgcgcagaggtgaagcccgagaagtcaaatgggttgatgttcacaaatatcatgatgcagaataccaacccatcagcgagcccggagtatatgttctcctccaacatcgaaccagagcccaaagacctgactgtgggagtggccctgcatggagtgactaagatttacgggagcaaggtggctgtcgacaacctcaatctgaatttttacgagggccacattacatcgcttctcgggccaaatggcgctggaaaaaccacaacaatctccatgttaaccggcctatttggagcaagtgcgggaacgatttttgtctatgggaaggatattaagaccgacctgcacactgtaaggaagaatatgggagtttgtatgcagcacgatgtgctgttcagctacctcaccaccaaagaacacttgctgctgtacgggagcatcaaggtaccgcactggactaagaaacagctgcacgaggaagtaaaacgaacactgaaggatacgggactgtactcacacagacacaagcgggtcggcacgctgagtggcggcatgaaaaggaagctcagtatctcaatcgcattaattggtggaagcagggtggtgatcctagacgagccctcaactggggtggacccatgtagtcgaaggtctatatgggacgtcattagtaagaataaaaccgcccggaccatcatcttgtcgacacatcacctggatgaggcagaggtgttgagcgaccggatcgcttttctcgagcagggcggcctccgctgttgtggaagcccattttatttgaaggaggcctttggggacgggtaccatttaacgctcaccaagaagaagtccccaaatctgaacgcaaacgcggtgtgtgatactatggccgtaactgccatgatacaaagtcatctccctgaggcatacttaaaagaagacattggtggagagctcgtatatgtactgcccccattctctactaaagtgagtggtgcctacctgtcccttttgagggccttggacaacgggatgggggatctgaatatcggttgctacgggatttctgacacgaccgtggaggaagtttttctgaacctgacaaaggaatcccaaaagaatagtgccatgtctttagagcacctgactcagaagaagatcgggaacagtaatgctaatggcattagcacacccgatgatctgtctgtgtcgtcttctaacttcaccgaccgggacgacaaaatactcactcgcggcgagaggttggacggattcggactcctgcttaagaaaatcatggcaattctaataaagcggtttcaccataccaggaggaactggaaggggctcattgcccaagtgattttgccaatcgtattcgtgactacagcaatgggtctgggtactttgaggaactccagtaatagttatcccgagatccagatctccccatctctctatggcacctcagagcagacagcattttatgctaactatcatccctcaaccgaagctctcgtctctgcgatgtgggatttccccgggattgataatatgtgcctgaataccagcgatcttcagtgtctaaataaagatagtctggagaagtggaatacctcgggggagcctatcacaaatttcggcgtatgtagctgttcagaaaatgtgcaggagtgcccaaaatttaactattctccaccacataggcggacctacagttcccaagtgatctataatctaacaggacaacgggtggagaactatcttatatccacggccaacgaattcgtgcagaaaagatacggggggtggtcttttgggcttccgcttacgaaggaccttcggtttgatatcacaggagtgcccgccaaccgaaccctggccaaagtgtggtatgaccctgaagggtatcacagcctgccggcctacctcaatagtctaaataattttctgctgcgggtgaacatgtcgaaatatgacgcagcccggcacggaatcatcatgtatagccacccttaccctggggtccaggaccaggaacaagcaaccatttcaagtctcatagacattctggtagctctgtcaattctaatgggctacagcgttactactgcttcctttgtcacctatgtcgtgcgcgaacatcagacgaaggcaaagcagttgcaacacatctctggcatcggggtgacatgttactgggtgacaaattttatatatgacatggttttctatctggtgccagttgctttcagtatcgggatcattgctatttttaagctgccggcattttatagtgaaaataatctcggcgctgtatcactcttgctcctgctttttgggtacgccactttctcctggatgtacctgcttgccggtctgttccacgaaacgggtatggctttcattacttacgtctgtgttaacctcttcttcggaattaactccattgtgagcctgtccgtcgtttacttcctgagtaaggagaagcccaacgacccgaccctggaattaatcagtgagacacttaagcgaatctttctgatttttcctcaattctgtttcggctacggactaatagaattatctcagcagcaatcagtattggactttctcaaagcctacggagttgagtaccctaacgagacattcgagatgaacaaactcggcgcaatgttcgttgcgttagtctcacagggcaccatgttcttctctttgcgcctacttatcaatgaatctctcattaagaagcttcgtctgttcttccgcaagtttaactccagccacgtgagggagactatagatgaagatgaagacgtgagggccgaacgactaagagttgagtccggggccgccgagtttgaccttgtgcagctgtactgccttactaaaacttaccagctgatccacaagaagatcatcgctgttaacaatatctccatagggattccagccggagagtgcttcggactgttgggtgtgaatggcgctgggaagacaacaattttcaaaatgctcacaggagatatcatccccagctcaggaaacattttaatccgtaacaaaactggatcactgggccatgtcgattcccattcaagtcttgttgggtactgcccacaggaggacgccttggacgatcttgtcactgttgaagagcacctgtatttttatgcacgcgtgcacgggatcccggagaaggacataaaggagactgtccacaagcttctgcgccgcctacacctgatgcccttcaaggacagagcaacgtcaatgtgctcttatggcactaagcggaagctctccaccgcactagccctaatcggcaagccaagtattttgctccttgatgagccatcttccggcatggaccccaaaagtaagaggcacctgtggaaaattatcagcgaagaggtgcagaataaatgtagcgtgatcctgactagtcactcaatggaggaatgcgaggcgctatgtactagactcgccattatggtgaacggtaagttccagtgcatcgggtctctgcagcatattaaatcgcgattcggccgaggatttaccgttaaagtccacctgaaaaacaataaggtcactatggaaacattgactaagttcatgcagctgcacttccccaagacttacttaaaggatcagcatctgtctatgcttgaataccacgtgccagtgaccgcgggaggcgttgcgaacatatttgatttgctggagacaaacaaaaccgcacttaacatcaccaattttctggtgtcacagactaccttagaggaggtttttattaatttcgccaaagaccagaaaagctacgaaaccgccgatacctctagccaaggctctaccatcagcgtcgacagtcaggacgaccagatggaatcttag

SEQ ID NO: 187664 - DNA, 6834 bp, Artificial Sequence
  derived and/or modified sequence
atgttcacctacatcaagatcatcaccagcggggacagcgacaacatcacccacgtgtggaatgaagatgatggccagaccctgagccccagcagcctggccgcccagctgctgatcctggagaactttgaagatgccctgctgaacatcagcgccaacagcccctacatcccctacctggcctgtgtgagaaatgtgacagacagcctggcccggggcagccctgagaacctgcggctgctgcagagcaccatccgcttcaagaagagcttcctgagaaatggcagctatgaggactacttcccccctgtgcctgaggtgctgaagagcaagctgagccagctgaggaacctgacagagctgctgtgtgagagcgagaccttcagcctgattgagaagagctgccagctgagtgacatgagctttggcagcctgtgtgaggagagcgagtttgacctgcagctgctggaggccgctgagctgggcacagaaattgctgccagcctgctgtaccatgacaacgtcatcagcaagaaggtgcgggacctgctgactggagaccccagcaagatcaacctgaacatggaccagttcctggagcaggccctgcagatgaactacctggagaacatcacccagctgatccccatcatcgaggccatgctgcacgtgaacaacagcgcagatgccagcgagaagccaggccagctgctggagatgttcaagaatgtggaggagctgaaggaggacctgcggaggaccaccggcatgagcaacagaaccatcgacaagctgctggccatccccatcccagacaacagagctgagatcatcagccaggtgttctggctgcacagctgtgacaccaacatcaccacccccaagctggaggatgccatgaaggagttctgcaacctgagcctgtctgagaggagccggcagagctacctgattggcctgaccctgctgcactacctgaacatctacaacttcacctacaaggtgttcttccccaggaaggaccagaagcctgtggagaagatgatggagctgttcatccggctgaaggagatcctgaaccagatggccagcggcacccaccccctgctggacaagatgaggagcctgaagcagatgcacctgcccaggtctgtgcccctgacccaggccatgtaccgcagcaacaggatgaacaccccccagggcagcttcagcaccatcagccaggccctgtgcagccagggcatcaccacagagtacctgacagccatgctgcccagcagccagaggcccaagggcaaccacaccaaggacttcctgacctacaagctgaccaaggagcagatcgccagcaaatatggcatccccatcaacagcacccccttctgcttcagcctgtacaaggacatcatcaacatgcctgctggccctgtgatctgggccttcctgaagcccatgctgctgggccgcatcctgtatgccccctacaaccctgtgaccaaggccatcatggagaagagcaatgtgaccctgcggcagctggccgagctgcgggagaagagccaggagtggatggacaagagccccctcttcatgaacagcttccacctgctgaaccaggccatccccatgctgcagaacaccctgaggaacccctttgtgcaggtgtttgtgaagttctctgtgggcctggatgctgtggagctgctgaagcagattgatgagctggacatcctgcggctgaagctggagaacaacatcgacatcatcgaccagctgaacaccctgagcagcctgactgtgaacatcagcagctgtgtgctgtatgaccgcatccaggccgccaagaccattgatgagatggagcgggaggccaagaggctgtacaagagcaatgagctgtttggatctgtcatcttcaagctgcccagcaacagatcctggcaccggggctatgacagcggaaatgtgttcctgccccctgtgatcaagtacaccatccgcatgagcctgaagacagcccagaccaccaggagcctgcggaccaagatctgggcccctggcccccacaacagccccagccacaaccagatctacggccgggccttcatctacctgcaggacagcattgaaagagccatcatcgagctgcagacaggaagaaacagccaggagattgctgtgcaggtgcaggccatcccctacccctgcttcatgaaggacaacttcctgacctctgtgtcctacagcctgcccatcgtgctgatggtggcctgggtggtgttcatcgccgcctttgtgaagaagctggtgtatgagaaggacctgcggctgcacgagtacatgaagatgatgggcgtgaacagctgcagccacttctttgcctggctgattgagagcgtgggcttcctgctggtgaccatcgtcatcctgatcatcatcctgaagtttggaaacatcctgcccaagaccaacggcttcatcctcttcctgtacttcagtgactacagcttctctgtgattgccatgagctacctgatcagcgtcttcttcaacaacaccaacattgctgccctgattggcagcctcatctacatcatcgccttcttccccttcatcgtgctggtgacagtggagaatgagctgtcctatgtgctgaaggtgttcatgagcctgctgagccccacagccttctcctatgccagccagtacatcgcccgctatgaggagcagggcatcggcctgcagtgggagaacatgtacaccagccctgtgcaggatgacaccaccagctttggctggctgtgctgcctgatcctggccgacagcttcatctacttcctgattgcctggtacgtgagaaatgtgtttcctggcacctacggcatggccgccccctggtacttccccatcctgcccagctactggaaggagcgcttcggctgtgccgaggtgaagccagagaagagcaatggcctgatgttcaccaacatcatgatgcagaacaccaaccccagcgccagccctgagtacatgttcagcagcaacatcgagcctgagcccaaggacctgactgtgggcgtggccctgcatggagtgaccaagatctacggcagcaaggtggccgtggacaacctgaacctgaacttctatgagggccacatcaccagcctgctgggccccaacggggccggcaagaccaccaccatctccatgctgaccggcctgtttggagccagcgctggcaccatctttgtgtatggcaaggacatcaagacagacctgcacacagtgaggaagaacatgggcgtgtgcatgcagcatgatgtgctcttctcctacctgaccaccaaggagcacctgctgctgtatggcagcatcaaggtgccccactggaccaagaagcagctgcacgaggaggtgaagaggaccctgaaggacaccggcctgtacagccaccgccacaagagggtgggcaccctgagcggcggcatgaagaggaagctgagcatcagcatcgccctgattggaggcagccgggtggtgatcctggatgagcccagcactggagtggacccctgcagccgccgcagcatctgggatgtgatcagcaagaacaagacagcccggaccatcatcctgagcacccaccacctggatgaggccgaggtgctgagtgacagaattgccttcctggagcagggcggcctgcgctgctgcggcagccccttctacctgaaggaggcctttggagatggctaccacctgaccctgaccaagaagaagagccccaacctgaatgccaatgctgtgtgtgacaccatggctgtgacagccatgatccagagccacctgcctgaggcctacctgaaggaggacatcggcggggagctggtgtatgtgctgccccccttcagcaccaaggtgtctggggcctacctgagcctgctgcgggccctggacaatggcatgggagacctgaacatcggctgctacggcatcagtgacaccaccgtggaggaggtgttcctgaacctgaccaaggagagccagaagaacagcgccatgagcctggagcacctgacccagaagaagattggcaacagcaatgccaacggcatcagcaccccagatgacctgtctgtgagcagcagcaacttcacagacagagatgacaagatcctgaccagaggagagcggctggatggcttcggcctgctgctgaagaagatcatggccatcctgatcaagcgcttccaccacaccaggaggaactggaagggcctcatcgcccaggtgatcctgcccatcgtgtttgtgaccacagccatgggcctgggcaccctgaggaacagcagcaacagctacccagagatccagatcagccccagcctgtatggcaccagcgagcagacagccttctacgccaactaccaccccagcacagaggccctggtgtctgccatgtgggacttccctggcatcgacaacatgtgcctgaacaccagtgacctgcagtgcctgaacaaggacagcctggagaagtggaacaccagcggggagcccatcaccaactttggagtgtgcagctgcagtgaaaatgtgcaggagtgccccaagttcaactacagccccccccacaggaggacctacagcagccaggtgatctacaacctgaccggccagagggtggagaactacctgatcagcacagccaatgaatttgtgcagaagagatatggaggctggagctttggcctgcccctgaccaaggacctgcgctttgacatcaccggggtgcctgccaacagaaccctggccaaggtgtggtatgaccctgagggctaccacagcctgcctgcctacctgaacagcctgaacaacttcctgctgcgggtgaacatgagcaaatatgatgctgcccggcacggcatcatcatgtacagccacccctacccaggagtgcaggaccaggagcaggccaccatcagcagcctgattgacatcctggtggccctgagcatcctgatgggctacagcgtgaccacagccagctttgtgacctacgtggtgcgggagcaccagaccaaggccaagcagctgcagcacatctctggaattggagtgacctgctactgggtgaccaacttcatctatgacatggtgttctacctggtgcctgtggccttcagcatcggcatcatcgccatcttcaagctgcctgccttctacagcgagaacaacctgggcgctgtgtccctgctgctgctgctgtttggctacgccaccttctcctggatgtacctgctggccggcctcttccatgaaacaggcatggccttcatcacctacgtgtgtgtgaacctcttcttcggcatcaacagcatcgtgtccctgtctgtggtgtacttcctgagcaaggagaagcccaatgaccccaccctggagctgatcagcgagaccctgaagaggatcttcctgatcttcccccagttctgcttcggctacggcctgattgagctgagccagcagcagagcgtgctggacttcctgaaggcctacggcgtggagtacccaaatgagacctttgagatgaacaagctgggcgccatgtttgtggccctggtgtcccagggcaccatgttcttcagcctgcggctgctgatcaatgaaagcctcatcaagaagctgcggctcttcttcaggaagttcaacagcagccacgtgcgggagaccattgatgaagatgaagatgtgcgggcagagcggctgcgggtggagagcggggctgctgagtttgacctggtgcagctgtactgcctgaccaagacctaccagctgatccacaagaagatcatcgctgtgaacaacatcagcatcggcatcccagctggggagtgcttcggcctgctgggcgtgaatggagctgggaagaccaccatcttcaagatgctgaccggggacatcatccccagcagcggcaacatcctgatccggaacaagacaggcagcctgggccacgtggacagccacagcagcctggtgggctactgcccccaggaggatgccctggatgacctggtgacagtggaggagcacctgtacttctacgcccgggtgcacggcatccctgagaaggacatcaaggagaccgtgcacaagctgctgcggcggctgcacctgatgcccttcaaggaccgggccacctccatgtgcagctatggcaccaagaggaagctgagcacagccctggccctgattggcaagcccagcatcctgctgctggatgagcccagcagcggcatggaccccaagagcaagaggcacctgtggaagatcatcagcgaggaggtgcagaacaagtgcagcgtcatcctgaccagccacagcatggaggagtgtgaggccctgtgcacccggctggccatcatggtgaatggcaagttccagtgcatcggcagcctgcagcacatcaagagccgcttcggccggggcttcaccgtgaaggtgcacctgaagaacaacaaggtgaccatggagaccctgaccaagttcatgcagctgcacttccccaagacctacctgaaggaccagcacctgtccatgctggagtaccacgtgcctgtgacagctggaggagtggccaacatctttgacctgctggagaccaacaagacagccctgaacatcaccaacttcctggtgtcccagaccaccctggaggaggtgttcatcaactttgccaaggaccagaagagctatgaaacagctgacaccagcagccagggcagcaccatctctgtggacagccaggatgaccagatggagagctag

SEQ ID NO: 187665 - DNA, 6834 bp, Artificial Sequence
  derived and/or modified sequence
atgttcacctacatcaagatcatcaccagcggcgacagcgacaacatcacccatgtctggaatgaagacgacggacagactctgagtccctccagccttgctgcgcagctgctgatcctggaaaattttgaggatgccttactcaacatatctgccaacagcccttatatcccgtaccttgcatgcgttaggaatgtcaccgattccctggctcgaggcagccccgagaatctgcggctgctgcaatcaaccattaggttcaaaaagagctttctgagaaacggatcctacgaagactacttccctccggtgccggaggtgcttaaaagtaagttgtctcagttaaggaatcttacagaattgctttgcgagtctgagacatttagcctgattgaaaaatcttgtcagttgagcgacatgtcgtttgggtcactgtgcgaggagagtgaatttgacttgcagctcctggaggcagctgaactcgggaccgagattgccgcctccctcctttatcacgataatgtcatttccaaaaaagtacgggacctgctaactggtgacccatccaagattaatttgaatatggatcagtttctggagcaggctctccaaatgaactatctcgagaacatcacccaattgatacctatcattgaagccatgctgcacgttaacaactcagccgacgcaagcgagaagcccggtcagctccttgagatgtttaagaacgtagaggaactgaaggaggatctcaggcggacaacagggatgagcaaccgaacgattgacaagttactggccattccaattccagacaaccgggcagagatcatatcccaagtgttttggctgcactcttgcgacacaaatattacaacacccaagctggaggacgcaatgaaggaattttgcaacctttctctgtctgaaaggtccaggcagagctatcttattggcctgacactcctgcattacttgaatatctataactttacctataaggttttctttccgcgcaaggatcagaaacccgtggagaagatgatggaactttttattcgcctcaaagagatcctgaaccagatggcgagcgggacccatccactgctcgacaaaatgcgctccttaaaacaaatgcacttaccacggtcagtcccccttacacaagccatgtacagatccaatagaatgaataccccgcagggatccttctcaacaatcagccaggctctctgttcacagggaatcacaaccgagtatctcaccgcgatgttgcccagttcccagaggccgaagggcaaccatacaaaagacttccttacatacaagttgaccaaagaacaaattgccagtaagtatgggattccaatcaacagcactccgttttgcttcagcctgtacaaagatatcatcaatatgccagcgggccctgtcatttgggcatttctgaaacccatgcttttggggaggattctttatgctccctataatcccgtaaccaaggccattatggaaaagtccaacgttacactacgacaactggccgaactgcgagagaagagccaggagtggatggataagtctccactgttcatgaactcatttcatcttctgaaccaggccatccccatgctgcagaataccttacgaaaccctttcgtgcaggtattcgtcaaattcagtgtgggattggatgcagtggaactgctcaaacagatagatgagctggatatcctgaggctgaagctagagaacaacatcgacattatcgatcagttaaacactttgagttcactaacagtcaacatcagcagctgcgtgttgtacgatcgtatccaggcggccaagactattgacgagatggagagagaagcaaagaggctgtacaaatctaacgagctgttcggaagcgtgatcttcaagctaccttcaaaccgctcatggcacaggggctatgactccggcaacgtcttcctgccccctgtcatcaaatacaccatcaggatgtccttgaagaccgcccaaacaacgaggtcgctaaggacaaagatctgggcccccggtccacacaatagcccttctcataaccaaatttatggacgggccttcatctacctgcaagatagcatcgaaagagctattatcgagttacagacagggcgtaacagccaggagatcgccgtgcaggtccaggccattccttatccctgctttatgaaagacaacttcctgactagcgtttcttattccctgccaatcgtactgatggtggcatgggtcgtattcattgcggctttcgtgaagaaactcgtctacgagaaggacctgaggctgcatgagtatatgaagatgatgggcgtcaattcttgctctcacttcttcgcctggctgatcgaatctgtgggtttcctattggtcaccattgtcatactcataatcatcctgaagtttggcaatatccttcctaaaaccaatggcttcattctgtttctttatttctcagactattctttcagcgtgatcgctatgagttaccttattagcgtcttcttcaataacacaaatatcgccgccctgatcggcagcttgatctacataattgctttcttccctttcattgtgttagtcacggtggagaatgagttgtcatacgtactcaaggtttttatgagcctattgagtcctacagcctttagctatgcttctcaatatatagctaggtacgaagagcaaggcatcggattacagtgggaaaacatgtacactagcccagtccaggatgataccactagctttggctggctgtgctgcctaattctcgccgacagctttatatatttcctgattgcttggtatgtgcgaaacgtgtttcccgggacttacgggatggctgccccatggtattttccaatcctgcccagctattggaaagaaagattcggttgcgccgaagtgaagccagaaaagagcaacgggcttatgtttacaaatatcatgatgcagaacacaaaccccagtgcatcacctgagtacatgttttctagcaatatcgaacctgaacccaaggacctgactgtgggcgtggccctgcatggcgttactaagatctacggcagcaaggttgctgtcgacaatctgaatttaaatttttacgagggccacatcacctctcttctcgggcccaacggggcaggaaaaaccactacaatctccatgctcaccggactcttcggcgcctccgcgggcaccatttttgtttacggcaaagatatcaagacagatctgcacacagtgcgtaagaatatgggcgtctgcatgcaacacgatgtgttgtttagctatctcacaaccaaggagcatctgttgctttacgggtcaattaaggtcccacactggaccaagaagcagctgcacgaagaagtgaagaggacattaaaagacactggcctgtacagtcataggcacaaaagggtggggaccctctcaggtggcatgaagcggaaactgagcatctccatcgccctcattggtggctcacgtgtcgtcattctggatgagccttcaaccggcgtcgatccatgctcacggcggtccatttgggatgtcatctccaagaataagacagccagaacgatcatcttgagcacacaccacttggatgaagccgaagtactctcagatagaattgcatttctcgaacagggtggtctgcgctgctgcggttcccctttctacctcaaggaagctttcggcgatggctatcacttgactctcaccaaaaagaaatcccccaatctgaacgccaacgcagtctgcgacaccatggcagtgaccgcgatgatccagagccacctgccagaggcctatctaaaggaggacatcggaggagaactggtctacgtgctcccacccttcagtacaaaggtttctggagcttatctgtcactcctccgggctcttgataatgggatgggggatttgaatatcggatgttacggtatctctgatacaacagtcgaggaggtgtttttgaacctcacgaaggagtctcagaagaactctgccatgagcctcgagcatcttactcagaaaaaaattggaaactccaatgctaacggcatcagcactcccgatgacttgtctgtttccagctccaattttaccgatagggacgataaaatcctgacaagaggagagaggctcgacggttttggcctcttattaaagaagatcatggccatcctcattaaaagattccatcacaccagacgtaattggaagggtctcattgcccaggtgatcctgccaattgtgttcgtgactacggcaatggggctgggtaccctgagaaactcaagcaatagctatcccgagatccagatctcccccagcctgtatggcacaagtgagcagacagcattttatgcaaactaccacccttctaccgaggcgttagtgagcgctatgtgggattttcctggaattgataatatgtgtctgaacactagcgacctgcaatgtcttaataaagacagtttggagaagtggaacacttctggagagccgattaccaatttcggggtgtgcagttgctctgaaaatgtccaggaatgtcccaaattcaattatagccctcctcataggcggacatattctagccaggtgatctataaccttacaggccagcgagtggaaaattacctgatttcaaccgcaaatgaattcgtgcagaaacgatatggaggctggtcttttggtctacctttgactaaggacttgaggttcgatataaccggcgtccctgccaaccgcactcttgcgaaggtgtggtatgacccggaggggtaccactctctgccagcatacctcaactcgctgaataactttttgcttcgagtcaatatgtcaaagtacgatgccgcccggcatggtattattatgtactcacatccataccctggcgtccaagaccaggaacaggcaacgatctctagcctcattgatatcttggtggctctcagcatcctgatggggtattcggtcacaacagcttcgttcgtgacgtatgtggtgagggagcatcagaccaaggctaaacaattacaacacatcagcggcatcggcgtaacatgctattgggttaccaactttatctatgatatggtattttacctggtgcccgttgcattttctatcggcatcatcgctatcttcaaactccccgcgttttattctgaaaataacctgggagccgtgtcgctgctgctgttgttgttcggatacgctacattttcatggatgtacttgctggcagggctgttccatgaaacaggtatggcgtttattacgtatgtatgcgttaaccttttttttggcataaactcgatagtctcgctatccgtggtgtacttcttgtctaaagaaaagcctaacgatccaacgctggaacttattagtgagaccctgaagagaatattcttgatcttccctcagttttgcttcggatatggattgattgaactaagccagcagcagtcggtcctcgactttctcaaggcatatggagtggagtatcctaatgagacctttgaaatgaacaagctcggtgcaatgttcgtggcactggtcagccagggaactatgttcttctctcttcggctgctgatcaacgagagcctgataaagaaacttcgactgttctttcggaagttcaacagtagccacgtacgggagaccatcgatgaagatgaggacgtcagagcggaaagattgcgagtagaaagtggggcggctgagttcgacttggtccagctttattgcctcacaaagacctaccagttaatccacaagaaaatcattgctgtgaacaacattagcatcggaattcctgcaggggaatgcttcgggctgctaggtgtcaacggtgcagggaagactaccattttcaaaatgttgaccggcgacatcatcccgagcagcgggaatatcctgatccggaataagaccggtagcctggggcacgtagacagccattcctctctggttggctactgccctcaggaggacgctttggatgacctcgtgacagtcgaggaacacctatatttctatgctagagttcatggcatcccagagaaggacatcaaggaaactgtgcataaactgctgaggcgcctgcatttaatgcccttcaaagatcgcgcaacgagtatgtgcagctacggcactaaaagaaagttgtcgaccgccctggctctgatcggaaagccatctatcttacttttggatgagccatcaagcggtatggacccaaagtcaaaaaggcacctgtggaagattatttctgaagaagtgcaaaacaaatgctctgtgattctcacatcacattcgatggaagaatgtgaggccctttgtactagacttgcaattatggtgaatggcaagttccagtgcataggctccctacaacatattaagagccgcttcgggaggggctttacagtgaaggttcaccttaagaataataaggtcactatggaaaccctgaccaagtttatgcaactgcacttccccaagacctatctcaaggatcaacacctgtctatgctggagtaccatgttccagtcacagctggaggtgtcgcaaatatttttgatcttctggaaacaaacaaaactgctttgaacatcacaaactttctagtcagtcaaacaaccctcgaggaagtcttcatcaattttgctaaggatcagaaatcttatgagactgcagatacttcctcccagggatctacaatttcagtggactcccaggacgaccagatggaaagctag

SEQ ID NO: 187666 - DNA, 6833 bp, Artificial Sequence
  derived and/or modified sequence
atgttcacatatatcaaaattatcacctctggagacagcgataacatcacgcacgtatggaacgaggatgatggccagacattgagtccctctagtctggcagcccagctgcttatcctggagaatttcgaggatgccctgcttaacatatccgcaaattccccttacataccctacctcgcctgtgtgcgaaatgtgaccgatagtctggcgagaggctctcccgagaacctgcggctgctgcagtccacaatccgattcaagaaatcttttctcaggaatggaagctatgaagactacttccccccagtgcccgaggttctgaaaagtaagctcagccagctgagaaacttgacagaactcttgtgcgagagcgagacctttagccttatcgagaagtcctgtcagctgagcgacatgagcttcggcagcctgtgcgaggaaagcgagttcgatttacaactgcttgaggcagctgaattgggcactgagattgctgcgtccctcctgtaccacgacaatgtgatcagcaaaaaggtgcgtgaccttttaaccggcgacccctctaagataaatctcaacatggaccagtttctcgagcaagcattgcaaatgaattacctcgagaacattacgcagctgatcccaattatagaagccatgttacacgtgaataattcggccgacgctagcgagaaaccgggacagctactggagatgttcaagaatgttgaggaactgaaggaggacctgcgcaggaccacaggaatgtccaataggactatcgacaagctgctagctattccgatacccgacaaccgtgccgaaattatctcccaggtcttctggcttcactcgtgcgacaccaatatcactactccaaagctggaggacgctatgaaagaattttgcaatctgagcctaagtgagaggagtagacagagctatctcatcgggctgaccctgttgcactacttaaatatttacaacttcacatacaaggtgttctttccgagaaaagaccagaagccagtggagaaaatgatggagttgttcattcgcctcaaggagatcctgaatcaaatggcttccgggactcacccactcttagacaaaatgaggtctctcaagcaaatgcatctccccagatcagtccctctgacacaggctatgtaccgcagcaatagaatgaatactccacaggggtcttttagtacaatcagtcaggccctttgttcccaggggatcaccaccgagtatttaactgctatgctgccatcctcccagagacctaaagggaaccatactaaagatttcctgacttataagctgactaaagaacaaatcgcctcgaagtacggcatccccattaacagcactccgttttgtttcagtttgtataaagacatcatcaacatgccagcagggcctgtgatctgggcatttctcaagcccatgcttttgggtcgtattctgtatgcaccctataatcccgtcacaaaggccataatggagaagagcaacgtgaccctgcggcagctggctgaattgcgcgagaagtcccaggagtggatggacaaatcgcccctcttcatgaacagctttcatctgctcaatcaggcaatccccatgctccaaaatacgctcagaaacccctttgtacaagtcttcgtgaagttcagcgtgggacttgatgcagtagagctgcttaagcagattgacgagctggacattctgaggctgaaattagagaataacatcgacatcattgatcagctgaacacattgtcgtctctgactgtaaacataagtagctgcgttctgtacgacaggattcaggccgctaagacgatcgacgaaatggagcgggaagcaaagaggctgtataagtccaatgaactcttcgggagcgtgatatttaagctgccctctaatcgctcatggcatcgaggctatgattccggcaatgtcttcctgccccctgtcatcaagtacactatccgcatgtctcttaagactgcccagacgacccgaagtctgagaacgaagatttgggcacccggaccgcacaactcacccagccataaccaaatttacgggagagccttcatttacctgcaagacagtatagaacgcgctattatcgagctccagaccggaaggaactctcaggagatcgctgtgcaggtacaggccatcccctatccctgttttatgaaagacaatttcctgacaagcgtctcctattctcttccaatagtgctgatggttgcctgggtcgtattcattgccgcattcgtcaagaaacttgtctatgaaaaagatttacgcctccacgagtacatgaagatgatgggcgtgaactcatgttcccatttcttcgcctggttgattgaaagtgtcggattccttctggtgactatagtgatcctgatcataatcctgaaattcggaaatatcctccctaagacgaacggtttcatcctgttcctgtacttctcagattactcttttagcgtgatcgcaatgtcctacctcatcagtgtcttctttaacaatactaatatagctgcactgataggctccttgatctatatcattgctttttttcccttcattgtactggttactgtcgagaatgagctctcctacgtgctgaaagtgtttatgtctttactctctcccaccgcctttagttacgcctcgcaatatattgcacgctatgaagaacagggaatcggcttgcagtgggaaaatatgtatacatcccccgtgcaggatgacacaacatcctttgggtggctgtgctgcctcattctggccgattcattcatctatttcctgatcgcctggtacgtgaggaatgtgtttcccggtacgtacggaatggcggctccttggtatttccccatcctgccctcctattggaaagagagatttgggtgtgccgaagtaaagcccgaaaaatccaacggccttatgtttacaaacataatgatgcaaaacaccaaccctagcgcttcccccgagtacatgtttagtagcaatatagagcctgagccaaaggatctaaccgtgggtgtagcgctgcacggcgtcacgaagatctacggatcgaaggtggccgtggataacttaaacctgaatttttacgaaggtcacatcacctcgctgctgggacccaatggcgctggtaagactactactatctctatgctaactggactgttcggcgcatctgctggcaccatatttgtctatggtaaggatatcaagaccgacctgcatacagttcgcaagaatatgggcgtgtgcatgcaacatgatgtgctgttttcatatctgacgaccaaggaacacctcctgctctacggaagtataaaggtgccccactggaccaagaagcagttgcacgaagaggtgaagcgaacgctgaaagataccgggctgtactcccacagacataaacgcgtgggcacattgtccgggggaatgaagcgcaagctgagtatttcaattgctctcattggcggtagtcgcgtggtcatcctggatgaacccagtacaggggtggatccatgctcgcggcgatctatttgggacgtgataagcaaaaacaagaccgctagaactatcattttgagtacccaccatctcgatgaagccgaagtgctatccgatagaatcgccttcttagagcagggcggtctccgttgctgtgggagtcctttctaccttaaggaagccttcggagatggttaccatctcacactcacaaagaaaaagagccccaacctcaatgcaaacgctgtctgtgacacaatggccgtcacagcaatgattcagtctcatttacctgaggcctatctcaaggaagacataggaggtgagctggtgtatgtattgcccccttttagcactaaagtttcgggcgcatacctgagcctgctgagggcactggataatgggatgggtgatttaaacattggctgctatggaatatccgacactaccgtcgaggaagtgtttctgaatcttaccaaggagtcacaaaagaattccgccatgtcactggaacacctgacccaaaagaagatcggaaactcaaacgcaaatggcatatcgacacctgacgatttgtccgtcagctctagcaactttactgacagggacgacaagattctcacacggggtgaacgcctggacggcttcgggcttctcctcaagaagattatggctatcctgattaaaagatttcatcatacaagacgaaactggaaggggctgattgcccaggtcatcttaccaattgtctttgttactaccgccatggggttaggcacgctaagaaactcgtccaactcctatcctgaaatccagatctcgccctccctgtacgggacttctgagcagacggcattttacgccaattatcatccgtctacagaagccctggtgagtgccatgtgggacttccccggaatcgacaacatgtgcttgaacacgagcgacctacagtgtttgaataaggactctctggagaaatggaacacgtccggggagccgatcaccaactttggagtctgttcctgctcagagaacgtgcaggaatgcccaaagttcaattatagtcctccccaccggagaacctattccagccaggtgatctacaacctgaccgggcagcgagtggagaactatctgatctctaccgccaatgagttcgtgcaaaagagatacggcggatggtcttttggcctgcccctgacaaaagatcttcggttcgacatcaccggagtacccgcaaatcgcacactggccaaggtgtggtacgacccagaagggtaccactcattacctgcctacctgaatagcttgaacaacttcctgctgagagtgaacatgagcaaatacgatgccgctcgtcacggaataataatgtattcacatccatatcccggagtgcaggaccaagagcaggccactataagcagtctcatcgatatactagtagctctctccatcttgatggggtactctgtgaccacagccagcttcgtgacctatgtagtgcgcgaacaccagaccaaagcaaagcagttgcaacatattagtggaataggggtcacttgctattgggtaacaaattttatatacgatatggttttttatctggtgcctgttgcattttctattggaattatcgccatcttcaaacttccggctttctatagcgagaataatctcggggctgtcagtctgttgctccttctgttcggttatgcgaccttcagttggatgtatttacttgccggtctcttccacgagaccggtatggccttcatcacatacgtgtgcgttaatctcttcttcggcattaatagtatcgtctccttgtcagtggtctactttttgagcaaagagaaacctaacgacccgaccttggaactgataagcgaaacactcaagagaattttcttgattttcccacagttttgtttcggatacggattaattgaactttctcaacagcaatctgttctcgattttctaaaggcctacggtgtcgaatacccgaacgagaccttcgagatgaacaaactgggtgccatgttcgtggccctggtaagccagggaactatgttttttagcctccgactgttgatcaatgaatcgctcattaagaagctgaggctgtttttccgtaagttcaattcctcgcacgttcgggagacaatagatgaggatgaggacgttcgcgcagagaggttaagagttgaatctggagccgctgaattcgacctggtccagttgtattgtctgaccaagacatatcagttaatccataaaaagatcatcgccgttaataacatatcgattggaattcccgctggagagtgcttcgggctcctaggagtgaacggggcagggaagacaaccattttcaaaatgctcaccggcgacattatccccagtagcggaaatatcttaatccgaaacaagaccggtagtctgggccatgtagacagccattcctctctggtgggttactgtccacaggaggatgccctggatgatcttgtcacggtggaagagcatctttatttttacgcaagggtacatggcattcctgagaaggacattaaggagaccgtgcataagctcttgcgaaggctgcacttgatgccttttaaggacagggctacttcaatgtgttcttacggtaccaagaggaagctgtctaccgccttggccttgatcggcaagcccagcattcttctcctagacgaaccaagttctggaatggatcccaaatcaaaaagacatctgtggaagataataagtgaggaagtgcaaaataagtgctctgttatcttgacgtctcatagcatggaggaatgtgaagccctctgtacaagactggccattatggtcaacggcaaatttcagtgtattggctcacttcagcacatcaagtcccgcttcgggagaggtttcaccgttaaagtgcacctcaaaaataataaagtgactatggaaacactcactaagtttatgcagctgcattttccaaagacctatctgaaggatcagcatctctcgatgttagagtaccacgttcctgtcacagcaggaggggtagcaaacatttttgatttactggagaccaataagacggccctcaatatcaccaactttcttgtgagtcagaccacactcgaggaggtgttcattaactttgccaaggaccagaaaagttacgagactgcggacactagctcccaagggagcacaatcagtgtggatagccaggatgatcaaatggagtcata

SEQ ID NO: 187667 - DNA, 7005 bp, Artificial Sequence
  derived and/or modified sequence
atttcctataaatatcacaaatatttccaacaaaagagcatagatgtcttttatacaattcttttgagaatgattctgcagatttctgcattttctcctcattaatttgacctgggatggttttcactgaggaaaaaaatctttaagcaaacatgttaaatgtttacctatataaaaattattacttcaggtgactccgataatataacgcatgtgtggaatgaggatgatggacagaccttatctccaagcagtctggctgcacagctcctaattctggaaaactttgaagatgccctcttaaatatatcagcaaatagtccttatattccttacttggcatgtgtgagaaatgtgactgacagtttggccagaggttcaccagaaaatctaagactcctgcagtccacaatacgatttaaaaaatcttttcttcgcaatggttcctatgaagattactttcctccagttcctgaagtcctaaaatcaaaactgtctcaacttcgaaacttgaccgaacttctttgtgaatctgaaactttcagtttgatagagaagtcatgccagctctctgatatgagctttgggagcctgtgtgaagaaagtgagtttgatctgcaactcctcgaagcggcagagctgggcaccgaaatagcagccagcttactgtaccatgacaatgtcatatctaaaaaagtgagagatttgctgactggagatccaagcaaaattaatttaaatatggatcagtttctagaacaggcactgcaaatgaattacttggaaaatatcactcagttaataccgatcatagaagccatgctgcatgtcaataacagtgcagatgcttctgaaaagccaggtcagttactagaaatgtttaaaaatgttgaagagctgaaagaagatttaaggagaacaacaggaatgtccaacaggactattgacaagttgctggccattcccatccctgataatagagctgagattatttctcaggtgttctggctgcattcctgtgatactaatatcaccactcccaaactagaagatgcaatgaaagaattctgcaacctgtctctttcagagagatcccggcagtcttacctcatcggactcacccttctgcactacttaaacatttacaacttcacatacaaggtgtttttcccgaggaaagatcaaaagccagtagaaaagatgatggagctcttcataagactaaaagagattctcaatcagatggcttctggcacacatccgctgctagacaaaatgagatccctgaagcaaatgcatctgcccagaagtgttccattaacacaggcaatgtacagaagcaaccgaatgaacacaccacaaggatcatttagcaccatctcccaagcattatgttctcaaggaattaccactgaatatttaactgccatgctgccctcttcccagaggccaaaaggcaaccacaccaaggattttttgacttataaattaactaaagagcaaattgcttcaaaatatggaattcccataaattccacaccattttgcttctccctttataaagacatcattaacatgcccgctggacctgtgatttgggctttcttgaaacctatgttgttgggaagaattttgtatgcaccatataacccagtcacaaaggcaataatggaaaagtccaatgtaactctgagacagctggcggaattaagagaaaaatctcaagagtggatggataagtcgccacttttcatgaattccttccatctgttaaaccaggcaattccaatgctccagaatactctaaggaacccttttgtgcaagtttttgtaaagttctccgtgggactcgatgctgttgaactattgaaacagatagatgaactcgatattctaagactgaaattagagaacaacattgacatcatcgatcagcttaacacactatcttccctgacagtaaatatttcctcttgtgtattatatgaccgtattcaggcagcaaaaaccatagatgaaatggagagagaggctaaaaggctctacaaaagcaacgaactctttggaagtgttatttttaagcttccttctaacagaagctggcacagaggctatgactctggaaatgtctttcttcctcctgtcataaaatataccatccggatgagtctcaagaccgcacagaccacaagaagcctaagaaccaagatttgggctccagggccacacaattctccatcacacaaccagatctatggcagggcttttatttatttacaggatagtattgaaagagcaatcattgaattgcaaactggaaggaactcccaggaaatagcagtccaggttcaagcaattccttatccctgcttcatgaaagacaacttcctaaccagtgtctcttattctcttccaattgtgcttatggttgcctgggttgtatttatagctgcctttgtaaaaaagcttgtctatgagaaagacctccggcttcatgagtacatgaagatgatgggtgtgaactcctgcagccatttctttgcctggcttatagagagtgttggatttttactggttaccatcgtgatcctcatcattatactcaagtttggcaatattcttcctaaaacaaatgggttcattttgttcctgtatttttcggactacagcttctcggttattgccatgagctatcttatcagtgtcttcttcaacaacaccaacattgcagctctgatcggaagcctcatctacatcattgccttctttccatttattgttctggttacagtggagaatgagttgagctatgtattgaaagtgttcatgagcctgctgtccccaacagcattcagctatgcaagccaatacattgcacgatacgaagaacagggcattggtcttcagtgggaaaatatgtacacctccccggttcaggatgacaccacctcatttggctggctgtgctgtctaatcctagctgactctttcatttatttccttattgcttggtatgtcaggaatgtcttcccagggacatacggtatggcagctccctggtattttccaattcttccttcctattggaaggagcgatttgggtgtgcagaggtgaagcctgagaagagcaatggcctcatgtttactaacatcatgatgcagaacaccaacccatctgccagtcctgaatacatgttttcctctaacatcgagcctgaacctaaagatctcacagtcggggttgccctgcatggggtcacaaagatctatggctcaaaagttgctgttgataacctcaatctgaacttttatgaagggcatattacttcattgctggggcccaatggagctgggaaaactactaccatttccatgttaactgggctgtttggggcctcagcaggcaccatttttgtatatggaaaagatatcaaaacagacctacacacggtacggaagaacatgggagtctgtatgcagcacgacgtcttgttcagttacctcactactaaggagcaccttctcctatatggttccatcaaagttcctcactggactaaaaagcagctccacgaggaagtaaaaaggactttaaaagatactggactatatagccatcgtcataagagagttggaacactgtcaggaggcatgaagaggaagttatctatatccatagctctcattggtggatcaagggtagtaattttggatgaaccatctactggagttgacccatgttctcgccgaagtatatgggatgttatatccaagaacaaaactgccagaacaatcattctgtcaacgcaccacttggacgaggctgaagtgctgagtgaccgcatcgccttcctggagcagggtgggcttaggtgctgtgggtccccattttacctcaaggaagcctttggcgatgggtatcacctcacgcttaccaagaagaagagtccaaatttaaatgcaaatgcagtatgtgacaccatggccgtgacagcaatgatccaatcacatctccccgaagcctacctcaaggaggatattgggggagagcttgtttatgtacttcctccattcagcaccaaagtctcaggggcctacctgtcactcctacgggcactcgacaatggcatgggtgacctcaacatcgggtgctacggcatttcagataccaccgtggaggaggtctttctgaacttgaccaaagagtcacaaaaaaatagtgctatgagtcttgagcacttaacacaaaagaaaattgggaattccaatgccaatggcatctcaactcctgacgatttatctgtgagcagcagcaatttcacagacagagatgacaaaatcctgacaagaggagagaggctggatggctttggactgttgctgaagaagatcatggctatactcatcaagaggttccaccacacccgcaggaactggaaaggtctcattgctcaggttatcctccccatcgtctttgttaccactgccatgggccttggcacactgagaaattccagcaacagttatccagagattcagatctccccctctctttatggtacctccgaacagacagccttctatgctaattatcacccgagcacggaagcacttgtctcagcaatgtgggacttccctggaattgacaacatgtgtctgaacaccagtgatctacagtgtttaaacaaagacagtctggaaaaatggaacaccagtggagaacccatcactaattttggtgtttgctcctgctcagaaaatgtccaggaatgtcctaaatttaactattccccaccgcacagaagaacttactcatcccaggtaatttataacctcactgggcaacgagtggaaaattatcttatatcaactgcaaatgagtttgtccaaaaaagatatggaggttggagttttgggctgcctttgacaaaagaccttcgttttgatataacaggagtccctgccaatagaacacttgccaaggtatggtatgatccagaaggctatcactcccttccagcttacctcaacagcctgaataatttccttctgcgagttaacatgtcaaaatacgatgctgcccgacatggcatcatcatgtatagccatccttatccaggagtgcaagaccaagaacaagccacaatcagcagtttaatcgatattttagtggcactgtctatcttgatgggctactctgtcaccaccgccagctttgtcacctatgttgtaagggaacatcaaaccaaagccaaacagttgcagcacatttcaggcattggcgtgacatgctactgggtaacaaacttcatttatgacatggttttctacttggtgcctgtagcgttttcaattggtatcattgcgattttcaaattacctgcattctacagtgaaaacaacctaggcgctgtatctctcctacttctcctgtttgggtatgcaacattttcctggatgtacttgctggctgggctcttccatgaaacaggaatggccttcatcacttacgtctgtgtcaacttgttttttggcattaattccattgtttccctgtcagtggtatactttctttccaaggaaaagcctaatgatccgactttagaacttatttctgaaaccctcaagcgcattttcctgattttcccacaattctgttttggctacggtttgattgaactttctcaacaacagtcggtcctagacttcttaaaagcatatggagtggaatacccaaatgaaacctttgagatgaataaactaggtgcaatgtttgtggctttggtttctcagggcaccatgtttttttccttgcgactcttaatcaacgaatccctgataaagaaactcaggcttttcttcagaaaatttaattcttcacatgtaagggagacaatagatgaggatgaagatgtgcgggctgagagattaagagttgagagtggtgcagctgaatttgacttggtccaactttattgtctcacaaagacctaccaacttatccacaaaaagattatagctgtaaacaacatcagcattgggatacctgctggagagtgttttgggcttcttggagtgaatggagcaggaaagaccactatattcaagatgctgacaggagacatcattccttcaagtggaaacattctgatcagaaataagaccggatctctgggtcacgttgattctcacagctcattagttggctactgtcctcaggaagatgccttagatgacctggtaactgtggaagaacatttgtatttctatgccagggtacatggaattccagaaaaggatattaaagaaactgttcataaactccttaggagacttcacctgatgcccttcaaggacagagctacctctatgtgcagttatggcacaaaaagaaaattatccactgcactggccttgatagggaaaccttccattctactgctggatgagccgagctctggcatggatccgaagtcgaaacggcacctctggaagatcatttcagaagaagtacagaacaaatgttccgtcatcctcacatctcacagcatggaagaatgtgaagctctctgtaccaggttggccattatggtgaatggaaagtttcaatgtattggatctttgcagcacataaagagcaggtttggacgaggatttactgtcaaagttcacttgaagaataacaaagtgaccatggagaccctcacaaagttcatgcagctgcactttccaaaaacatacttaaaagatcagcacctcagcatgctagagtatcatgtaccagtcacagcaggaggagtcgcaaacatttttgatctgctggaaaccaacaagactgctttaaatattacaaatttcttagtgagtcagaccactctggaagaggttttcatcaactttgccaaagaccagaagtcctatgaaactgctgataccagcagccaaggttccactataagtgttgactcacaagatgaccagatggagtcttaacacttccagcaa

SEQ ID NO: 187668 - DNA, 6834 bp, Artificial Sequence
  derived and/or modified sequence
atgttcacctacatcaagatcatcaccagcggcgacagcgacaacatcacccacgtgtggaacgaggacgacggccagaccctgagccccagcagcctggccgcccagctgctgatcctggagaacttcgaggacgccctgctgaacatcagcgccaacagcccctacatcccctacctggcctgcgtgagaaacgtgaccgacagcctggccagaggcagccccgagaacctgagactgctgcagagcaccatcagattcaagaagagcttcctgagaaacggcagctacgaggactacttcccccccgtgcccgaggtgctgaagagcaagctgagccagctgagaaacctgaccgagctgctgtgcgagagcgagaccttcagcctgatcgagaagagctgccagctgagcgacatgagcttcggcagcctgtgcgaggagagcgagttcgacctgcagctgctggaggccgccgagctgggcaccgagatcgccgccagcctgctgtaccacgacaacgtgatcagcaagaaggtgagagacctgctgaccggcgaccccagcaagatcaacctgaacatggaccagttcctggagcaggccctgcagatgaactacctggagaacatcacccagctgatccccatcatcgaggccatgctgcacgtgaacaacagcgccgacgccagcgagaagcccggccagctgctggagatgttcaagaacgtggaggagctgaaggaggacctgagaagaaccaccggcatgagcaacagaaccatcgacaagctgctggccatccccatccccgacaacagagccgagatcatcagccaggtgttctggctgcacagctgcgacaccaacatcaccacccccaagctggaggacgccatgaaggagttctgcaacctgagcctgagcgagagaagcagacagagctacctgatcggcctgaccctgctgcactacctgaacatctacaacttcacctacaaggtgttcttccccagaaaggaccagaagcccgtggagaagatgatggagctgttcatcagactgaaggagatcctgaaccagatggccagcggcacccaccccctgctggacaagatgagaagcctgaagcagatgcacctgcccagaagcgtgcccctgacccaggccatgtacagaagcaacagaatgaacaccccccagggcagcttcagcaccatcagccaggccctgtgcagccagggcatcaccaccgagtacctgaccgccatgctgcccagcagccagagacccaagggcaaccacaccaaggacttcctgacctacaagctgaccaaggagcagatcgccagcaagtacggcatccccatcaacagcacccccttctgcttcagcctgtacaaggacatcatcaacatgcccgccggccccgtgatctgggccttcctgaagcccatgctgctgggcagaatcctgtacgccccctacaaccccgtgaccaaggccatcatggagaagagcaacgtgaccctgagacagctggccgagctgagagagaagagccaggagtggatggacaagagccccctgttcatgaacagcttccacctgctgaaccaggccatccccatgctgcagaacaccctgagaaaccccttcgtgcaggtgttcgtgaagttcagcgtgggcctggacgccgtggagctgctgaagcagatcgacgagctggacatcctgagactgaagctggagaacaacatcgacatcatcgaccagctgaacaccctgagcagcctgaccgtgaacatcagcagctgcgtgctgtacgacagaatccaggccgccaagaccatcgacgagatggagagagaggccaagagactgtacaagagcaacgagctgttcggcagcgtgatcttcaagctgcccagcaacagaagctggcacagaggctacgacagcggcaacgtgttcctgccccccgtgatcaagtacaccatcagaatgagcctgaagaccgcccagaccaccagaagcctgagaaccaagatctgggcccccggcccccacaacagccccagccacaaccagatctacggcagagccttcatctacctgcaggacagcatcgagagagccatcatcgagctgcagaccggcagaaacagccaggagatcgccgtgcaggtgcaggccatcccctacccctgcttcatgaaggacaacttcctgaccagcgtgagctacagcctgcccatcgtgctgatggtggcctgggtggtgttcatcgccgccttcgtgaagaagctggtgtacgagaaggacctgagactgcacgagtacatgaagatgatgggcgtgaacagctgcagccacttcttcgcctggctgatcgagagcgtgggcttcctgctggtgaccatcgtgatcctgatcatcatcctgaagttcggcaacatcctgcccaagaccaacggcttcatcctgttcctgtacttcagcgactacagcttcagcgtgatcgccatgagctacctgatcagcgtgttcttcaacaacaccaacatcgccgccctgatcggcagcctgatctacatcatcgccttcttccccttcatcgtgctggtgaccgtggagaacgagctgagctacgtgctgaaggtgttcatgagcctgctgagccccaccgccttcagctacgccagccagtacatcgccagatacgaggagcagggcatcggcctgcagtgggagaacatgtacaccagccccgtgcaggacgacaccaccagcttcggctggctgtgctgcctgatcctggccgacagcttcatctacttcctgatcgcctggtacgtgagaaacgtgttccccggcacctacggcatggccgccccctggtacttccccatcctgcccagctactggaaggagagattcggctgcgccgaggtgaagcccgagaagagcaacggcctgatgttcaccaacatcatgatgcagaacaccaaccccagcgccagccccgagtacatgttcagcagcaacatcgagcccgagcccaaggacctgaccgtgggcgtggccctgcacggcgtgaccaagatctacggcagcaaggtggccgtggacaacctgaacctgaacttctacgagggccacatcaccagcctgctgggccccaacggcgccggcaagaccaccaccatcagcatgctgaccggcctgttcggcgccagcgccggcaccatcttcgtgtacggcaaggacatcaagaccgacctgcacaccgtgagaaagaacatgggcgtgtgcatgcagcacgacgtgctgttcagctacctgaccaccaaggagcacctgctgctgtacggcagcatcaaggtgccccactggaccaagaagcagctgcacgaggaggtgaagagaaccctgaaggacaccggcctgtacagccacagacacaagagagtgggcaccctgagcggcggcatgaagagaaagctgagcatcagcatcgccctgatcggcggcagcagagtggtgatcctggacgagcccagcaccggcgtggacccctgcagcagaagaagcatctgggacgtgatcagcaagaacaagaccgccagaaccatcatcctgagcacccaccacctggacgaggccgaggtgctgagcgacagaatcgccttcctggagcagggcggcctgagatgctgcggcagccccttctacctgaaggaggccttcggcgacggctaccacctgaccctgaccaagaagaagagccccaacctgaacgccaacgccgtgtgcgacaccatggccgtgaccgccatgatccagagccacctgcccgaggcctacctgaaggaggacatcggcggcgagctggtgtacgtgctgccccccttcagcaccaaggtgagcggcgcctacctgagcctgctgagagccctggacaacggcatgggcgacctgaacatcggctgctacggcatcagcgacaccaccgtggaggaggtgttcctgaacctgaccaaggagagccagaagaacagcgccatgagcctggagcacctgacccagaagaagatcggcaacagcaacgccaacggcatcagcacccccgacgacctgagcgtgagcagcagcaacttcaccgacagagacgacaagatcctgaccagaggcgagagactggacggcttcggcctgctgctgaagaagatcatggccatcctgatcaagagattccaccacaccagaagaaactggaagggcctgatcgcccaggtgatcctgcccatcgtgttcgtgaccaccgccatgggcctgggcaccctgagaaacagcagcaacagctaccccgagatccagatcagccccagcctgtacggcaccagcgagcagaccgccttctacgccaactaccaccccagcaccgaggccctggtgagcgccatgtgggacttccccggcatcgacaacatgtgcctgaacaccagcgacctgcagtgcctgaacaaggacagcctggagaagtggaacaccagcggcgagcccatcaccaacttcggcgtgtgcagctgcagcgagaacgtgcaggagtgccccaagttcaactacagccccccccacagaagaacctacagcagccaggtgatctacaacctgaccggccagagagtggagaactacctgatcagcaccgccaacgagttcgtgcagaagagatacggcggctggagcttcggcctgcccctgaccaaggacctgagattcgacatcaccggcgtgcccgccaacagaaccctggccaaggtgtggtacgaccccgagggctaccacagcctgcccgcctacctgaacagcctgaacaacttcctgctgagagtgaacatgagcaagtacgacgccgccagacacggcatcatcatgtacagccacccctaccccggcgtgcaggaccaggagcaggccaccatcagcagcctgatcgacatcctggtggccctgagcatcctgatgggctacagcgtgaccaccgccagcttcgtgacctacgtggtgagagagcaccagaccaaggccaagcagctgcagcacatcagcggcatcggcgtgacctgctactgggtgaccaacttcatctacgacatggtgttctacctggtgcccgtggccttcagcatcggcatcatcgccatcttcaagctgcccgccttctacagcgagaacaacctgggcgccgtgagcctgctgctgctgctgttcggctacgccaccttcagctggatgtacctgctggccggcctgttccacgagaccggcatggccttcatcacctacgtgtgcgtgaacctgttcttcggcatcaacagcatcgtgagcctgagcgtggtgtacttcctgagcaaggagaagcccaacgaccccaccctggagctgatcagcgagaccctgaagagaatcttcctgatcttcccccagttctgcttcggctacggcctgatcgagctgagccagcagcagagcgtgctggacttcctgaaggcctacggcgtggagtaccccaacgagaccttcgagatgaacaagctgggcgccatgttcgtggccctggtgagccagggcaccatgttcttcagcctgagactgctgatcaacgagagcctgatcaagaagctgagactgttcttcagaaagttcaacagcagccacgtgagagagaccatcgacgaggacgaggacgtgagagccgagagactgagagtggagagcggcgccgccgagttcgacctggtgcagctgtactgcctgaccaagacctaccagctgatccacaagaagatcatcgccgtgaacaacatcagcatcggcatccccgccggcgagtgcttcggcctgctgggcgtgaacggcgccggcaagaccaccatcttcaagatgctgaccggcgacatcatccccagcagcggcaacatcctgatcagaaacaagaccggcagcctgggccacgtggacagccacagcagcctggtgggctactgcccccaggaggacgccctggacgacctggtgaccgtggaggagcacctgtacttctacgccagagtgcacggcatccccgagaaggacatcaaggagaccgtgcacaagctgctgagaagactgcacctgatgcccttcaaggacagagccaccagcatgtgcagctacggcaccaagagaaagctgagcaccgccctggccctgatcggcaagcccagcatcctgctgctggacgagcccagcagcggcatggaccccaagagcaagagacacctgtggaagatcatcagcgaggaggtgcagaacaagtgcagcgtgatcctgaccagccacagcatggaggagtgcgaggccctgtgcaccagactggccatcatggtgaacggcaagttccagtgcatcggcagcctgcagcacatcaagagcagattcggcagaggcttcaccgtgaaggtgcacctgaagaacaacaaggtgaccatggagaccctgaccaagttcatgcagctgcacttccccaagacctacctgaaggaccagcacctgagcatgctggagtaccacgtgcccgtgaccgccggcggcgtggccaacatcttcgacctgctggagaccaacaagaccgccctgaacatcaccaacttcctggtgagccagaccaccctggaggaggtgttcatcaacttcgccaaggaccagaagagctacgagaccgccgacaccagcagccagggcagcaccatcagcgtggacagccaggacgaccagatggagagctag

SEQ ID NO: 187669 - protein, 489 aa, Artificial Sequence
  derived and/or modified sequence
MEDSASASLSSAAATGTSTSTPAAPTARKQLDKEQVRKAVDALLTHCKSRKNNYGLLLNENESLFLMVVLWKIPSKELRVRLTLPHSIRSDSEDICLFTKDEPNSTPEKTEQFYRKLLNKHGIKTVSQIISLQTLKKEYKSYEAKLRLLSSFDFFLTDARIRRLLPSLIGRHFYQRKKVPVSVNLLSKNLSREINDCIGGTVLNISKSGSCSAIRIGHVGMQIEHIIENIVAVTKGLSEKLPEWESVKLLFVKTEKSAALPIFSSFVSNWDEATKRSLLNKKKKEARRKRRERNFEKQKERKKKRQQARKTASVLSKDDVAPESGDTTVKKPESKKEQTPEHGKKKRGRGKAQVKATNESEDEIPQLVPIGKKTPANEKVEIQKHATGKKSPAKSPNPSTPRGKKRKALPASETPKAAESETPGKSPEKKPKIKEEAVKEKSPSLGKKDARQTPKKPEAKFFTTPSKSVRKASHTPKKWPKKPKVPQST

SEQ ID NO: 187670 - protein, 490 aa, Artificial Sequence
  derived and/or modified sequence
MEDSASASLSSAAATGTSTSTPAAPTARKQLDKEQVRKAVDALLTHCKSRKNNYGLLLNENESLFLMVVLWKIPSKELRVRLTLPHSIRSDSEDICLFTKDEPNSTPEKTEQFYRKLLNKHGIKTVSQIISLQTLKKEYKSYEAKLRLLSSFDFFLTDARIRRLLPSLIGRHFYQRKKVPVSVNLLSKNLSREINDCIGGTVLNISKSGSCSAIRIGHVGMQIEHIIENIVAVTKGLSEKLPEKWESVKLLFVKTEKSAALPIFSSFVSNWDEATKRSLLNKKKKEARRKRRERNFEKQKERKKKRQQARKTASVLSKDDVAPESGDTTVKKPESKKEQTPEHGKKKRGRGKAQVKATNESEDEIPQLVPIGKKTPANEKVEIQKHATGKKSPAKSPNPSTPRGKKRKALPASETPKAAESETPGKSPEKKPKIKEEAVKEKSPSLGKKDARQTPKKPEAKFFTTPSKSVRKASHTPKKWPKKPKVPQST

SEQ ID NO: 187671 - protein, 270 aa, Artificial Sequence
  derived and/or modified sequence
MQIEHIIENIVAVTKGLSEKLPEKWESVKLLFVKTEKSAALPIFSSFVSNWDEATKRSLLNKKKKEARRKRRERNFEKQKERKKKRQQARKTASVLSKDDVAPESGDTTVKKPESKKEQTPEHGKKKRGRGKAQVKATNESEDEIPQLVPIGKKTPANEKVEIQKHATGKKSPAKSPNPSTPRGKKRKALPASETPKAAESETPGKSPEKKPKIKEEAVKEKSPSLGKKDARQTPKKPEAKFFTTPSKSVRKASHTPKKWPKKPKVPQST

SEQ ID NO: 187672 - DNA, 1470 bp, Artificial Sequence
  derived and/or modified sequence
atggaggacagcgccagcgccagcctgagcagcgccgccgccaccggcaccagcaccagcacccccgccgcccccaccgccagaaagcagctggacaaggagcaggtgagaaaggccgtggacgccctgctgacccactgcaagagcagaaagaacaactacggcctgctgctgaacgagaacgagagcctgttcctgatggtggtgctgtggaagatccccagcaaggagctgagagtgagactgaccctgccccacagcatcagaagcgacagcgaggacatctgcctgttcaccaaggacgagcccaacagcacccccgagaagaccgagcagttctacagaaagctgctgaacaagcacggcatcaagaccgtgagccagatcatcagcctgcagaccctgaagaaggagtacaagagctacgaggccaagctgagactgctgagcagcttcgacttcttcctgaccgacgccagaatcagaagactgctgcccagcctgatcggcagacacttctaccagagaaagaaggtgcccgtgagcgtgaacctgctgagcaagaacctgagcagagagatcaacgactgcatcggcggcaccgtgctgaacatcagcaagagcggcagctgcagcgccatcagaatcggccacgtgggcatgcagatcgagcacatcatcgagaacatcgtggccgtgaccaagggcctgagcgagaagctgcccgagtgggagagcgtgaagctgctgttcgtgaagaccgagaagagcgccgccctgcccatcttcagcagcttcgtgagcaactgggacgaggccaccaagagaagcctgctgaacaagaagaagaaggaggccagaagaaagagaagagagagaaacttcgagaagcagaaggagagaaagaagaagagacagcaggccagaaagaccgccagcgtgctgagcaaggacgacgtggcccccgagagcggcgacaccaccgtgaagaagcccgagagcaagaaggagcagacccccgagcacggcaagaagaagagaggcagaggcaaggcccaggtgaaggccaccaacgagagcgaggacgagatcccccagctggtgcccatcggcaagaagacccccgccaacgagaaggtggagatccagaagcacgccaccggcaagaagagccccgccaagagccccaaccccagcacccccagaggcaagaagagaaaggccctgcccgccagcgagacccccaaggccgccgagagcgagacccccggcaagagccccgagaagaagcccaagatcaaggaggaggccgtgaaggagaagagccccagcctgggcaagaaggacgccagacagacccccaagaagcccgaggccaagttcttcaccacccccagcaagagcgtgagaaaggccagccacacccccaagaagtggcccaagaagcccaaggtgccccagagcacctag

SEQ ID NO: 187673 - DNA, 1473 bp, Artificial Sequence
  derived and/or modified sequence
atggaggacagcgccagcgccagcctgagcagcgccgccgccaccggcaccagcaccagcacccccgccgcccccaccgccagaaagcagctggacaaggagcaggtgagaaaggccgtggacgccctgctgacccactgcaagagcagaaagaacaactacggcctgctgctgaacgagaacgagagcctgttcctgatggtggtgctgtggaagatccccagcaaggagctgagagtgagactgaccctgccccacagcatcagaagcgacagcgaggacatctgcctgttcaccaaggacgagcccaacagcacccccgagaagaccgagcagttctacagaaagctgctgaacaagcacggcatcaagaccgtgagccagatcatcagcctgcagaccctgaagaaggagtacaagagctacgaggccaagctgagactgctgagcagcttcgacttcttcctgaccgacgccagaatcagaagactgctgcccagcctgatcggcagacacttctaccagagaaagaaggtgcccgtgagcgtgaacctgctgagcaagaacctgagcagagagatcaacgactgcatcggcggcaccgtgctgaacatcagcaagagcggcagctgcagcgccatcagaatcggccacgtgggcatgcagatcgagcacatcatcgagaacatcgtggccgtgaccaagggcctgagcgagaagctgcccgagaagtgggagagcgtgaagctgctgttcgtgaagaccgagaagagcgccgccctgcccatcttcagcagcttcgtgagcaactgggacgaggccaccaagagaagcctgctgaacaagaagaagaaggaggccagaagaaagagaagagagagaaacttcgagaagcagaaggagagaaagaagaagagacagcaggccagaaagaccgccagcgtgctgagcaaggacgacgtggcccccgagagcggcgacaccaccgtgaagaagcccgagagcaagaaggagcagacccccgagcacggcaagaagaagagaggcagaggcaaggcccaggtgaaggccaccaacgagagcgaggacgagatcccccagctggtgcccatcggcaagaagacccccgccaacgagaaggtggagatccagaagcacgccaccggcaagaagagccccgccaagagccccaaccccagcacccccagaggcaagaagagaaaggccctgcccgccagcgagacccccaaggccgccgagagcgagacccccggcaagagccccgagaagaagcccaagatcaaggaggaggccgtgaaggagaagagccccagcctgggcaagaaggacgccagacagacccccaagaagcccgaggccaagttcttcaccacccccagcaagagcgtgagaaaggccagccacacccccaagaagtggcccaagaagcccaaggtgccccagagcacctag

SEQ ID NO: 187674 - DNA, 813 bp, Artificial Sequence
  derived and/or modified sequence
atgcagatcgagcacatcatcgagaacatcgtggccgtgaccaagggcctgagcgagaagctgcccgagaagtgggagagcgtgaagctgctgttcgtgaagaccgagaagagcgccgccctgcccatcttcagcagcttcgtgagcaactgggacgaggccaccaagagaagcctgctgaacaagaagaagaaggaggccagaagaaagagaagagagagaaacttcgagaagcagaaggagagaaagaagaagagacagcaggccagaaagaccgccagcgtgctgagcaaggacgacgtggcccccgagagcggcgacaccaccgtgaagaagcccgagagcaagaaggagcagacccccgagcacggcaagaagaagagaggcagaggcaaggcccaggtgaaggccaccaacgagagcgaggacgagatcccccagctggtgcccatcggcaagaagacccccgccaacgagaaggtggagatccagaagcacgccaccggcaagaagagccccgccaagagccccaaccccagcacccccagaggcaagaagagaaaggccctgcccgccagcgagacccccaaggccgccgagagcgagacccccggcaagagccccgagaagaagcccaagatcaaggaggaggccgtgaaggagaagagccccagcctgggcaagaaggacgccagacagacccccaagaagcccgaggccaagttcttcaccacccccagcaagagcgtgagaaaggccagccacacccccaagaagtggcccaagaagcccaaggtgccccagagcacctag

SEQ ID NO: 187675 - DNA, 1950 bp, Artificial Sequence
  derived and/or modified sequence
gcacacgcgcctcttcacgaggtggaaacaagatggaggattcggcctcggcctcgctgtcttctgcagccgctactggaacctccacctcgactccagcggccccgacagcacggaagcagctggataaagaacaggttagaaaggcagtggacgctctcttgacgcattgcaagtccaggaaaaacaattatgggttgcttttgaatgagaatgaaagtttatttttaatggtggtattatggaaaattccaagtaaagaactgagggtcagattgaccttgcctcatagtattcgatcagattcagaagatatctgtttatttacgaaggatgaacccaattcaactcctgaaaagacagaacagttttatagaaagcttttaaacaagcatggaattaaaaccgtttctcagattatctccctccaaactctaaagaaggaatataaatcctatgaagccaagctccgccttctgagcagttttgatttcttccttactgatgccagaattaggcggctcttaccctcactcattgggagacatttctatcaaagaaagaaagttccagtatctgtaaaccttctgtccaagaatttatcaagagagatcaatgactgtataggtggaacagtcttaaacatttctaaaagtggttcttgcagtgctatacgtattggtcacgttggaatgcaaattgagcacatcattgaaaacattgttgctgtcaccaaaggactttcagaaaaattgccagagtgggagagcgtgaaactcctgtttgtgaaaactgagaaatcggctgcacttcccatcttttcctcgtttgtcagcaattgggatgaagccaccaaaagatctttgcttaataagaagaaaaaagaggcaaggagaaaacgaagagaaagaaattttgaaaaacaaaaggagaggaagaagaagaggcagcaggctaggaagactgcatcagttcttagtaaagatgatgtggcacctgaaagtggtgatactacagtgaagaaacctgaatcaaagaaggaacagaccccagagcatgggaagaaaaaacgtggcagaggaaaagcccaagttaaagcaacaaatgaatccgaagacgaaatcccacagctggtaccaataggaaagaagactccagctaatgaaaaagtagagattcaaaaacatgccacaggaaagaagtctccagcaaagagtcctaatcccagcacacctcgtgggaagaaaagaaaggctttgccagcatctgagaccccaaaagctgcagagtctgagaccccagggaaaagcccagagaagaagccaaaaatcaaagaagaggcagtgaaggaaaaaagtccttcgctggggaaaaaagatgcgagacagactccaaaaaagccagaggccaagtttttcaccactcctagtaaatctgtgagaaaagcttcccacacccccaaaaaatggcccaaaaaacccaaagtaccccagtcgacctaaagtcagtgattcaactggaaggaaacctcaatgctgcctccagagctttttggaaatactcagatcctggccgcctttgtaaccttctctaaacgtcaggcctggacttaaaagattttttaaaacctccataagtagtccaggggcggtggctcacgcctgtaatcccagcactttgggaggccgaggcaggcggatcacaaggtcaacgagatcgagaccatcctggccaacatggtgaaaccctgtctgtaccaaaaatacaaaaattaattgggcatggtggtggacacctgtaatcccagctactagggaggctgaggcaggagaattgcttgaacctgggaggcggaggttgcagtgagccactgcactccagcctgatgacagagcaagactcagtctcaaaaataaataaaaataataaaacctccataagtaatcctga

SEQ ID NO: 187676 - DNA, 1470 bp, Artificial Sequence
  derived and/or modified sequence
atggaagactctgccagcgcctcattgtcaagtgcagccgcaacagggacctcaactagcacccctgccgcgccgacggcccgcaagcagcttgataaggaacaggttagaaaagccgtcgacgcccttctcacgcactgtaagagccggaagaacaactacggactgctgctgaacgaaaacgagtcactgtttctaatggtggtcctgtggaagatcccgtccaaagaacttcgagtcagactgactctgccacactctatccgatcggattcagaagatatttgcttgtttaccaaagacgagccaaactccacacccgagaagactgagcagttctatcggaagttgctgaacaaacatgggattaagacagtctctcagataatctcgttacagaccctaaagaaggaatataaaagctatgaggctaaactgagactcctgtccagctttgattttttcctcacagatgcccgcatccgccggttgctgcccagcctcattggtcgacacttctaccagcgcaagaaggtaccagtttcggtgaacctcctatccaaaaacttgagccgagaaattaacgactgtattggcggcacagttctgaacatcagcaagtcaggtagctgttccgccatcaggattggccacgtggggatgcagattgagcacataattgaaaatattgtcgctgttacaaaaggcttgagcgagaagctccctgagtgggagagcgtgaagctcctgttcgttaaaacagagaaatctgcggctctgccaatcttttcatccttcgtctccaattgggatgaggctaccaagaggtcactgctgaacaagaagaagaaggaggccagaagaaagaggagagagcgtaattttgagaagcagaaggagcgcaagaagaagcggcagcaagcccggaagacagcttccgtgctgtccaaggatgatgtggctcccgaaagcggggatactaccgtaaagaagccagagagcaagaaagaacagacccccgaacacggcaagaagaagagaggcagaggcaaagcccaggtaaaagcaacaaatgagtccgaggacgagattccccagttggtgcctatcggtaagaagaccccagctaatgaaaaagtggagatccagaagcacgctaccggaaagaagagccctgccaaaagccctaatccgtctactcctcgcggcaaaaagcgcaaagctctgccagcctctgagacacctaaggctgccgaaagcgagactccaggtaaatctcccgagaagaaacccaaaattaaggaagaggcagtaaaagagaaatcccccagcttagggaagaaagacgctcgccagaccccaaaaaagcctgaagcgaaattctttacaacgccatcaaagtcagtccgtaaggcctcccatacccccaaaaagtggcccaagaagcccaaagtgcctcagtccacctag

SEQ ID NO: 187677 - DNA, 1473 bp, Artificial Sequence
  derived and/or modified sequence
atggaggattctgccagcgccagtctgtcctccgcagccgctacagggactagcaccagtacacccgccgcacccaccgcgaggaagcagctggataaagagcaagtcaggaaagcagtggatgccctgctcacacactgcaagagccggaagaacaactatggcttattactcaatgagaacgagtcattatttttgatggtggtcctgtggaaaattccgtctaaagaactccgggtccggttgacgcttccacactccattcgctctgatagtgaagacatctgcctttttactaaggatgagcccaacagcacccctgaaaagacagagcaattttacaggaaactcttgaataaacacggtatcaagaccgtgagtcagataatatcgttgcagacactgaaaaaggagtacaagtcatatgaggcaaagctgcgactgctcagttctttcgacttctttcttacggatgcccgcattcggcggttgcttccctctttgattgggagacacttttatcaaaggaagaaggtcccggtttccgtgaaccttctatccaaaaatctttccagagagataaacgattgcattggtggtaccgtcctgaatatcagtaagtctgggtcttgctctgcgatccgaatcggacatgttggaatgcaaatagaacacattattgagaacatcgtggccgtgacgaaggggctgtccgagaaactgccagagaaatgggagagtgtgaaactgctgtttgtgaagacagagaaatcggcggcattaccgattttctcctctttcgtgagcaactgggatgaggccacaaaacgttctctgctgaacaagaaaaaaaaggaagctaggaggaagcgaagggagcgtaatttcgaaaaacaaaaggaaagaaaaaaaaaacgacaacaagctagaaaaactgcctctgtgttgagtaaggacgacgtggctcccgaaagcggtgatacgaccgtgaaaaaacccgagagtaagaaggagcagactcctgagcatggcaagaaaaagaggggaagaggcaaggcccaagtaaaggctactaacgagtctgaagacgagatccctcagctcgtcccaatcgggaaaaagaccccggcaaatgagaaggttgagattcagaaacacgctacaggaaaaaaatccccagctaaaagccctaacccttcgactccaaggggtaaaaaaagaaaagccttgcctgcgagcgagaccccaaaagcagcggagtccgagactcctgggaagtctcctgagaagaaacctaagattaaggaggaggcagtaaaggagaagagtccttccctgggcaaaaaggatgccagacagacacccaagaagccagaggctaaatttttcacaacacccagtaaaagtgttcgcaaagcatctcatacgcccaagaagtggcctaaaaaaccaaaagtgccacagagcacctag

SEQ ID NO: 187678 - DNA, 813 bp, Artificial Sequence
  derived and/or modified sequence
atgcaaatagagcacatcattgaaaacattgtggcagtgaccaaagggctgtcagaaaaactgccagaaaagtgggagagtgtcaagctgctgttcgtgaagacagaaaagtccgccgcactgcccattttttctagtttcgtctcaaactgggacgaggctaccaagcggtctttgctcaacaagaagaaaaaggaggcacgtagaaagcgccgagaaaggaacttcgaaaagcagaaggagagaaaaaagaagcggcaacaagcaagaaagactgcaagtgtgttgagcaaggacgatgtggcccccgaaagcggcgacacaactgtgaagaaacccgagtctaagaaggagcagactcccgaacatggaaaaaagaaacgtggccggggcaaggcccaggtgaaagcaactaatgaaagcgaagacgagattccgcagttggtgccgatcggaaagaagacaccagctaatgagaaggtagaaatccagaaacatgcaacggggaagaagtcccctgcgaaaagcccaaatccttccacaccccgtggcaaaaagcggaaggcgctccctgctagtgaaacgccaaaggctgcagaatcagaaaccccgggtaagtctccggaaaagaaaccgaagataaaggaggaagccgtgaaggagaaaagtcctagtctggggaagaaagatgcccggcagaccccaaagaagcctgaggctaaattcttcacgacaccttccaagtcagtccgtaaggctagccacacgcctaaaaagtggccaaagaagcccaaagtcccccaaagtacttag

SEQ ID NO: 187679 - DNA, 1473 bp, Artificial Sequence
  derived and/or modified sequence
atggaggactccgcatcggcttcactgagctctgcagccgcgaccggtacttctacctcgactccagcggctcctacggcacgtaagcagttagacaaggaacaggtgcgtaaggccgtggacgctctgctcacacattgcaaaagccgcaagaacaattacggactattgttgaacgagaatgagtcgttattcctgatggttgtgctctggaagataccctctaaggagctaagggtgcggctgacccttccccacagtattcgctctgactctgaagacatttgtctttttaccaaagatgagccaaacagtactccagaaaagaccgaacagttctacagaaaactcctcaacaagcatggtatcaagaccgtctcccagattatcagtctccagacgttaaaaaaagagtataagagttacgaagctaaattacgtctgctatctagctttgactttttcttgactgacgcccgcatacgccggctgctgccctctctcatcggcagacatttttatcagagaaagaaggtgcccgtttctgttaacctcttgagcaagaatctaagtcgcgaaattaacgactgcattggtggaacggtgctgaacatcagcaaaagcggatcttgtagcgccatccggattggacacgtgggtatgcaaatagagcacatcatcgagaatattgtggctgtgaccaagggcctgagcgagaagctgcccgaaaagtgggaaagtgtaaagctgttattcgtaaaaactgagaaaagtgcagccctgccaatctttagtagttttgtgtcaaactgggatgaggctactaagcgatccctgcttaacaagaagaagaaagaggcgcgaaggaaaagacgcgagaggaatttcgaaaagcagaaggaacggaagaagaaacggcaacaagcgaggaaaacggcatctgttctttctaaggacgacgtggccccagagagcggcgatacaactgtgaagaagcccgagtccaagaaggagcaaaccccggagcatggcaaaaagaaacgaggacgcggcaaagctcaagtgaaggctaccaacgagtctgaggatgagattccgcaacttgtcccaatcggtaagaagacacccgccaacgagaaggtggagatccaaaaacacgcgaccgggaaaaaaagccctgccaaatctcccaatcctagtacacctcggggaaagaagaggaaagccctgcctgccagcgagacccctaaagccgccgagagcgaaacaccaggtaagagcccggagaagaagcccaagattaaggaggaggcggtgaaggagaaatcccccagccttggcaaaaaagatgcgaggcagacccccaagaagcctgaggccaagttctttacgactccatccaagtccgtccggaaagcctctcacacgcctaagaagtggccaaagaagcccaaagtcccacagagcacctag

SEQ ID NO: 187680 - DNA, 1470 bp, Artificial Sequence
  derived and/or modified sequence
atggaggacagcgccagcgccagcctgagcagcgctgctgccaccggcaccagcaccagcaccccagctgcccccacagccaggaagcagctggacaaggagcaggtgaggaaggctgtggatgccctgctgacccactgcaagagcaggaagaacaactacggcctgctgctgaatgaaaatgaaagcctcttcctgatggtggtgctgtggaagatccccagcaaggagctgcgggtgcggctgaccctgccccacagcatccgcagtgacagcgaggacatctgcctcttcaccaaggatgagcccaacagcaccccagagaagacagagcagttctacaggaagctgctgaacaagcacggcatcaagacagtgtcccagatcatcagcctgcagaccctgaagaaggagtacaagagctatgaggccaagctgcggctgctgagcagctttgacttcttcctgacagatgcccgcatccggcggctgctgcccagcctgattggccgccacttctaccagaggaagaaggtgcctgtgtctgtgaacctgctgagcaagaacctgagccgggagatcaatgactgcatcggcggcaccgtgctgaacatcagcaagagcggcagctgcagcgccatccgcatcggccacgtgggcatgcagatcgagcacatcatcgagaacatcgtggccgtgaccaagggcctgtctgagaagctgcctgagtgggagagcgtgaagctgctgtttgtgaagacagagaagtctgctgccctgcccatcttcagcagctttgtgagcaactgggatgaggccaccaagaggagcctgctgaacaagaagaagaaggaggcccggaggaagaggcgggagaggaactttgagaagcagaaggagaggaagaagaagaggcagcaggccaggaagacagcctctgtgctgagcaaggatgatgtggcccctgagagcggggacaccaccgtgaagaagccagagagcaagaaggagcagaccccagagcacggcaagaagaagaggggccggggcaaggcccaggtgaaggccaccaatgaaagtgaagatgagatcccccagctggtgcccatcggcaagaagaccccagccaatgagaaggtggagatccagaagcacgccaccgggaagaagagccctgccaagagccccaaccccagcaccccccggggcaagaagaggaaggccctgcctgccagcgagacccccaaggctgctgagagcgagaccccaggcaagagccctgagaagaagcccaagatcaaggaggaggccgtgaaggagaagagccccagcctgggcaagaaggatgcccggcagacccccaagaagccagaggccaagttcttcaccacccccagcaagtctgtgaggaaggccagccacacccccaagaagtggcccaagaagcccaaggtgccccagagcacctag

SEQ ID NO: 187681 - DNA, 1473 bp, Artificial Sequence
  derived and/or modified sequence
atggaggacagcgccagcgccagcctgagcagcgctgctgccaccggcaccagcaccagcaccccagctgcccccacagccaggaagcagctggacaaggagcaggtgaggaaggctgtggatgccctgctgacccactgcaagagcaggaagaacaactacggcctgctgctgaatgaaaatgaaagcctcttcctgatggtggtgctgtggaagatccccagcaaggagctgcgggtgcggctgaccctgccccacagcatccgcagtgacagcgaggacatctgcctcttcaccaaggatgagcccaacagcaccccagagaagacagagcagttctacaggaagctgctgaacaagcacggcatcaagacagtgtcccagatcatcagcctgcagaccctgaagaaggagtacaagagctatgaggccaagctgcggctgctgagcagctttgacttcttcctgacagatgcccgcatccggcggctgctgcccagcctgattggccgccacttctaccagaggaagaaggtgcctgtgtctgtgaacctgctgagcaagaacctgagccgggagatcaatgactgcatcggcggcaccgtgctgaacatcagcaagagcggcagctgcagcgccatccgcatcggccacgtgggcatgcagatcgagcacatcatcgagaacatcgtggccgtgaccaagggcctgtctgagaagctgcctgagaagtgggagagcgtgaagctgctgtttgtgaagacagagaagtctgctgccctgcccatcttcagcagctttgtgagcaactgggatgaggccaccaagaggagcctgctgaacaagaagaagaaggaggcccggaggaagagaagagagaggaactttgagaagcagaaggagaggaagaagaagaggcagcaggccaggaagacagcctctgtgctgagcaaggatgatgtggcccctgagagcggggacaccaccgtgaagaagccagagagcaagaaggagcagaccccagagcacggcaagaagaagaggggccggggcaaggcccaggtgaaggccaccaatgaaagtgaagatgagatcccccagctggtgcccatcggcaagaagaccccagccaatgagaaggtggagatccagaagcacgccaccgggaagaagagccctgccaagagccccaaccccagcaccccccggggcaagaagaggaaggccctgcctgccagcgagacccccaaggctgctgagagcgagacccctgggaagagccctgagaagaagcccaagatcaaggaggaggccgtgaaggagaagagccccagcctgggcaagaaggatgcccggcagacccccaagaagccagaggccaagttcttcaccacccccagcaagtctgtgaggaaggccagccacacccccaagaagtggcccaagaagcccaaggtgccccagagcacctag

SEQ ID NO: 187682 - DNA, 813 bp, Artificial Sequence
  derived and/or modified sequence
atgcagatcgagcacatcatcgagaacatcgtggccgtgaccaagggcctgtctgagaagctgcctgagaagtgggagagcgtgaagctgctgtttgtgaagacagagaagtctgctgccctgcccatcttcagcagctttgtgagcaactgggatgaggccaccaagaggagcctgctgaacaagaagaagaaggaggcccggaggaagagaagagagaggaactttgagaagcagaaggagaggaagaagaagaggcagcaggccaggaagacagcctctgtgctgagcaaggatgatgtggcccctgagagcggggacaccaccgtgaagaagccagagagcaagaaggagcagaccccagagcacggcaagaagaagaggggccggggcaaggcccaggtgaaggccaccaatgaaagtgaagatgagatcccccagctggtgcccatcggcaagaagaccccagccaatgagaaggtggagatccagaagcacgccaccgggaagaagagccctgccaagagccccaaccccagcaccccccggggcaagaagaggaaggccctgcctgccagcgagacccccaaggctgctgagagcgagacccctgggaagagccctgagaagaagcccaagatcaaggaggaggccgtgaaggagaagagccccagcctgggcaagaaggatgcccggcagacccccaagaagccagaggccaagttcttcaccacccccagcaagtctgtgaggaaggccagccacacccccaagaagtggcccaagaagcccaaggtgccccagagcacctag

SEQ ID NO: 187683 - DNA, 1470 bp, Artificial Sequence
  derived and/or modified sequence
atggaggacagcgccagcgccagcctgagcagcgccgccgccaccggtactagtacttcgaccccagctgccccaactgctaggaagcagctggataaagaacaggtgagaaaggccgttgatgctctccttactcattgtaaatcccgcaaaaacaattacggacttctgctgaatgaaaatgaatcactgttcctcatggtagtactatggaagattccaagcaaagaattgcgcgtgcgcctgactcttccgcactcaattagaagtgattcagaggatatatgcctgtttaccaaagacgaacctaattcaacacccgagaagactgaacagttctaccgcaagctcctcaacaagcacgggatcaagaccgtgtcacagattatttctctgcaaaccctaaaaaaggaatataaaagctacgaggcgaagctgaggctactctcctcttttgacttctttctgacagacgcccgaatccgaagactgttgccatcactcataggtcgccatttttaccagaggaagaaggtgcccgtcagtgtcaatctgctgtcgaagaacctgtcacgagagattaatgactgcattggcgggaccgttctgaacatcagcaaaagcggcagctgctccgcaattaggatcgggcacgttggaatgcaaattgagcatattattgaaaatatcgtggccgtgactaaaggtctcagcgagaagcttccagaatgggaatccgtcaaattgctattcgttaagaccgagaagagtgcagcactgccaattttctcttcttttgtatcgaattgggacgaagccactaaacgttccctgctcaacaagaaaaagaaagaagcaagaagaaaaagacgcgagcggaacttcgagaaacaaaaggagcggaagaaaaaacggcaacaggccaggaaaaccgcttctgtgctctctaaggatgacgtggctccagaatcgggcgacacaacagtgaaaaaaccagagagcaagaaggagcagacacccgaacatggaaaaaaaaagagaggtagaggcaaagctcaggtgaaagctaccaacgagtcagaggacgaaattccccaactggtgcccattgggaagaagacccctgcaaatgaaaaagtggagatccagaagcacgccacgggaaagaagtcaccagccaaaagtcccaaccctagtaccccaaggggcaaaaagcgaaaggcactgcccgccagtgagacccctaaggccgcagaatcagagacgcctggaaagtcccctgaaaaaaagccgaaaatcaaggaagaggctgtgaaggagaaatcaccaagcctgggaaaaaaagatgcccggcaaactcctaaaaaaccagaagccaagttcttcactacgccttcaaagtctgtgaggaaagctagtcacacaccaaaaaaatggcccaagaagccaaaagttcctcagagcacgtag

SEQ ID NO: 187684 - DNA, 1994 bp, Artificial Sequence
  derived and/or modified sequence
ggcttgctcgcgcgtgcgcaccagaagccagcagtggggttgcacacgcgcctcttcacgaggtggaaacaagatggaggattcggcctcggcctcgctgtcttctgcagccgctactggaacctccacctcgactccagcggccccgacagcacggaagcagctggataaagaacaggttagaaaggcagtggacgctctcttgacgcattgcaagtccaggaaaaacaattatgggttgcttttgaatgagaatgaaagtttatttttaatggtggtattatggaaaattccaagtaaagaactgagggtcagattgaccttgcctcatagtattcgatcagattcagaagatatctgtttatttacgaaggatgaacccaattcaactcctgaaaagacagaacagttttatagaaagcttttaaacaagcatggaattaaaaccgtttctcagattatctccctccaaactctaaagaaggaatataaatcctatgaagccaagctccgccttctgagcagttttgatttcttccttactgatgccagaattaggcggctcttaccctcactcattgggagacatttctatcaaagaaagaaagttccagtatctgtaaaccttctgtccaagaatttatcaagagagatcaatgactgtataggtggaacagtcttaaacatttctaaaagtggttcttgcagtgctatacgtattggtcacgttggaatgcaaattgagcacatcattgaaaacattgttgctgtcaccaaaggactttcagaaaaattgccagagaagtgggagagcgtgaaactcctgtttgtgaaaactgagaaatcggctgcacttcccatcttttcctcgtttgtcagcaattgggatgaagccaccaaaagatctttgcttaataagaagaaaaaagaggcaaggagaaaacgaagagaaagaaattttgaaaaacaaaaggagaggaagaagaagaggcagcaggctaggaagactgcatcagttcttagtaaagatgatgtggcacctgaaagtggtgatactacagtgaagaaacctgaatcaaagaaggaacagaccccagagcatgggaagaaaaaacgtggcagaggaaaagcccaagttaaagcaacaaatgaatccgaagacgaaatcccacagctggtaccaataggaaagaagactccagctaatgaaaaagtagagattcaaaaacatgccacaggaaagaagtctccagcaaagagtcctaatcccagcacacctcgtgggaagaaaagaaaggctttgccagcatctgagaccccaaaagctgcagagtctgagaccccagggaaaagcccagagaagaagccaaaaatcaaagaagaggcagtgaaggaaaaaagtccttcgctggggaaaaaagatgcgagacagactccaaaaaagccagaggccaagtttttcaccactcctagtaaatctgtgagaaaagcttcccacacccccaaaaaatggcccaaaaaacccaaagtaccccagtcgacctaaagtcagtgattcaactggaaggaaacctcaatgctgcctccagagctttttggaaatactcagatcctggccgcctttgtaaccttctctaaacgtcaggcctggacttaaaagattttttaaaacctccataagtagtccaggggcggtggctcacgcctgtaatcccagcactttgggaggccgaggcaggcggatcacaaggtcaacgagatcgagaccatcctggccaacatggtgaaaccctgtctgtaccaaaaatacaaaaattaattgggcatggtggtggacacctgtaatcccagctactagggaggctgaggcaggagaattgcttgaacctgggaggcggaggttgcagtgagccactgcactccagcctgatgacagagcaagactcagtctcaaaaataaataaaaataataaaacctccataagtaatcctga

SEQ ID NO: 187685 - DNA, 1473 bp, Artificial Sequence
  derived and/or modified sequence
atggaggacagcgccagcgccagcctgagcagcgccgccgccaccggtactagtacgagtacaccagcggctccaacagcccgcaagcaactcgataaggaacaggtccgcaaagcggttgacgccctcctgacccactgtaagtctcggaagaataactatggtctgttgctcaatgagaatgagtcactcttcctgatggtggtattgtggaagattcctagtaaagagttgcgcgtgaggctcacattgcctcacagtattaggagtgatagcgaggatatatgcctgttcactaaggacgaacccaattccactcctgagaaaacagagcagttctaccgcaagctgctgaacaaacatgggattaagacagtttctcaaatcatttcgctccagactttaaagaaggaatataaaagttacgaggcaaagttgcgcctgctgtcaagtttcgatttctttctgactgatgccaggatcagacggttgttgccctctttgatcggccggcacttctatcagaggaaaaaggtcccggtgtcggttaacctgctcagcaagaaccttagccgcgaaatcaatgactgcattggcggaacggtgctgaatatcagcaagagcgggtcttgcagtgctatcaggataggacatgttggaatgcagattgagcacataatagaaaacattgtggctgtgactaaggggctatctgagaaactaccagagaagtgggagtcagtgaagctgttatttgtcaagaccgagaaatcagctgcccttcctatattctcatccttcgtgtccaattgggatgaagccacaaagcggtccctcttgaataagaagaagaaggaggcccgtaggaagagaagagaacgaaattttgaaaaacaaaaagaacgaaaaaaaaaacgacagcaggccagaaagacggcgagtgtgttatctaaagatgacgtggctcctgagtctggggacactacagtgaaaaagcccgaatctaagaaagagcagactcccgaacacggaaaaaagaagcgcggccgcggcaaagcacaggtgaaggcgacaaacgaatccgaggacgagataccacagctggttcccattggcaagaagacccccgcgaatgagaaagtcgagatccagaagcatgctacaggcaagaaatctcccgccaagagtcctaaccctagtacccccagggggaagaagcgaaaggcacttcccgcttccgagacacccaaggctgcagagagcgagacgccaggaaagagccctgaaaagaagcctaagatcaaggaagaagctgtgaaagagaagtcaccctctcttggtaaaaaggacgctcggcaaaccccaaaaaaacccgaagctaaattctttactacgccttcaaagtccgtgcgcaaggcctcccatacccccaaaaagtggccgaagaagcctaaggttccccagagcacttag

SEQ ID NO: 187686 - DNA, 813 bp, Artificial Sequence
  derived and/or modified sequence
atgcagatcgagcacatcatcgagaacatcgtggccgtgaccaagggcctaagcgaaaagctgcctgagaagtgggaatcggtcaagctgctgtttgttaagaccgagaaatccgccgctttgccaattttctcgagcttcgtgtctaactgggacgaggccacgaaaagatctcttttgaacaaaaagaaaaaggaagctagaaggaaaagacgcgagagaaattttgaaaaacagaaggagagaaagaagaaacggcaacaggctcgaaaaactgccagtgttctgtccaaggatgacgtggctccagaatctggagataccacagtgaagaagcccgagtccaaaaaggagcagacgcctgaacatggaaagaagaagcgaggacgcggcaaggcccaggtcaaggccaccaatgagtctgaggacgaaatccctcaattagttcctattggtaagaagacccctgcgaacgaaaaggtggaaatccagaagcatgctacagggaagaaatctcccgctaagtcgccaaacccctccactccacgggggaaaaagcgcaaggctttacccgcatccgaaacacccaaggcagctgaaagtgagactcctggtaaatctccagagaagaaaccaaagattaaggaggaggcggtcaaagagaaaagccctagcctaggaaaaaaagacgccagacagacgccaaaaaagccggaggccaaattcttcacgactccctcgaagtctgtgcgaaaagctagtcacacccccaagaagtggccgaaaaagcccaaggttccccagagcacttag

SEQ ID NO: 187687 - DNA, 1473 bp, Artificial Sequence
  derived and/or modified sequence
atggaggacagcgccagcgccagcctgagcagcgccgccgccaccggcacttcaacatcaacacctgcagccccaaccgcacgaaaacagttggacaaggagcaggtacgcaaggctgttgacgctctcctgacccactgcaagagcaggaaaaacaactacgggctgttgctaaacgaaaatgaaagtctcttcctcatggtggttctgtggaagattcccagtaaggagcttcgagtacgactgactcttccccacagtatccggtccgattccgaagacatttgtctatttaccaaagacgagccaaactcaacccctgagaaaaccgagcaattttatcgaaagctgcttaacaagcacggaattaagaccgtgagtcagatcatatctctccagacacttaagaaggaatataaatcttacgaggctaaacttcggctgttgtcctcttttgatttcttcctcaccgacgcccggatccggaggctgctcccctcactcattggccgacatttttaccagcgcaaaaaggtgccagtttctgtgaatttactttccaagaacctcagccgggagatcaacgactgtatcggtgggacagttctgaatatctctaaatcaggaagttgcagcgcgatcaggatcggccatgttggaatgcaaatcgagcacataatcgagaacatcgtcgctgtgaccaagggactgtccgagaaactgccagagaaatgggaatcggtcaagttactgttcgtgaagacagaaaaatctgcagccctgcccatcttcagctcttttgtctctaactgggacgaagccactaagagatctctattgaataaaaaaaagaaagaggctcggcgcaaaagacgcgagagaaatttcgagaagcagaaagagcgaaaaaagaaacgacagcaggcacgcaaaacagcgagcgtcctctccaaggacgatgtcgcgcctgagtctggcgacaccactgtcaaaaaaccggagtctaagaaggagcaaaccccagaacacggaaagaagaaacgcggcagaggaaaagcgcaggtgaaggctacaaacgagagcgaagatgagatcccacagctagtaccgatcggaaaaaaaactccagcgaacgagaaagtcgaaatacagaagcatgcaacggggaagaagtcccctgcaaagtcccctaacccatctactccaagaggcaagaaaagaaaggcactgccagcctccgaaaccccgaaagcagctgagtcggagaccccaggaaagagtccagagaagaagccaaagattaaggaggaggccgtcaaagagaagtctccatctctgggcaagaaagatgcccgacagacccctaaaaagcctgaggcgaagtttttcactacgcctagtaaatctgtgaggaaagcttcgcacacgccgaagaaatggcctaagaaacctaaagtgccccagtccacctag

SEQ ID NO: 187688 - DNA, 1470 bp, Artificial Sequence
  derived and/or modified sequence
atggaagattctgccagcgcctctctctcgtcggctgcagccacgggaacatcgacctctacacctgccgcacctactgccagaaagcagttggataaggaacaggtgaggaaagctgtggacgcccttttgactcactgcaagtctagaaagaacaattatggtctgttattgaatgagaacgagagcctcttcctgatggtggtgctctggaaaatcccaagcaaggagctaagggtgagacttaccctgccacactccattcggtcagattccgaagacatttgtttattcactaaggacgagccgaactctacccctgaaaagactgaacagttctaccggaagttgctcaataagcacggaattaagactgtgtcccagatcatctcattgcagaccttaaagaaggagtataaaagctacgaggcaaaactgaggttgctgagctctttcgacttcttcctgaccgatgccaggataaggcgtttattgccaagcctgatcggccgacatttctaccaacgcaagaaggtccctgtgagtgttaatctcctttctaagaacctttccagggagattaatgattgtattggtggcactgtgctgaacatttcaaagagcgggtcctgctccgcaatcagaattggccacgttggaatgcagatcgaacacattatagagaacatcgtagcagtcaccaaaggtctcagcgaaaaactccccgagtgggaaagcgtgaagctgttattcgtgaagactgagaagtccgctgccttgcccatcttttcttccttcgtgagcaactgggatgaagcaacaaagagatctctgctgaataaaaagaagaaagaggcccgtcggaaacgcagagagagaaactttgaaaaacagaaggagcggaagaagaaaagacagcaagctaggaagacggctagcgtcttgtcaaaggatgatgtcgctccagagtcgggcgatactaccgtaaaaaaacccgagagcaagaaagaacaaacgcccgagcacggcaaaaagaagagaggcagaggtaaggcccaggtcaaagccacaaacgaaagcgaggatgagatcccacagctagtacccataggtaagaaaacgccagccaacgagaaagtggagatccagaagcacgcaacaggcaaaaagtcaccagccaagagccccaacccttccaccccgagggggaaaaaaagaaaagcactgcccgctagcgaaactccgaaggccgctgaatccgagacccctggaaaaagcccggaaaagaaacctaaaatcaaagaagaagcagtcaaggagaaatccccttccctgggaaagaaggatgccagacagaccccgaagaagccggaggccaaattttttacaactcccagtaaatctgtacggaaagcgagccatacccctaagaaatggccaaagaagcccaaggtgcctcagtctacctag

SEQ ID NO: 187689 - DNA, 1473 bp, Artificial Sequence
  derived and/or modified sequence
atggaggattccgccagcgccagcttaagtagtgcagctgctactggcaccagtacgagcactccagctgccccaactgcaagaaaacagctggataaagagcaagtgcggaaggccgttgatgccctgctgacccactgcaaatcccgaaagaataactacggcctcttgctgaacgagaatgaatctctgttcctgatggtggtgctgtggaagataccgtccaaagagctgcgcgtgcggcttactcttccacactccatccgatccgattccgaagacatctgtctgttcacaaaagacgagcccaactccacccccgaaaagacagagcaattctatcgcaagctactgaacaaacatggaattaaaaccgtttcgcaaatcatctccctccagactttgaaaaaggagtataagagctacgaggcgaagctgcgtctgctgagctcctttgatttctttctgacggacgccaggattcgtagacttctaccgtcgctgattgggaggcacttctatcagaggaaaaaggtgcccgtctctgtgaacctgcttagcaagaacctgtccagggaaattaacgactgcatcggcggtactgtgctgaatatctccaagtcggggagttgctctgcaattagaatcggacatgtgggtatgcagatcgaacacattattgaaaacatcgtggctgtgactaaaggcctctccgagaaacttcccgagaaatgggagagcgtcaaactgctgttcgtcaagacagagaagtcagccgcactcccaattttctctagttttgtgtctaactgggatgaagccacaaagcggagcctcctgaacaagaaaaaaaaggaggctcgtcgtaagcgacgtgagcggaattttgagaaacagaaggaacggaaaaagaaaagacagcaagcaagaaagactgcctccgttctttcaaaagacgatgtggctccggaatctggcgacactaccgtgaaaaagcctgagtcaaaaaaggagcagacccccgagcacggaaaaaaaaaaagagggagaggcaaggcacaagtgaaggctaccaacgaatctgaagatgaaattccgcagctggttcccatcgggaagaagactccggctaatgagaaggttgagatccagaagcatgcaaccggcaaaaagtcaccagcgaaatcccccaatccaagtacccctaggggaaaaaagcggaaagcgctgccagcatctgaaactcccaaggctgcggaatctgaaactccaggcaaatcacccgagaaaaagcctaaaattaaggaggaggcagtgaaggagaaatccccttctctgggcaaaaaggatgctaggcagacaccgaagaagccagaggctaaattctttacaaccccctcgaagtctgttaggaaggcatcccacacccccaaaaagtggccaaagaaacctaaagtcccacaatccacatag

SEQ ID NO: 187690 - DNA, 813 bp, Artificial Sequence
  derived and/or modified sequence
atgcagatcgagcatataattgaaaatatcgtggctgtaaccaaggggctcagtgaaaagttgccagagaagtgggagagtgtgaagttacttttcgtcaaaactgaaaagagtgccgctctgcccatcttttcttcattcgtctcaaactgggacgaagcaacaaagcgatcactgttgaataaaaagaagaaggaggctaggaggaagaggcgggagagaaatttcgagaagcaaaaggagcggaagaagaagcgacagcaggctagaaaaacagcctccgtgctgtccaaagacgatgtggctcctgagagcggcgatacaaccgtaaaaaagcccgaaagtaagaaagaacagaccccagagcacggcaagaaaaagcggggaagaggcaaggctcaggtgaaagccaccaatgagtctgaagacgagatcccccaactggtccctattggaaagaagacaccagcaaatgaaaaagttgagattcaaaagcatgccaccgggaagaagtctcctgcaaaatcacccaacccatctactccgaggggtaagaagcgcaaagccctgcctgcaagtgagacaccaaaggccgcagagtccgagacgccgggaaagtcaccggagaagaaacctaagattaaagaggaggccgtcaaggaaaagtctccttccctgggcaagaaggacgccaggcagacacccaagaaacccgaggccaaattctttactaccccctcgaaatccgtgagaaaggccagccacactcctaagaagtggcccaaaaagccaaaggttccccagtcaacgtag

SEQ ID NO: 187691 - DNA, 1473 bp, Artificial Sequence
  derived and/or modified sequence
atggaagattcggcctctgccagtctcagcagcgccgcagccaccggaacgtccacaagcacaccagccgcacctacagcacggaagcaactcgataaagagcaggtgcgaaaggctgtcgatgcgctgctgactcattgcaagtctcgcaagaacaattacgggttgctactcaatgaaaacgagagtcttttcctaatggtggttctgtggaaaattccttccaaagaactacgcgtgcggttaactttaccacacagtattagatccgactctgaagatatttgcctctttactaaggacgagccaaattcaaccccagagaagacagagcaattctaccggaagctgttgaataagcacggtattaagaccgtgtcacagataatttcattgcagactctgaagaaggagtacaaaagctatgaagccaagctgaggcttctgtcatctttcgacttctttctcacagatgcacggatcaggcgtctgttaccatccctgattggacgacatttttaccagagaaaaaaggtaccagtctccgtaaacctcttaagtaagaacctctctcgcgagatcaacgactgcattgggggaactgtcctaaatatttccaagtctggtagctgcagcgcaatacgcattggccacgtggggatgcagattgagcatattattgagaatatcgtggccgttactaaggggctgtccgagaaacttcccgagaagtgggagtccgtgaaactgttgtttgttaagactgaaaagtcagccgctctccctatttttagttcatttgtgtccaactgggatgaggccaccaaaagaagcctgctcaacaagaaaaagaaggaggctcgccgaaagcggagggaacgcaacttcgagaaacagaaagaacgcaagaaaaaaaggcaacaggcgcgtaaaaccgcctctgtgctgtcaaaagacgacgtggcccctgagtccggggacactacagtgaaaaagcccgagagcaaaaaggaacagactcctgaacacggtaaaaagaaacgaggcaggggcaaagcacaggtcaaagcaaccaacgagtctgaggacgaaatcccacagctcgtgcccatcggcaagaagactcccgctaatgaaaaggttgagattcagaagcatgcaaccgggaaaaaaagccccgcaaagtccccgaacccctccacaccacgcggaaaaaagcgcaaagcactgcccgctagcgaaaccccaaaagcagctgagtccgaaacccccggtaagagcccggaaaaaaaacccaaaattaaagaagaggccgtcaaggagaagtccccgagtctgggaaaaaaggacgcacgtcagactccaaagaaaccagaggccaaattctttaccacccctagtaaatctgtgcgtaaagcctcacacacgcccaaaaagtggcctaaaaagcctaaagtcccccagtccacttag

SEQ ID NO: 187692 - DNA, 1470 bp, Artificial Sequence
  derived and/or modified sequence
gctcgcgcgtgcgcaccagaagccagcagtggggttgcacacgcgcctcttcacgaggtggaaacaagatggaggattcggcctcggcctcgctgtcttctgcagccgctactggaacctccacctcgactccagcggccccgacagcacggaagcagctggataaagaacaggaccttgcctcatagtattcgatcagattcagaagatatctgtttatttacgaaggatgaacccaattcaactcctgaaaagacagaacagttttatagaaagcttttaaacaagcatggaattaaaaccgtttctcagattatctccctccaaactctaaagaaggaatataaatcctatgaagccaagctccgccttctgagcagttttgatttcttccttactgatgccagaattaggcggctcttaccctcactcattgggagacatttctatcaaagaaagaaagttccagtatctgtaaaccttctgtccaagaatttatcaagagagatcaatgactgtataggtggaacagtcttaaacatttctaaaagtggttcttgcagtgctatacgtattggtcacgttggaatgcaaattgagcacatcattgaaaacattgttgctgtcaccaaaggactttcagaaaaattgccagagaagtgggagagcgtgaaactcctgtttgtgaaaactgagaaatcggctgcacttcccatcttttcctcgtttgtcagcaattgggatgaagccaccaaaagatctttgcttaataagaagaaaaaagaggcaaggagaaaacgaagagaaagaaattttgaaaaacaaaaggagaggaagaagaagaggcagcaggctaggaagactgcatcagttcttagtaaagatgatgtggcacctgaaagtggtgatactacagtgaagaaacctgaatcaaagaaggaacagaccccagagcatgggaagaaaaaacgtggcagaggaaaagcccaagttaaagcaacaaatgaatccgaagacgaaatcccacagctggtaccaataggaaagaagactccagctaatgaaaaagtagagattcaaaaacatgccacaggaaagaagtctccagcaaagagtcctaatcccagcacacctcgtgggaagaaaagaaaggctttgccagcatctgagaccccaaaagctgcagagtctgagaccccagggaaaagcccagagaagaagccaaaaatcaaagaagaggcagtgaaggaaaaaagtccttcgctggggaaaaaagatgcgagacagactccaaaaaagccagaggccaagtttttcaccactcctagtaaatctgtgagaaaagcttcccacacccccaaaaaatggcccaaaaaacccaaagtaccccagtcgacctaaagtcagtgattcaactggaaggaaacctcaatgctgcctccagagctttttggaaatactcagatcctg

SEQ ID NO: 187693 - DNA, 4134 bp, Artificial Sequence
  derived and/or modified sequence
ggcttgctcgcgcgtgcgcaccagaagccagcagtggggttgcacacgcgcctcttcacgaggtggaaacaagatggaggattcggcctcggcctcgctgtcttctgcagccgctactggaacctccacctcgactccagcggccccgacagcacggaagcagctggataaagaacaggttagaaaggcagtggacgctctcttgacgcattgcaagtccaggaaaaacaattatgggttgcttttgaatgagaatgaaagtttatttttaatggtggtattatggaaaattccaagtaaagaactgagggtcagattgaccttgcctcatagtattcgatcagattcagaagatatctgtttatttacgaaggatgaacccaattcaactcctgaaaagacagaacagttttatagaaagcttttaaacaagcatggaattaaaaccgtttctcagattatctccctccaaactctaaagaaggaatataaatcctatgaagccaagctccgccttctgagcagttttgatttcttccttactgatgccagaattaggcggctcttaccctcactcattgggagacatttctatcaaagaaagaaagttccagtatctgtaaaccttctgtccaagaatttatcaagagagatcaatgactgtataggtggaacagtcttaaacatttctaaaagtggttcttgcagtgctatacgtattggtcacgttggaatgcaaattgagcacatcattgaaaacattgttgctgtcaccaaaggactttcagaaaaattgccagagaagtgggagagcgtgaaactcctgtttgtgaaaactgagaaatcggctgcacttcccatcttttcctcgtttgtcagcaattgggatgaagccaccaaaagatctttgcttaataagaagaaaaaagaggcaaggagaaaacgaagagaaagaaattttgaaaaacaaaaggagaggaagaagaagaggcagcaggctaggaagactgcatcagttcttagtaaagatgatgtggcacctgaaagtggtgatactacagtgaagaaacctgaatcaaagaaggaacagaccccagagcatgggaagaaaaaacgtggcagaggaaaagcccaagttaaagcaacaaatgaatccgaagacgaaatcccacagctggtaccaataggaaagaagactccagctaatgaaaaagtagagattcaaaaacatgccacaggaaagaagtctccagcaaagagtcctaatcccagcacacctcgtgggaagaaaagaaaggctttgccagcatctgagaccccaaaagctgcagagtctgagaccccagggaaaagcccagagaagaagccaaaaatcaaagaagaggcagtgaaggaaaaaagtccttcgctggggaaaaaagatgcgagacagactccaaaaaagccagaggccaagtttttcaccactcctagtaaatctgtgagaaaagcttcccacacccccaaaaaatggcccaaaaaacccaaagtaccccagtcgacctaaagtcagtgattcaactggaaggaaacctcaatgctgcctccagagctttttggaaatactcagatcctggccgcctttgtaaccttctctaaacgtcaggcctggacttaaaagattttttaaaacctccataagtagtccaggggcggtggctcacgcctgtaatcccagcactttgggaggccgaggcaggcggatcacaaggtcaacgagatcgagaccatcctggccaacatggtgaaaccctgtctgtaccaaaaatacaaaaattaattgggcatggtggtggacacctgtaatcccagctactagggaggctgaggcaggagaattgcttgaacctgggaggcggaggttgcagtgagccactgcactccagcctgatgacagagcaagactcagtctcaaaaataaataaaaataataaaacctccataagtaatcctgacatatgttcctgggtataatctgtttctaaattgtccttctgtgtatttgctaatgtaatagagggaaaaatagagtgcttctctgtggttgttcagcactttaggtagccaaggtgagaggattgcttgaggccaggagtttgagactagcctgggcaacttggtaaaaccccatctctacaaaagaaaaaaaaaaattagtgtggcatggtggcatgcatctgtgctcccagctcctcacgaggctgaggtggaaggatcaagtgagcgcaagaggttgaggctccagtgagccacgatcaccccactgtgctgtagcctgggtgacagtgtgagattctgtctcagaaaaaacaaagtataacattgctttgcttctgagtatactgttggctttccaaatcagtgggtctgacttgaggtctgtgatgtgacccttttcctcacctgctcaaccattattcacatggactccatcatattcatttgtagtcattcccagagtggcccagtgagggtctcgctgtatgagagtcggctacggaatttaggagaaacagaagtttcttggctttcatgctgagcttgttggtctaagcttatgagtcactggattagcatccatatgggaagggaaattaacatggagtcatttatacagggactaaattgaatcctacctaccggaggcaagaacatgatttatcttccataagccttatcctcttcctccttattcctcagtccatatggatttgcttatgtatgacaactccaaggaatcttggaagagtagattgctaacgtttccacaattgtcaagtatattctgaggcagtaaacacctttttaggtacgtggcctttcactggttgtgaattggtatgcatccgtagtagtaagttcacagattcactgcagtgcaggaatgttcttgcatgccaaagactcaactgctttcaaagataatgtgggtgctagatgcagtggcttacatctgtaaccctgttagggtgaccagacccaacaccaggtcgtgggggtgacaaagtccagtggagtcaaaggattgagaaaaagacagtttgagagagaagtaggaccagcagaccatcgggatggtggaggctgtgaaggccgtgagctctgggagcccacactatttattggtaatccaacaaagaaacagatggtgagaatgtgaaggtcagaagggcaccttgcattaagcacatgatttacagctgtgatggtttagcatttgctctgctacttgagatgatggagagcaggttcttttaactcaagttacagtcgatcctgggagagcaaggagccagcaagtctagacattccagagccacaggccctggattttatccaagccacgagggattttatgccctgggcttagattatggtgcgtcagggcagccttccaccctttagcacagagcttggtgttccaaagaccacaaggggttttagacccttgaccctggacatattccaagactcttttacattatgtcagaatgcaagccctgcctcagcttctcccaacactcagcttttcgcaacataatcccagcactttggaacgctgggtggattgcttgaacccaggagttcgagaccatcctgggcaatatggcaaaaccccatctttaccaaaaataagctgggtgtggtggaacatgcctgtggtcccagcttcttgggaggctgaggtgggaggattgcttgaacccgggaggtagaggctgcaatgggccatgatcacgatcctgcactccagcctgggcaacagagagagacagtccctggcccactgcccccttccctggcccagtctcaaaaaaaatgaggctgggcgtggtggctcacatctgtaatcccagccaaggctggcagatcacttgaggccaggagttctgagaccagcctggcttacatggtgaaaccccatctctactaaaaatacaaaaactagccaggcatggtgggaggcacctgtaatcccagctacttgggaggctgaagcaggagaatcactttaacccgggaggtggaggttgcagtgagctgagatcacaccactgcactccagcctgggcggcagagcaaaactgaaaaaaa

SEQ ID NO: 187694 - protein, 1749 aa, Artificial Sequence
  derived and/or modified sequence
MHLKHLRTLLSPQDGAAKVTCMAWSQNNAKFAVCTVDRVVLLYDEHGERRDKFSTKPADMKYGRKSYMVKGMAFSPDSTKIAIGQTDNIIYVYKIGEDWGDKKVICNKFIQTSAVTCLQWPAEYIIVFGLAEGKVRLANTKTNKSSTIYGTESYVVSLTTNCSGKGILSGHADGTIVRYFFDDEGSGESQGKLVNHPCPPYALAWATNSIVAAGCDRKIVAYGKEGHMLQTFDYSRDPQEREFTTAVSSPGGQSVVLGSYDRLRVFNWIPRRSIWEEAKPKEITNLYTITALAWKRDGSRLCVGTLCGGVEQFDCCLRRSIYKNKFELTYVGPSQVIVKNLSSGTRVVLKSHYGYEVEEVKILGKERYLVAHTSETLLLGDLNTNRLSEIAWQGSGGNEKYFFENENVCMIFNAGELTLVEYGNNDTLGSVRTEFMNPHLISVRINERCQRGTEDNKKLAYLIDIKTIAIVDLIGGYNIGTVSHESRVDWLELNETGHKLLFRDRKLRLHLYDIESCSKTMILNFCSYMQWVPGSDVLVAQNRNSLCVWYNIEAPERVTMFTIRGDVIGLERGGGKTEVMVMEGVTTVAYTLDEGLIEFGTAIDDGNYIRATAFLETLEMTPETEAMWKTLSKLALEARQLHIAERCFSALGQVAKARFLHETNEIADQVSREYGGEGTDFYQVRARLAMLEKNYKLAEMIFLEQNAVEEAMGMYQELHRWDECIAVAEAKGHPALEKLRRSYYQWLMDTQQEERAGELQESQGDGLAAISLYLKAGLPAKAARLVLTREELLANTELVEHITAALIKGELYERAGDLFEKIHNPQKALECYRKGNAFMKAVELARLAFPVEVVKLEEAWGDHLVQQKQLDAAINHYIEARCSIKAIEAALGARQWKKAIYILDLQDRNTASKYYPLVAQHYASLQEYEIAEELYTKGDRTKDAIDMYTQAGRWEQAHKLAMKCMRPEDVSVLYITQAQEMEKQGKYREAERLYVTVQEPDLAITMYKKHKLYDDMIRLVGKHHPDLLSDTHLHLGKELEAEGRLQEAEYHYLEAQEWKATVNMYRASGLWEEAYRVARTQGGANAHKHVAYLWAKSLGGEAAVRLLNKLGLLEAAVDHAADNCSFEFAFELSRLALKHKTPEVHLKYAMFLEDEGKFEEAEAEFIRAGKPKEAVLMFVHNQDWEAAQRVAEAHDPDSVAEVLVGQARGALEEKDFQKAEGLLLRAQRPGLALNYYKEAGLWSDALRICKDYVPSQLEALQEEYEREATKKGARGVEGFVEQARHWEQAGEYSRAVDCYLKVRDSGNSGLAEKCWMKAAELSIKFLPPQRNMEVVLAVGPQLIGIGKHSAAAELYLNLDLVKEAIDAFIEGEEWNKAKRVAKELDPRYEDYVDQHYKEFLKNQGKVDSLVGVDVIAALDLYVEQGQWDKCIETATKQNYKILHKYVALYATHLIREGSSAQALALYVQHGAPANPQNFNIYKRIFTDMVSSPGTNCAEAYHSWADLRDVLFNLCENLVKSSEANSPAHEEFKTMLLIAHYYATRSAAQSVKQLETVAARLSVSLLRHTQLLPVDKAFYEAGIAAKAVGWDNMAFIFLNRFLDLTDAIEEGTLDGLDHSDFQDTDIPFEVPLPAKQHVPEAEREEVRDWVLTVSMDQRLEQVLPRDERGAYEASLVAASTGVRALPCLITGYPILRNKIEFKRPGKAANKDNWNKFLMAIKTSHSPVCQDVLKFISQWCGGLPSTSFSFQ

SEQ ID NO: 187695 - DNA, 5084 bp, Artificial Sequence
  derived and/or modified sequence
gagaagattggggtgacaagaaagtcatctgcaacaagttcatccagacgagtgctgtcacttgtctgcaatggccggcagaatacatcattgtctttggactggctgaagggaaggttcgtttagcaaacaccaaaactaataaatcatctaccatctatgggacagagtcttacgtggtgtccctgacaacaaattgctctgggaaaggaattctctctggtcatgcagatggtaccatcgttaggtatttctttgatgatgaaggctctggagagtcacaggggaagttggttaaccacccgtgtccaccctatgccttggcatgggcaaccaatagcatcgtggctgcaggctgtgatcggaaaattgtagcctatggaaaagaaggtcacatgctacaaacttttgattatagccgtgaccctcaggagcgggagttcaccacagctgtatcaagtcctgggggccagtctgttgtgctaggaagttatgacaggcttcgggtgttcaactggatccctcgaagaagcatctgggaagaggcaaagcccaaggagattaccaatttatacaccatcactgccttggcctggaagcgggatggctcacggctctgtgtgggcacactatgtggtggggtggaacagtttgactgctgcctccgaaggagtatttacaagaacaagtttgagttgacgtatgtgggacctagccaggtgattgtgaagaacctgtcatcaggaacccgagtggtgctcaagtcacactatggctatgaggtggaagaggtgaaaatcctaggaaaggaacgttacttggtggctcacacatcagaaacactgctgctgggggacctgaacactaatcggcttagtgagatagcctggcaaggatctggtggcaatgagaagtatttctttgaaaatgagaatgtatgcatgatcttcaatgccggagagctaaccctggtggaatatgggaataatgacaccctgggttctgtacgcactgaattcatgaacccccacctcatcagtgttcgtattaatgagaggtgtcagcgaggaacagaagataataagaaattggcttatcttattgatattaagactattgctatagtggatctgattggtggctacaacattggcaccgtcagccatgagagccgtgtggattggctggaacttaatgagactggacacaagctcctcttcagggaccggaaacttcgtttgcatctgtatgatattgaaagctgctctaagacaatgatcctcaacttctgctcctatatgcagtgggtcccaggaagtgacgtgctggtagctcagaaccgaaacagtctgtgtgtatggtacaacattgaggcacctgagagagtcaccatgttcactattaggggtgatgttataggtctggagcggggcgggggaaagaccgaggtgatggtgatggaaggtgtgactactgttgcctacacattggatgagggcctcatcgagtttggaacagccattgatgatggcaactacatccgggcaacagccttcttagagactctggaaatgaccccagaaacagaggcaatgtggaaaaccttgagtaaactggcactagaggcaaggcaactacacattgcggagaggtgcttttctgctttgggccaagtagcaaaagctcgattcctgcatgagaccaatgagattgcagatcaagtatcccgggaatatggcggagaaggaacagacttttatcaggtccgagcacgtctagccatgctggaaaagaactacaaactggctgaaatgatctttttggaacagaatgctgtggaggaggccatgggcatgtaccaggagctacaccgttgggatgagtgtatcgctgtggctgaagccaaggggcacccagccctggagaagctacgtcgtagttactaccagtggctgatggacacacagcaagaggagcgagcaggtgaactacaggagagccaaggggatgggctagcagccatcagcctctacctcaaagctgggctccctgccaaagctgctcggctggtgctgacccgagaggaactgctagccaacacagagctggtagaacacatcactgcagcccttatcaagggggaactctacgaaagggcaggtgatctctttgagaagattcacaatccacagaaggccctggagtgctaccgtaaaggcaacgcattcatgaaagcggtagagctggctcgattggccttcccagtggaggtggtgaaactagaggaggcatggggggaccacctggtgcagcagaagcagcttgatgcagccattaatcactacatcgaagccaggtgctccattaaggcaattgaggccgccctgggtgcccgccagtggaagaaggcaatttatatattagatctacaggaccggaacactgcatccaaatactatcctctcgtggcccaacactatgcatccctgcaggagtatgagattgctgaggagctctatactaagggagatcggacaaaagatgccatagacatgtacacccaggctggtcgttgggaacaagcccacaagctggcgatgaaatgcatgagaccagaagatgtgtcagtgctatacatcactcaggcccaggaaatggagaagcagggcaagtaccgtgaggctgaaaggctatatgtgacagtacaagagcctgatcttgccatcaccatgtacaaaaagcacaagttgtatgatgacatgatccgcctggtagggaagcaccatccagatctcctcagtgatacacacctacatctgggcaaggagctggaggctgaaggccgactacaggaggctgagtaccactacctcgaggcccaggaatggaaggcaacagtgaacatgtaccgggccagtgggctttgggaagaggcctacagggtggccagaactcaaggaggggctaatgcccacaaacacgtggcctatctgtgggcaaagagcctgggaggagaggctgcagttagactgcttaataagctgggactcctggaagctgctgttgaccacgctgcagacaattgctcctttgaatttgcgtttgaactctctcggctggccctcaagcacaaaacccccgaggttcatctcaaatatgctatgttcctggaggatgagggtaaattcgaagaggctgaagctgaattcatcagagctggtaaacccaaggaggcagtcctcatgtttgtccataaccaggattgggaggcagctcagcgtgtggctgaggctcacgaccctgacagtgtcgccgaggtgcttgtgggacaggcccggggggccttggaggagaaggactttcagaaagcagaagggctgctgctccgggcccagagaccaggcctggccctcaattattataaggaggctggattatggagtgacgctctgcgcatctgcaaggactatgtgcccagccagctggaggctctgcaggaagaatatgagcgggaagctactaagaagggggccaggggtgtggagggatttgtggaacaagctcgacactgggagcaggctggagagtacagccgtgccgtggactgctacctcaaagtgcgagactctggaaacagcggcctggcggagaagtgctggatgaaggcagctgaactctccatcaagtttctgcctccccaacgtaatatggaagtcgttctggctgtaggaccccagctgattggaattggaaagcacagtgcagctgcagagctctatctgaatctggaccttgtcaaggaagcaatcgatgctttcatcgagggtgaggagtggaacaaggcgaagcgtgtagctaaggagttagatcccaggtatgaagactatgtggaccagcattataaagagttcctcaagaatcagggcaaagtggactcgctggtgggtgtggatgtgatagctgctttggacctgtatgtggagcagggccagtgggacaagtgcattgaaacagctaccaagcagaactacaagattctgcacaagtatgtggctttgtatgcaactcacttgatccgggagggtagctctgcccaggcattggccctgtatgtacagcacggagcccctgctaacccacagaacttcaatatctacaaaaggatcttcactgacatggtgagctctcctggaaccaactgtgccgaggcctatcatagctgggctgatcttcgagatgtcctcttcaacctgtgtgaaaacctggtgaagtccagtgaggcaaactctccagcccatgaggagttcaagacgatgctgctgatcgctcattactatgccacgcgctctgcagcccagagtgtcaaacagctggaaaccgtggctgccaggctttctgtttcactcttgcgtcacacccagctactacctgtagacaaagccttctatgaagcaggcattgctgccaaggcagttggctgggataacatggcattcatcttcctcaatcgctttttggacctgaccgatgcaatcgaggaagggactctagatggccttgaccactctgattttcaggatacagacattccctttgaggtgccactcccagctaagcagcatgtaccggaggctgagagagaagaggttcgagactgggtgcttacagtctccatggaccagcggctggagcaggttctgcctcgggatgagcgtggcgcctacgaggcctccctagtggcagcgagcactggtgttcgagccctgccctgccttattacaggataccccattctgaggaacaaaattgaatttaagcggccagggaaggctgctaacaaggacaactggaataaattccttatggccatcaagacctcccacagcccagtgtgccaggacgtgctgaaattcatcagtcagtggtgtggagggctccccagcaccagcttttcctttcagtagttggtagagctgaggaagagttagggcctctccctcattaaagttttataaataaaaaaaaaaaaaaaaaaaaaaaaaaaaaaaaaaaaaaaaaaaaaaaaaaaaaaaaaaaaaaaaaaa

SEQ ID NO: 187696 - DNA, 5250 bp, Artificial Sequence
  derived and/or modified sequence
atgcatctgaaacacctgagaactttgctgagcccccaagatggcgctgccaaagtgacctgtatggcctggagccaaaacaacgctaagtttgctgtttgtactgtggatagggtggtgctgctgtacgatgaacacggtgaaagacgcgacaagttcagcacaaaacccgcggacatgaagtacggaagaaaatcatatatggtcaaaggcatggctttttcacctgacagcactaagattgctataggacaaactgataatataatctacgtttacaaaataggcgaagattggggcgataagaaggtcatatgtaacaagtttatacagacatccgcagtgacatgtctgcagtggcctgccgaatacatcatagtgtttgggttggctgaggggaaagttcgcctcgccaacaccaaaacaaacaagtcctcaacgatatacggcacagagtcatatgtcgtctccctgacaaccaattgcagtggtaaaggtattcttagtgggcacgcggacggtacaatcgtgcggtacttttttgacgatgagggatctggggaatcacagggaaagttggtgaaccacccctgccccccctacgccctggcttgggcaactaactctatcgtagcagccggttgtgatcggaaaatcgtggcctatggcaaggagggacacatgctacagacctttgactattccagggaccctcaggagagagagttcactaccgccgtgagcagccccggcggacagtccgtagtgctgggtagttacgacaggttgcgtgtgttcaactggattccccgcagatcaatctgggaggaggccaagcccaaagagatcacgaacctttacacgatcacagccttggcttggaagcgcgacggatccaggttatgcgttgggacgctgtgcggtggggtggagcagtttgattgttgcctccggaggtctatttataaaaacaaatttgaactaacatacgtgggaccctcccaggtgatcgtgaaaaacttgagctctgggacgagggtggtcctcaagagtcattacggatatgaagtggaagaggtgaagatcctcggaaaagagagatacctcgtcgcacatacttctgaaacactgttgctgggcgatctcaatacaaatcgcctcagtgagattgcatggcagggcagtggtggcaacgaaaaatattttttcgaaaacgaaaatgtgtgtatgatatttaacgctggcgaattgacactggtggagtatggtaataatgacacactgggatcagtgcggactgaatttatgaacccccaccttatctccgtcaggattaatgaacggtgccagcggggcacagaagataacaagaagctggcctaccttatcgatatcaaaactatcgctatcgtagatctgattgggggctacaatatcggaaccgtgtcacacgaatccagagtagattggctggagctcaacgagaccgggcataaactactattcagagataggaagttacgactgcatctctacgacatagaatcttgttccaaaacgatgattttgaacttttgctcttatatgcagtgggtgcccggcagtgatgtgctggtcgcccagaaccgcaatagtctctgcgtgtggtacaatattgaggcccctgagcgtgtgaccatgtttactattaggggggacgtcatcgggctcgagcgtggaggaggcaaaaccgaggtgatggtcatggagggtgtcacaactgtggcttacacattggatgaggggctcatcgaattcgggactgctatcgatgatggaaactatattagggctaccgcttttcttgagacactcgagatgacccccgagaccgaggccatgtggaaaaccttgagcaagctggctctggaggctaggcagctccatatcgctgagaggtgtttcagtgcccttggccaggtggccaaagctagatttctgcacgagaccaacgagatagccgaccaggtgtcacgagagtatggtggggaagggaccgatttttaccaggttcgtgcccggctagccatgctggagaagaactacaagcttgccgagatgatttttttagagcagaatgcggtcgaagaggctatgggcatgtatcaagaactgcacaggtgggacgagtgcattgctgtggccgaggctaaaggtcatcctgccctggaaaaactccggcggtcttattatcagtggttaatggacacgcaacaggaggaaagagcgggcgaactccaggagagccaaggcgatggactggccgcaatcagcttatacctgaaggccggattgcctgctaaggctgcaagactggtcctaactagggaagaattgctcgccaataccgaactcgtagagcacataaccgcggccctgatcaagggcgagctgtatgaacgggcaggggacttgtttgaaaagatacataacccccaaaaggccctggaatgctacaggaaggggaacgccttcatgaaggccgtagaactggccagactggcatttcctgtcgaggtggttaagctcgaagaagcctggggggaccatctggttcagcagaaacaattagacgccgcaatcaatcattacatcgaagcacgctgttcaattaaagctattgaggcggcccttggggctagacagtggaagaaagctatctatattctggacttgcaggaccgcaacaccgccagtaaatattaccccctcgtggcacagcactacgcctccctccaggagtacgagattgccgaagaactgtatacaaagggagatcgtacgaaggacgcaatcgatatgtacacgcaagcgggcagatgggagcaggcgcacaaactcgcaatgaagtgtatgcggccggaagatgtatcagtattgtatatcacccaggcgcaggagatggagaaacaggggaagtaccgagaggcggagaggctttacgtgacagtccaggagcccgatctagccattaccatgtacaaaaaacacaaattgtatgacgatatgataaggctcgtgggcaagcatcacccagacttgttgagtgatactcatctgcatctcggcaaagaactcgaagcagaggggaggttacaggaggccgaatatcattaccttgaagcccaggagtggaaagctaccgttaacatgtatagagcatctggattgtgggaggaagcatacagggtggcaagaacccagggcggagctaacgcacacaaacacgtcgcatacctctgggcaaaaagcctgggcggcgaagcagcagtgcggctgctgaataaattgggcctcttggaggctgctgtggatcacgccgctgataattgcagtttcgagtttgcgttcgagctgtccaggctggcactgaagcataagacgcctgaggtacatttgaaatatgccatgtttctcgaggacgaaggaaagttcgaggaggctgaggctgaattcatcagagctggaaagcccaaagaagccgttttgatgtttgtacacaatcaggattgggaggctgctcaaagggtggcagaggcgcatgatccagattccgttgctgaggtccttgttggtcaggctcggggcgccctggaggaaaaagactttcagaaagccgagggtctgcttctgagggcgcagcgcccaggcttagcactcaattattacaaagaggccggtctgtggagcgacgcactcaggatctgtaaggattacgtcccctcacagctggaggctctacaggaggagtacgaacgtgaggcgacaaagaaaggggcccgcggagtggaaggctttgtggagcaagcgcggcattgggagcaagccggcgaatattcacgggccgtggattgctacttgaaggtgagagattccggaaattcagggctggccgagaagtgctggatgaaggccgcagagctctctatcaagttcctgccaccccagaggaacatggaagtcgttttggccgtcggaccccagctgataggtatcggtaagcattctgccgccgctgagctgtacctgaatctcgacctcgtgaaggaggccatagacgcctttatcgaaggcgaggagtggaataaggcaaagcgtgtagcaaaagaactggatcccagatatgaggactacgtcgaccagcactacaaggaattcctgaagaaccaaggcaaagtagatagtcttgtgggagttgatgtcattgccgcgcttgatctctacgtcgaacagggccaatgggataagtgtatcgaaacagctaccaagcaaaattataaaatcctgcataagtatgtggccctgtatgcaacacatctgattagggagggaagttcagcacaggcacttgctttgtacgtgcagcatggagctcccgctaacccacagaactttaatatctataagcgcattttcacagatatggtatcttctcccggtacaaactgcgcagaagcatatcacagctgggccgacttgcgggacgtgctgttcaacctgtgtgagaatttggttaaatcatctgaagccaatagccccgcccacgaggaattcaaaaccatgctgctgattgcacattattatgctacacgctctgctgcgcagtccgtgaagcagttagagacggtggcagccaggttaagcgtgtcactgctccggcatacacaactgttacctgtagataaggcattttatgaggccggtatcgccgccaaggccgtgggatgggacaatatggcattcatctttctgaataggttcctggacctgaccgacgcgatcgaagaaggaacactggacggccttgaccacagcgacttccaggacaccgacattcctttcgaggtccctctcccagctaagcagcacgtgccggaggcagaaagggaagaggtcagagattgggtgctgaccgtgagtatggatcaacggctggaacaagttctgcccagggacgagcgtggcgcctacgaggcttccctcgtggcagcaagcacaggagtgcgtgccctgccttgcttgattaccgggtaccctatcctccggaataagatagaatttaaacgacccgggaaggccgctaataaagacaactggaataagtttctgatggctataaagacgtctcattctcccgtatgccaggacgtcctgaagtttatctcacaatggtgcggcggattgccaagcacctcgttctctttccagtag

SEQ ID NO: 187697 - DNA, 1536 bp, Artificial Sequence
  derived and/or modified sequence
atggcctggagtcagaataacgctaagttcgcagtttgtacagtggatagggtagtgctcctctatgatgagcatggcgagcgaagagataagttttctaccaagcccgcagacatgaaatacggcaggaagagttacatggtgaagggcatggccttttcccccgactctaccaagattgcaataggccaaactgacaatattatttacgtgtataagattggagaagactggggagataaaaaagtgatttgcaataagttcattcagacttcggccgtaacatgcctgcagtggccggctgagtatatcatcgtctttggattggcagagggcaaagtaaggttagcaaacacaaagacaaacaagagtagcaccatctacgggacagaaagctacgtggtttccttaacaaccaactgtagtggcaaaggaattctctccggccacgccgacgggacaattgtccgatacttcttcgatgacgaggggtccggtgaaagccagggaaaactggtgaatcacccatgtccaccatacgcgctggcctgggccacaaattctattgtcgccgccggatgtgacaggaagatcgtcgcatacggaaaagagggccatatgctgcaaacattcgattatagcagggatccacaggaacgtgagttcaccacggccgtgtcttccccgggcggccagtccgtggtcctgggctcctatgaccgtctcagagtctttaactggattccccgcaggtccatctgggaggaggccaagcccaaagagattaccaacctctacaccatcactgctttggcgtggaagagggatggatccaggctctgcgttggcaccctgtgcgggggggtggagcagttcgactgctgtcttcggagaagcatatacaagaataagtttgaactgacctacgttggaccttctcaggttattgtcaagaacctgtcttccggcactcgcgtggtgctgaaatcacactacggttacgaggttgaggaggtgaaaatcctcggcaaggaaagatacctagtcgcacacacatctgaaacccttttactgggcgatttgaacacgaatcggcttagcgaaatcgcatggcagggtagcggcggtaatgaaaagtattttttcgaaaacgaaaatgtatgtatgattttcaacgccggcgaactgactctggttgagtacgggaacaacgatactttgggatcagtcaggacagaatttatgaacccccacctcatttccgtgcgcattaacgagaggtgccagcgtggtacagaagataataaaaaattggcctatctgattgatatcaaaaccattgcaatcgtggacctgatcggggggtacaacattggcacagtcagccatgagagtagggtcgactggctggagctgaatgaaacggggcataaactcctgttccgagatagaaaactgagggtgcggcgggctacaaaggcccttggtattgggtggcccaccgagggggtacgccaagctgcaaccagagactag

SEQ ID NO: 187698 - DNA, 5415 bp, Artificial Sequence
  derived and/or modified sequence
gtcgcataagcgtcagtgcctgtcgctgcggctgcgtggcgggttgtccaggtaaccacgggagttgtcgctgtctaggagcatctgaaagacaggtgtgcgtcatgcacttgaagcacctgaggaccctgctgagccctcaggatggagctgcaaaggtgacctgcatggcttggtcccagaacaatgccaaatttgctgtctgcacagtggaccgagtggtcttgctgtatgatgaacatggagaacggagagataaattctccaccaaaccagctgacatgaagtatggcaggaagagctatatggtgaagggcatggctttttctcctgattccactaaaattgccataggacagactgacaacatcatctatgtctacaagattggagaagattggggtgacaagaaagtcatctgcaacaagttcatccagacgagtgctgtcacttgtctgcaatggccggcagaatacatcattgtctttggactggctgaagggaaggttcgtttagcaaacaccaaaactaataaatcatctaccatctatgggacagagtcttacgtggtgtccctgacaacaaattgctctgggaaaggaattctctctggtcatgcagatggtaccatcgttaggtatttctttgatgatgaaggctctggagagtcacaggggaagttggttaaccacccgtgtccaccctatgccttggcatgggcaaccaatagcatcgtggctgcaggctgtgatcggaaaattgtagcctatggaaaagaaggtcacatgctacaaacttttgattatagccgtgaccctcaggagcgggagttcaccacagctgtatcaagtcctgggggccagtctgttgtgctaggaagttatgacaggcttcgggtgttcaactggatccctcgaagaagcatctgggaagaggcaaagcccaaggagattaccaatttatacaccatcactgccttggcctggaagcgggatggctcacggctctgtgtgggcacactatgtggtggggtggaacagtttgactgctgcctccgaaggagtatttacaagaacaagtttgagttgacgtatgtgggacctagccaggtgattgtgaagaacctgtcatcaggaacccgagtggtgctcaagtcacactatggctatgaggtggaagaggtgaaaatcctaggaaaggaacgttacttggtggctcacacatcagaaacactgctgctgggggacctgaacactaatcggcttagtgagatagcctggcaaggatctggtggcaatgagaagtatttctttgaaaatgagaatgtatgcatgatcttcaatgccggagagctaaccctggtggaatatgggaataatgacaccctgggttctgtacgcactgaattcatgaacccccacctcatcagtgttcgtattaatgagaggtgtcagcgaggaacagaagataataagaaattggcttatcttattgatattaagactattgctatagtggatctgattggtggctacaacattggcaccgtcagccatgagagccgtgtggattggctggaacttaatgagactggacacaagctcctcttcagggaccggaaacttcgtttgcatctgtatgatattgaaagctgctctaagacaatgatcctcaacttctgctcctatatgcagtgggtcccaggaagtgacgtgctggtagctcagaaccgaaacagtctgtgtgtatggtacaacattgaggcacctgagagagtcaccatgttcactattaggggtgatgttataggtctggagcggggcgggggaaagaccgaggtgatggtgatggaaggtgtgactactgttgcctacacattggatgagggcctcatcgagtttggaacagccattgatgatggcaactacatccgggcaacagccttcttagagactctggaaatgaccccagaaacagaggcaatgtggaaaaccttgagtaaactggcactagaggcaaggcaactacacattgcggagaggtgcttttctgctttgggccaagtagcaaaagctcgattcctgcatgagaccaatgagattgcagatcaagtatcccgggaatatggcggagaaggaacagacttttatcaggtccgagcacgtctagccatgctggaaaagaactacaaactggctgaaatgatctttttggaacagaatgctgtggaggaggccatgggcatgtaccaggagctacaccgttgggatgagtgtatcgctgtggctgaagccaaggggcacccagccctggagaagctacgtcgtagttactaccagtggctgatggacacacagcaagaggagcgagcaggtgaactacaggagagccaaggggatgggctagcagccatcagcctctacctcaaagctgggctccctgccaaagctgctcggctggtgctgacccgagaggaactgctagccaacacagagctggtagaacacatcactgcagcccttatcaagggggaactctacgaaagggcaggtgatctctttgagaagattcacaatccacagaaggccctggagtgctaccgtaaaggcaacgcattcatgaaagcggtagagctggctcgattggccttcccagtggaggtggtgaaactagaggaggcatggggggaccacctggtgcagcagaagcagcttgatgcagccattaatcactacatcgaagccaggtgctccattaaggcaattgaggccgccctgggtgcccgccagtggaagaaggcaatttatatattagatctacaggaccggaacactgcatccaaatactatcctctcgtggcccaacactatgcatccctgcaggagtatgagattgctgaggagctctatactaagggagatcggacaaaagatgccatagacatgtacacccaggctggtcgttgggaacaagcccacaagctggcgatgaaatgcatgagaccagaagatgtgtcagtgctatacatcactcaggcccaggaaatggagaagcagggcaagtaccgtgaggctgaaaggctatatgtgacagtacaagagcctgatcttgccatcaccatgtacaaaaagcacaagttgtatgatgacatgatccgcctggtagggaagcaccatccagatctcctcagtgatacacacctacatctgggcaaggagctggaggctgaaggccgactacaggaggctgagtaccactacctcgaggcccaggaatggaaggcaacagtgaacatgtaccgggccagtgggctttgggaagaggcctacagggtggccagaactcaaggaggggctaatgcccacaaacacgtggcctatctgtgggcaaagagcctgggaggagaggctgcagttagactgcttaataagctgggactcctggaagctgctgttgaccacgctgcagacaattgctcctttgaatttgcgtttgaactctctcggctggccctcaagcacaaaacccccgaggttcatctcaaatatgctatgttcctggaggatgagggtaaattcgaagaggctgaagctgaattcatcagagctggtaaacccaaggaggcagtcctcatgtttgtccataaccaggattgggaggcagctcagcgtgtggctgaggctcacgaccctgacagtgtcgccgaggtgcttgtgggacaggcccggggggccttggaggagaaggactttcagaaagcagaagggctgctgctccgggcccagagaccaggcctggccctcaattattataaggaggctggattatggagtgacgctctgcgcatctgcaaggactatgtgcccagccagctggaggctctgcaggaagaatatgagcgggaagctactaagaagggggccaggggtgtggagggatttgtggaacaagctcgacactgggagcaggctggagagtacagccgtgccgtggactgctacctcaaagtgcgagactctggaaacagcggcctggcggagaagtgctggatgaaggcagctgaactctccatcaagtttctgcctccccaacgtaatatggaagtcgttctggctgtaggaccccagctgattggaattggaaagcacagtgcagctgcagagctctatctgaatctggaccttgtcaaggaagcaatcgatgctttcatcgagggtgaggagtggaacaaggcgaagcgtgtagctaaggagttagatcccaggtatgaagactatgtggaccagcattataaagagttcctcaagaatcagggcaaagtggactcgctggtgggtgtggatgtgatagctgctttggacctgtatgtggagcagggccagtgggacaagtgcattgaaacagctaccaagcagaactacaagattctgcacaagtatgtggctttgtatgcaactcacttgatccgggagggtagctctgcccaggcattggccctgtatgtacagcacggagcccctgctaacccacagaacttcaatatctacaaaaggatcttcactgacatggtgagctctcctggaaccaactgtgccgaggcctatcatagctgggctgatcttcgagatgtcctcttcaacctgtgtgaaaacctggtgaagtccagtgaggcaaactctccagcccatgaggagttcaagacgatgctgctgatcgctcattactatgccacgcgctctgcagcccagagtgtcaaacagctggaaaccgtggctgccaggctttctgtttcactcttgcgtcacacccagctactacctgtagacaaagccttctatgaagcaggcattgctgccaaggcagttggctgggataacatggcattcatcttcctcaatcgctttttggacctgaccgatgcaatcgaggaagggactctagatggccttgaccactctgattttcaggatacagacattccctttgaggtgccactcccagctaagcagcatgtaccggaggctgagagagaagaggttcgagactgggtgcttacagtctccatggaccagcggctggagcaggttctgcctcgggatgagcgtggcgcctacgaggcctccctagtggcagcgagcactggtgttcgagccctgccctgccttattacaggataccccattctgaggaacaaaattgaatttaagcggccagggaaggctgctaacaaggacaactggaataaattccttatggccatcaagacctcccacagcccagtgtgccaggacgtgctgaaattcatcagtcagtggtgtggagggctccccagcaccagcttttcctttcagtagttggtagagctgaggaagagttagggcctctccctcattaaagttttataaataattgaga

SEQ ID NO: 187699 - DNA, 1982 bp, Artificial Sequence
  derived and/or modified sequence
acgtgtgaccttgcgacgcgtgttgcgctccggtcgcataagcgtcagtgcctgtcgctgcggctgcgtggcgggttgtccaggtaaccacgggagttgtcgctgtctaggagcatctgaaagacaggtgtgcgtcatgcacttgaagcacctgaggaccctgctgagccctcagcccaaactcctttgcctggcttcaaagacttcctgagctggcctgtttttcctgccttaccccgtctattctactatttataaggatggagctgcaaaggtgacctgcatggcttggtcccagaacaatgccaaatttgctgtctgcacagtggaccgagtggtcttgctgtatgatgaacatggagaacggagagataaattctccaccaaaccagctgacatgaagtatggcaggaagagctatatggtgaagggcatggctttttctcctgattccactaaaattgccataggacagactgacaacatcatctatgtctacaagattggagaagattggggtgacaagaaagtcatctgcaacaagttcatccagacgagtgctgtcacttgtctgcaatggccggcagaatacatcattgtctttggactggctgaagggaaggttcgtttagcaaacaccaaaactaataaatcatctaccatctatgggacagagtcttacgtggtgtccctgacaacaaattgctctgggaaaggaattctctctggtcatgcagatggtaccatcgttaggtatttctttgatgatgaaggctctggagagtcacaggggaagttggttaaccacccgtgtccaccctatgccttggcatgggcaaccaatagcatcgtggctgcaggctgtgatcggaaaattgtagcctatggaaaagaaggtcacatgctacaaacttttgattatagccgtgaccctcaggagcgggagttcaccacagctgtatcaagtcctgggggccagtctgttgtgctaggaagttatgacaggcttcgggtgttcaactggatccctcgaagaagcatctgggaagaggcaaagcccaaggagattaccaatttatacaccatcactgccttggcctggaagcgggatggctcacggctctgtgtgggcacactatgtggtggggtggaacagtttgactgctgcctccgaaggagtatttacaagaacaagtttgagttgacgtatgtgggacctagccaggtgattgtgaagaacctgtcatcaggaacccgagtggtgctcaagtcacactatggctatgaggtggaagaggtgaaaatcctaggaaaggaacgttacttggtggctcacacatcagaaacactgctgctgggggacctgaacactaatcggcttagtgagatagcctggcaaggatctggtggcaatgagaagtatttctttgaaaatgagaatgtatgcatgatcttcaatgccggagagctaaccctggtggaatatgggaataatgacaccctgggttctgtacgcactgaattcatgaacccccacctcatcagtgttcgtattaatgagaggtgtcagcgaggaacagaagataataagaaattggcttatcttattgatattaagactattgctatagtggatctgattggtggctacaacattggcaccgtcagccatgagagccgtgtggattggctggaacttaatgagactggacacaagctcctcttcagggaccggaaacttcgtgtgagaagagctactaaggccttaggcattggctggcccacagagggtgtgagacaagctgccaccagggactgagggaggcaggatggagcacattgtctttgctgtgtcatcaacatggcagaaggcacagaagaatcaacattctctgtagctgataccaaaactgatagcaaaacccatcctttattacctctttttttttttttttggagacagtgtctcactctgtcaccca

SEQ ID NO: 187700 - DNA, 5250 bp, Artificial Sequence
  derived and/or modified sequence
atgcacctgaagcacctgcggaccctgctgagcccccaggatggagctgccaaggtgacctgcatggcctggagccagaacaatgccaagtttgctgtgtgcaccgtggacagagtggtgctgctgtatgatgagcacggggagcggcgggacaagttcagcaccaagccagctgacatgaagtatggcaggaagagctacatggtgaagggcatggccttctccccagacagcaccaagatcgccatcggccagacagacaacatcatctacgtgtacaagattggagaggactggggagacaagaaggtgatctgcaacaagttcatccagaccagcgctgtgacctgcctgcagtggccagctgagtacatcatcgtgtttggcctggccgagggcaaggtgcggctggccaacaccaagaccaacaagagcagcaccatctatggaacagagagctatgtggtgtccctgaccaccaactgcagcggcaagggcatcctgagcggccacgcagatggcaccatcgtgcgctacttctttgatgatgagggcagcggggagagccagggcaagctggtgaaccacccctgccccccctatgccctggcctgggccaccaacagcatcgtggccgccggctgtgacaggaagatcgtggcctacggcaaggagggccacatgctgcagacctttgactacagccgggacccccaggagcgggagttcaccacagctgtgagcagccctgggggccagagcgtggtgctgggcagctatgaccggctgcgggtcttcaactggatccccaggaggagcatctgggaggaggccaagcccaaggagatcaccaacctgtacaccatcacagccctggcctggaagagagatggcagccggctgtgtgtgggcaccctgtgtggcggcgtggagcagtttgactgctgcctgcggcgcagcatctacaagaacaagtttgagctgacctacgtgggccccagccaggtgattgtgaagaacctgagcagcggcaccagggtggtgctgaagagccactacggctatgaggtggaggaggtgaagatcctgggcaaggagcgctacctggtggcccacaccagcgagaccctgctgctgggggacctgaacaccaaccggctgtctgagatcgcctggcagggcagcggcggcaatgagaagtacttctttgaaaatgaaaatgtgtgcatgatcttcaatgctggggagctgaccctggtggagtatggcaacaatgacaccctgggctctgtgaggacagagttcatgaacccccacctgatctctgtgcgcatcaatgaacgctgccagaggggcacagaggacaacaagaagctggcctacctgattgacatcaagaccatcgccatcgtggacctgattggaggctacaacattggaacagtgtcccatgagagccgggtggactggctggagctgaatgagaccggccacaagctgctcttccgggacaggaagctgcggctgcacctgtatgacatcgagagctgcagcaagaccatgatcctgaacttctgcagctacatgcagtgggtgcccggcagtgatgtgctggtggcccagaacagaaacagcctgtgtgtgtggtacaacatcgaggcccctgagcgggtgaccatgttcaccatcagaggagatgtgattggcctggagcggggcggcggcaagacagaggtgatggtgatggagggcgtgaccaccgtggcctacaccctggatgagggcctgattgaatttggaacagccattgatgatggcaactacatccgggccacagccttcctggagaccctggagatgaccccagagacagaggccatgtggaagaccctgagcaagctggccctggaggcccggcagctgcacatcgccgagcgctgcttcagcgccctgggccaggtggccaaggcccgcttcctgcacgagaccaatgaaattgctgaccaggtgtcccgggagtatggaggagagggcacagacttctaccaggtgcgggcccggctggccatgctggagaagaactacaagctggccgagatgatcttcctggagcagaatgctgtggaggaggccatgggcatgtaccaggagctgcaccgctgggatgaatgtattgctgtggccgaggccaagggccacccagccctggagaagctgcggcgcagctactaccagtggctgatggacacccagcaggaggagcgggccggggagctgcaggagagccagggagatggcctggccgccatcagcctgtacctgaaggccggcctgcctgccaaggccgcccggctggtgctgacccgggaggagctgctggccaacacagagctggtggagcacatcacagctgccctgatcaagggggagctgtatgaaagagctggggacctgtttgagaagatccacaacccccagaaggccctggagtgctacagaaaaggaaatgccttcatgaaggctgtggagctggcccggctggccttccctgtggaggtggtgaagctggaggaggcctggggagaccacctggtgcagcagaagcagctggatgctgccatcaaccactacatcgaggcccgctgcagcatcaaggccattgaagctgccctgggcgcccggcagtggaagaaggccatctacatcctggacctgcaggacaggaacacagccagcaagtactaccccctggtggcccagcactacgccagcctgcaggagtatgaaattgctgaggagctgtacaccaagggggacaggaccaaggatgccatcgacatgtacacccaggccggccgctgggagcaggcccacaagctggccatgaagtgcatgaggccagaagatgtgtctgtgctgtacatcacccaggcccaggagatggagaagcagggcaagtaccgggaggccgagcggctgtatgtgacagtgcaggagccagacctggccatcaccatgtacaagaagcacaagctgtatgatgacatgatccggctggtgggcaagcaccacccagacctgctgagtgacacccacctgcacctgggcaaggagctggaggccgagggccgcctgcaggaggccgagtaccactacctggaggcccaggagtggaaggccaccgtgaacatgtaccgggccagcggcctgtgggaggaggcctacagagtggcccggacccagggcggggccaatgcccacaagcacgtggcctacctgtgggccaagagcctgggcggggaggccgctgtgcggctgctgaacaagctgggcctgctggaggccgctgtggaccacgccgctgacaactgcagctttgaatttgcctttgagctgagccggctggccctgaagcacaagaccccagaggtgcacctgaagtatgccatgttcctggaggatgagggcaagtttgaggaggccgaggccgagttcatccgggccggcaagcccaaggaggccgtgctgatgtttgtgcacaaccaggactgggaggccgcccagagggtggccgaggcccatgaccctgacagcgtggccgaggtgctggtgggccaggcccggggggccctggaggagaaggacttccagaaggccgagggcctgctgctgcgggcccagaggcctggcctggccctgaactactacaaggaggccggcctgtggagcgatgccctgcgcatctgcaaggactatgtgcccagccagctggaggccctgcaggaggagtatgaaagagaggccaccaagaagggggcccggggcgtggagggctttgtggagcaggcccggcactgggagcaggccggggagtacagcagagctgtggactgctacctgaaggtgcgggacagcggcaacagcggcctggccgagaagtgctggatgaaggctgctgagctgagcatcaagttcctgcccccccagaggaacatggaggtggtgctggccgtgggcccccagctgattggaattggcaagcacagcgctgctgctgagctgtacctgaacctggacctggtgaaggaggccattgatgccttcattgaaggagaggagtggaacaaggccaagagggtggccaaggagctggaccccaggtatgaagattatgtggaccagcactacaaggagttcctgaagaaccagggcaaggtggacagcctggtgggcgtggatgtgattgctgccctggacctgtatgtggagcagggccagtgggacaagtgcattgaaacagccaccaagcagaactacaagatcctgcacaagtatgtggccctgtatgccacccacctgatccgggagggcagcagcgcccaggccctggccctgtatgtgcagcacggggccccagccaacccccagaacttcaacatctacaagaggatcttcacagacatggtgagcagccctggcaccaactgtgccgaggcctaccacagctgggccgacctgagagatgtgctcttcaacctgtgtgagaacctggtgaagagcagcgaggccaacagccctgcccacgaggagttcaagaccatgctgctgattgcccactactatgccaccaggtctgctgcccagagcgtgaagcagctggagaccgtggccgcccggctgtctgtgtccctgctgcggcacacccagctgctgcctgtggacaaggccttctatgaggccggcattgctgccaaggctgtgggctgggacaacatggccttcatcttcctgaaccgcttcctggacctgacagatgccatcgaggagggcaccctggatggcctggaccacagcgacttccaggacacagacatcccctttgaggtgcccctgcctgccaagcagcacgtgcctgaggccgagcgggaggaggtgcgggactgggtgctgactgtgtccatggaccagaggctggagcaggtgctgcccagagatgagcggggggcctatgaggccagcctggtggccgccagcactggagtgcgggccctgccctgcctgatcaccggctaccccatcctgaggaacaagattgagttcaagaggcctgggaaggccgccaacaaggacaactggaacaagttcctgatggccatcaagaccagccacagccctgtgtgccaggatgtgctgaagttcatcagccagtggtgtggcggcctgcccagcaccagcttctccttccagtag

SEQ ID NO: 187701 - DNA, 1536 bp, Artificial Sequence
  derived and/or modified sequence
atggcctggagccagaacaatgccaagtttgctgtgtgcaccgtggacagagtggtgctgctgtatgatgaacatggagagcggcgggacaagttcagcaccaagccagctgacatgaagtatggcaggaagagctacatggtgaagggcatggccttctccccagacagcaccaagatcgccatcggccagacagacaacatcatctacgtgtacaagatcggggaggactggggagacaagaaggtgatctgcaacaagttcatccagaccagcgctgtgacctgcctgcagtggccagctgagtacatcatcgtgtttggcctggccgagggcaaggtgcggctggccaacaccaagaccaacaagagcagcaccatctacggcacagagagctatgtggtgtccctgaccaccaactgcagcggcaagggcatcctgagcggccatgctgatggcaccatcgtgcgctacttctttgatgatgagggcagcggggagagccagggcaagctggtgaaccacccctgccccccctatgccctggcctgggccaccaacagcatcgtggccgccggctgtgacaggaagatcgtggcctacggcaaggagggccacatgctgcagacctttgactacagccgggacccccaggagcgggagttcaccacagctgtgagcagccctgggggccagagcgtggtgctgggcagctatgaccggctgcgggtcttcaactggatcccccggcgcagcatctgggaggaggccaagcccaaggagatcaccaacctgtacaccatcacagccctggcctggaagagagatggcagccggctgtgtgtgggcaccctgtgtggcggcgtggagcagtttgactgctgcctgcggcgcagcatctacaagaacaagtttgagctgacctacgtgggccccagccaggtgattgtgaagaacctgagcagcggcaccagggtggtgctgaagagccactacggctatgaggtggaggaggtgaagatcctgggcaaggagcgctacctggtggcccacaccagcgagaccctgctgctgggggacctgaacaccaaccggctgtctgaaattgcctggcagggcagcggcggcaatgagaagtacttctttgaaaatgaaaatgtgtgcatgatcttcaatgctggggagctgaccctggtggagtatggcaacaatgacaccctgggctctgtgaggacagagttcatgaacccccacctgatctctgtgcgcatcaatgaacgctgccagaggggcacagaggacaacaagaagctggcctacctgattgacatcaagaccatcgccatcgtggacctgattggaggctacaacatcggcaccgtgtcccatgagagccgggtggactggctggagctgaatgaaacaggccacaagctgctcttccgggacaggaagctgcgggtgagaagagccaccaaggccctgggcatcggctggcccacagaaggagtgcggcaggccgccacccgggactag

SEQ ID NO: 187702 - DNA, 5250 bp, Artificial Sequence
  derived and/or modified sequence
atgcacctgaagcacctgcggaccctgctgagcccccaggacggcgcagctaaagtcacatgtatggcttggtcccaaaacaacgctaaattcgccgtgtgtacggttgaccgtgtagtactgctgtacgacgagcacggcgaacgcagagacaagttcagcacaaaaccagccgacatgaagtacggccgcaaaagctacatggtaaaaggtatggcatttagtcccgacagcacgaagatagcgatcggccagacagataacattatttacgtctataaaattggcgaagattggggcgacaagaaagtgatttgtaataaatttatccagacctccgcagtgacctgtttgcagtggcccgcggaatacattatcgtgtttggcctcgctgagggcaaagttaggctcgccaacacaaagacaaacaagagcagcacgatctacggcacagaatcttatgtggtatctctcaccaccaactgttcaggcaagggtatcctgagcgggcacgcagacgggactatcgtacggtatttcttcgacgatgagggaagcggagagagccaggggaaactggtgaaccacccatgtccaccttatgccctcgcctgggctactaactccatagtggcagcgggctgtgatcgcaaaatagtcgcctacgggaaggagggccacatgctgcagaccttcgactacagccgcgatcctcaggagcgagagttcacgacggccgtctcctctcccggaggacaaagtgtggtgcttggatcatacgaccggctacgggtcttcaactggatacctcggagaagtatctgggaggaggccaaacccaaggaaattacaaacctgtacactatcactgccctggcatggaaacgcgatggctcccgactgtgcgtgggaacactgtgtggcggtgtcgaacagtttgactgctgcctcaggcggtcgatttacaagaataagtttgagctcacatacgtcggaccttctcaggtgatagtgaagaatctctcctctgggacacgggttgtccttaaatctcattacggatatgaggttgaagaggtgaaaattcttggcaaagagaggtatctggttgcccatacaagcgagactttgctgcttggcgatctgaacaccaatcgcttatcagagattgcttggcagggtagcggaggcaatgagaagtatttcttcgaaaacgagaatgtgtgcatgatcttcaacgccggcgagttgactctggttgagtacggtaataatgacactctgggctccgtacgtacggagtttatgaacccccacttgatctctgtgaggatcaatgaaagatgccagaggggcacggaggataacaaaaagctagcttatctgattgacataaagacaattgccattgttgatctgattggaggttataacataggcaccgtgtctcatgagagtcgggtcgattggcttgagctcaacgagaccggccacaagttgttatttagagataggaagctcaggctgcacctctacgacatcgaaagctgtagcaaaacaatgattcttaatttctgttcttacatgcagtgggtgcctggttcagacgtgctcgtggcccagaaccgcaactctctttgtgtgtggtataatatagaggcccctgagagagttaccatgtttaccattcgcggtgacgttatcggcctcgaaaggggtgggggaaagacagaagtgatggtgatggaaggagtcacaacagtggcatacactttggacgagggcttaatcgaattcggcaccgcaattgatgatgggaactacattcgggccacggccttcctggagacactggagatgacacctgagacggaggccatgtggaagactctgagtaagctagctttggaagcccggcagctgcatatcgccgagcggtgttttagcgcgctgggtcaggtggctaaggcaaggttcttgcatgaaacaaatgagatcgcggatcaggtgtcacgggaatatggcggcgagggtactgatttctaccaggtccgtgcccgcctcgctatgctggaaaaaaattacaagctggctgagatgatcttcctcgaacagaatgctgtggaggaggccatgggtatgtaccaagagctgcatagatgggacgagtgtatcgctgtggcagaagcgaaagggcatcccgccttggaaaagctgcgtagaagctattatcagtggctaatggatactcagcaggaagaacgcgccggggagctccaagagagccagggggacggcttagccgccatctcactatatctgaaggctggattgcccgcaaaagcagccagactggtattgactcgggaagagctgcttgccaacacagagcttgttgagcacattacagccgctctgatcaagggggagctctacgagcgggcgggagacctgttcgagaagatccacaacccgcagaaagccttagagtgctaccgcaagggtaatgcgttcatgaaggctgttgagttggctcgattggcttttcccgtcgaggtcgtaaaactagaagaggcttggggagatcatctggtccagcagaagcaactggacgccgcaatcaatcattacatagaagctaggtgttcaattaaagctattgaagccgcccttggcgcgcggcagtggaaaaaagctatttacatcctggacttgcaagatcgcaacaccgctagcaagtattacccactggtagcacagcactatgcctcattgcaggaatatgaaattgctgaagagctctatacaaaaggagaccgcacaaaggatgctattgatatgtatacccaagcgggacggtgggagcaggctcacaagttggccatgaaatgcatgaggcccgaggacgtgtcagttctgtatataactcaggcacaggagatggaaaagcaggggaaatacagggaggcagagagactgtatgttacagttcaagaacccgatctcgccataacaatgtataagaagcacaagctgtatgacgacatgatcaggctggtggggaaacatcaccctgacttattgagtgatacacacctccatttagggaaggaactggaagccgaaggaagactccaggaagctgagtaccactacctagaggcccaggaatggaaggccaccgtgaacatgtaccgggctagtggcctgtgggaggaagcgtatcgtgtcgctagaacgcagggcggagctaacgcacataagcacgtggcatatttatgggccaaaagcctggggggcgaagccgccgtgcggttgctcaataagttgggcctccttgaggctgccgtcgatcatgctgccgataactgttccttcgagttcgctttcgaattaagtcgactggctctgaagcataaaacgcccgaagtccacttgaagtacgctatgttcctggaggacgaaggcaaatttgaagaggcggaggctgagtttatcagagccggaaaacctaaagaagctgtgctgatgtttgtccataatcaagactgggaggccgcccagcgagtggcagaagcccatgatcctgactccgtcgcggaggtgctggttggccaagcccgaggcgctctggaggaaaaagatttccagaaagccgagggcctgctgcttagggcccagcgccccggacttgccctgaattactataaggaggctggcctctggagcgacgcactccgcatctgcaaagactatgtgcctagtcagctcgaagccctccaggaggagtacgaacgcgaggccaccaaaaagggggcaaggggggttgaaggattcgtggagcaggcccgacattgggagcaagcaggggaatattctcgggctgtggattgctatctgaaggtcagggacagcggtaacagcggcctggccgagaagtgttggatgaaggcggccgaactgtcaataaagtttctcccacctcagcggaacatggaggtcgttctggccgtcggccctcagctcatcggaattggcaaacactccgcagcagccgagctgtatttgaatctcgacctggttaaagaggcaatcgatgccttcattgagggcgaagaatggaataaagctaagagagttgccaaagaattggacccccgctacgaagactatgtggatcagcactacaaagagtttctgaaaaaccagggtaaagtggattcgcttgtgggggttgacgtaatcgccgctctcgacctgtatgtagaacagggccagtgggataagtgcatcgagacagccaccaaacagaactacaagatactgcataaatatgtcgcactctacgctacccatttgatccgggagggatcgagtgcacaagctctcgctctttatgtgcagcacggagctccagccaaccctcaaaactttaacatttataagcggatctttacagacatggtctccagccccggcacaaactgcgctgaagcctaccatagctgggcagacctgagagacgtcctgtttaacctctgtgaaaacctggtcaaatccagtgaagctaatagccctgcacatgaggagttcaagaccatgctgcttatcgcacactactatgccacgagatctgccgcccagagtgttaagcagcttgagaccgtcgcagctagattgtcggtgagcctgctgcggcatacccagctgctccccgtggacaaggcgttctacgaagccggcattgcagctaaggcggtggggtgggataatatggcatttatctttttgaaccggttcctggaccttactgatgctatcgaagagggaaccttagatgggctggatcactctgacttccaagacaccgatatccccttcgaagtgcccctgcctgctaagcaacacgtacccgaagccgaacgcgaggaagtgagagactgggtgctgaccgtcagcatggatcagcgccttgaacaggtgctgcctagggacgagcgtggcgcctatgaggcgtcactggttgcagcctccacaggagttagggccctgccatgcctcattactgggtatcctatactgcgcaataagatagaatttaagcggcctgggaaggctgctaataaggacaactggaacaaattcctgatggccatcaaaaccagccacagccccgtctgccaggacgtgctgaagtttatttctcagtggtgcggcggcctcccaagcacatctttcagctttcagtag

SEQ ID NO: 187703 - DNA, 1536 bp, Artificial Sequence
  derived and/or modified sequence
atggcctggagccagaacaacgccaagttcgccgtgtgcaccgtggaccgggtggtgctcctttacgacgaacacggggaaaggagggataaattctcgaccaagccagccgacatgaagtacggacgtaagtcctatatggtcaagggcatggcattctcccctgattccacgaagattgctattggccaaacagataatattatttacgtatacaaaatcggcgaggactggggtgacaagaaggtcatatgtaataaattcatccagacttccgcagtcacgtgtcttcagtggcccgcagagtatattatcgtctttggtttggcagaaggtaaggttcgactggccaacaccaagaccaacaagagctccaccatttacggtaccgagtcatatgtggtctccctaactaccaactgcagtggtaaaggcattctgtcaggacacgccgacgggactatcgtcaggtactttttcgacgatgaagggagcggcgaaagccagggtaaactcgtgaaccatccttgtcccccctatgcattagcgtgggccactaattccatcgtggcagccggatgtgatcgaaagattgtggcctacggcaaggaggggcatatgctacagaccttcgattattctcgcgacccccaggaacgcgaatttaccaccgctgtctccagccctggaggtcagtcagtcgttctgggaagttatgaccgcctccgtgtgtttaattggatcccccggcggtctatctgggaagaggccaaacctaaggaaatcacaaatctgtataccataactgccctggcttggaaaagggacggaagccgcctgtgcgtggggactctctgtggaggtgttgaacagttcgactgttgtttaaggagaagcatctacaagaataagtttgagcttacatacgtgggccctagtcaagttattgtgaagaatttgagtagcggaactagggtggtgctgaagtcacattatggatatgaagtggaagaggttaaaattcttgggaaggagcgatatctggtagcccacaccagcgaaaccctgttattgggggatctaaataccaacagactatccgagattgcatggcaggggagcggcggaaatgaaaagtacttctttgagaatgagaacgtgtgcatgattttcaacgccggtgagctcacactggtggagtacgggaacaatgacaccctgggatccgtgcgaaccgaatttatgaacccccacctcatctcagtgcgaatcaacgagcggtgtcaacgaggcacagaggacaacaagaaactggcctaccttattgacataaagacaattgctatagtggatttaatcgggggctataacatcggcacagtgagtcacgaatcgcgggtagactggttagagctcaatgaaacaggccacaaactacttttcagagaccgaaaattaagagtgagaagggctacaaaggccttggggattgggtggcctactgaaggggttaggcaggccgctacgagggactag

SEQ ID NO: 187704 - DNA, 5249 bp, Artificial Sequence
  derived and/or modified sequence
atgcacctgaagcaccttcggactctgctttctccacaggacggcgcagcaaaggtgacttgtatggcttggtcacagaacaatgcaaaatttgccgtttgtacggtcgacagagtcgtgctgctgtacgatgagcacggggaacgacgggacaagtttagcactaagccagcggatatgaagtatgggcgtaaatcatatatggtcaaagggatggctttctcgccagactcaacaaagatcgccattggtcagaccgacaatatcatatatgtgtacaaaatcggtgaggactggggggacaaaaaagtgatctgcaacaaattcattcaaacttctgctgtgacttgcctccagtggccagctgagtatatcatagttttcggcttggccgaagggaaggttcgattggccaatactaagacgaacaagagcagtactatctatggaacggagtcttacgtggttagcctgacaacaaactgttcagggaagggaatactttctggccacgccgatgggacaattgtgcggtatttttttgatgatgaggggtccggtgaatctcagggaaaacttgtgaaccacccctgccccccttatgccttagcctgggctactaactccatcgtggcggctgggtgcgataggaaaatcgttgcatatgggaaagagggacatatgctgcagacgtttgactactcgagagaccctcaagaaagggagtttactacagcggtcagcagccctggcggacagtccgtcgttttggggagctatgataggctcagagtgttcaattggatcccaagacggagcatttgggaggaagccaaaccaaaagagatcaccaacctgtacactatcaccgctcttgcatggaagagggacggctccagactgtgcgtaggcactctatgcggtggagtggagcagttcgattgttgcctccgcagaagtatttacaagaacaagttcgaattgacttacgtgggcccatcacaggtgatagtgaagaatttgtctagcggcactcgggtggtgctcaaatctcactatggatatgaggtcgaagaggtgaagatcttggggaaagagaggtacctcgttgcccacacctccgagactttgctgcttggggatctgaatactaatcgcctctctgaaatagcgtggcagggctccggcggtaacgaaaaatacttttttgagaacgaaaatgtgtgcatgatttttaatgctggcgaacttaccctcgtcgagtatggaaataatgacaccctcggcagcgtccggacagagtttatgaatcctcatctcatatccgttcggattaacgaaagatgccagaggggtactgaagacaataagaagttggcctatcttatagacattaagactatcgcgattgttgacctgattggtggctacaacatcgggacagtgtctcacgagagccgcgttgattggcttgaactgaacgagaccggtcacaaactgctgttccgcgacagaaagcttagactgcatctctacgacatcgagtcttgctcaaagacaatgatcttaaatttctgctcatacatgcagtgggttcccggatcagacgttttagtggcccagaatcggaattccctgtgcgtctggtataacattgaggcccctgagcgggtgaccatgttcactatcaggggggatgtgattgggctggagagaggaggtggcaaaacagaagtcatggtaatggagggggtcaccaccgtggcttataccttggacgaggggctaattgagttcggtacagccatcgacgatggcaattatatccgcgcaacggccttcttagaaactctggaaatgacacccgagaccgaagcaatgtggaagactctgtccaaactcgccctggaggccaggcaactgcacatcgcagagagatgcttctccgcgttgggtcaggtggccaaggctcggtttctccacgagacgaatgagatcgccgaccaggtgtcgagggaatacgggggagaagggacagacttctatcaggttagagccagactggccatgctggaaaaaaattacaagctggccgagatgatttttcttgagcagaatgcagtggaggaggccatgggcatgtatcaggagctgcacaggtgggatgagtgtattgctgtagctgaagccaaagggcacccagcactcgagaagctcaggaggtcctattatcagtggctcatggatacccagcaggaagagcgagctggcgaacttcaggagagtcagggggatgggcttgctgcaatttcactgtacctaaaagctggtctgccagccaaggcagctcggctagtactcaccagagaggagctcttggccaataccgagctggtggagcatatcacggccgctctgatcaagggtgagctgtatgagcgagctggggatctgttcgagaaaatacacaacccacagaaagctttggagtgttatcggaagggaaatgcctttatgaaagcagttgagctggcccgactggcttttcccgtcgaagtggtgaaactcgaagaggcatggggggatcacctagttcagcaaaaacaactagacgccgctatcaaccattatatcgaggccagatgctccatcaaggccatcgaggctgcattgggcgcacggcagtggaagaaggctatttatattcttgatctgcaggatcggaacactgcatcgaaatactaccccctcgtcgcacagcattacgccagcctccaggaatatgaaatcgctgaggaactttatacaaaaggagatcggactaaggatgctattgacatgtacacccaggccggtcgctgggagcaggcacataagctagcaatgaagtgcatgcggccagaagacgttagcgtgctgtatattactcaggcccaggaaatggaaaagcagggtaaatatcgtgaagccgagcgactgtatgtgaccgtgcaagagccagacctcgccattactatgtataaaaagcataagctgtacgacgacatgatcagattagtgggcaagcaccacccagatctgcttagtgatacgcacctgcatctcggaaaagagttagaagccgaggggcgactgcaagaagcggagtaccactacctggaggctcaggaatggaaagccaccgttaacatgtatcgcgctagtgggttatgggaagaggcctaccgcgttgccaggacacagggtggcgctaacgcccacaagcatgtggcctacctctgggccaagagcctggggggtgaggcggctgtccgccttctaaacaagctgggcctcctggaagctgccgtggaccatgccgcagacaattgttcatttgagtttgcatttgagttatctcgcctggcacttaagcacaagacccctgaggtccacctgaaatatgctatgtttttagaggacgagggcaagttcgaagaggccgaagctgaatttatccgagcaggcaagccaaaagaagccgtgctcatgtttgtgcacaatcaggactgggaagcggctcagcgtgtcgccgaagcacacgatcccgatagtgtcgcagaagtcctcgtgggtcaggcgagaggcgctctggaggagaaagacttccaaaaagccgagggcctcttattacgcgctcagaggcctggactcgctttgaactactacaaagaagccggattgtggagcgacgctctaaggatctgtaaagattacgtgcccagccagctcgaggccctgcaggaagagtatgagcgggaagcgacgaaaaagggagcgagaggagtggaaggattcgttgaacaggccagacactgggagcaagcaggagaatatagcagggccgttgactgttatctcaaggtcagagatagtggcaacagcggcctcgctgagaagtgctggatgaaggccgcagagctgtccatcaaatttctgcctcctcagcgcaatatggaagtcgtgcttgcggtggggcctcaactgattggtataggaaagcactctgcagccgctgaactgtaccttaatcttgatctagtgaaggaggcaattgatgcctttattgagggagaggagtggaataaggccaagagggtcgccaaagagttggaccccaggtacgaggattatgtggatcaacactataaggagttcttaaagaatcagggcaaggttgacagcttggtgggtgttgacgttatcgctgcactcgatctctacgtggaacaaggtcagtgggacaagtgcatcgaaactgcgacgaaacagaactacaagatcctccacaagtacgtggctctgtatgccactcatctgatccgggaaggcagctccgcacaagctctggccctgtatgtgcaacacggtgcgcctgctaatccacaaaatttcaatatctataagagaatattcactgacatggtctcctctcccggtaccaactgtgctgaggcctaccactcttgggctgacctgcgtgatgtgctgtttaacttgtgtgaaaatttagttaagtcctccgaggcaaactcaccagcacacgaggagttcaaaacaatgctgctgattgcgcactactacgccacacgctcggccgctcaaagcgtgaagcagttggaaaccgttgccgctagactgtccgtgtctcttctcaggcacacgcagctgcttcctgtggataaagcattttatgaagcagggattgctgcaaaggccgttggctgggataacatggccttcatatttctgaaccgtttcctggacctgactgacgcaatcgaagagggcacactagacgggctggatcattccgactttcaggacaccgatataccgttcgaggtgccactgcccgctaaacaacatgtgcccgaggcagaacgcgaggaggttagagattgggtcctgaccgtgtccatggaccagaggctggagcaggtgttgcccagggacgagagaggtgcttacgaagcctccctggtggcagcctccacgggggtgagggccctgccttgccttattactggataccccatccttcgtaataaaattgagttcaaacgcccaggcaaagctgcaaataaggataattggaacaagtttttgatggcgataaagaccagtcattcccccgtctgccaagatgtccttaagttcatatcccagtggtgcggcggtctcccaagcacctctttttcttttcagta

SEQ ID NO: 187705 - DNA, 1536 bp, Artificial Sequence
  derived and/or modified sequence
atggcatggtcacagaataacgccaaattcgcagtgtgcacggtggatagagtggtgcttttgtacgacgaacacggcgaacgcagagacaagtttagcactaaacctgccgacatgaaatacggcaggaagagctatatggttaagggaatggcgttttcgccagacagcactaaaattgccattggacagaccgataatatcatctatgtctataagattggggaagactggggggacaagaaggttatatgcaacaaattcatccagacttccgccgtgacgtgcctccagtggccagccgaatacatcattgtcttcgggctcgctgagggaaaagtacgcttagccaatacaaaaacgaataagtctagtacgatctatgggaccgaaagttacgtcgtgtcactgactactaattgctccggcaaggggattctatctggtcatgccgacggaacaatcgtgagatacttcttcgacgatgaagggagcggcgagagccaggggaagctggtgaaccatccatgccctccatatgcccttgcttgggccaccaattctatagtggctgctggatgtgataggaaaatcgtcgcttacggaaaggaagggcacatgctgcaaaccttcgactactccagagatcctcaggaacgagaattcacgacagccgtttccagccccggagggcagagcgtggtgctgggatcctacgatcgcctgcgagttttcaactggatccccagacgcagtatctgggaggaggctaagcccaaggagattacaaatctctacacaattacggctctcgcctggaagagggacgggtcgcgcttatgcgtaggaactctgtgcgggggtgtagaacagtttgattgttgcctgcgccgatctatctataaaaataagttcgaactaacatacgtgggaccaagccaggtgatagtgaaaaacctgagctccgggactcgggtggtactgaagtcccattatggatatgaagtcgaggaggtaaaaatccttggcaaggagcgctacctagtggcacacaccagcgaaacgctgctgctaggcgatcttaacaccaataggctgagcgaaatagcttggcaaggtagcgggggtaatgagaagtattttttcgagaacgaaaacgtgtgtatgatcttcaatgctggcgaactgacactcgtggagtacggaaataacgacaccctcggaagtgtccgcacggagtttatgaaccctcatcttattagcgtgcgcattaacgaaagatgccagaggggcaccgaggataataaaaaacttgcctacctgatcgacattaagacaattgctatcgtggacttaataggtggttataatatcggaaccgtttcacatgagagcagggtggattggctggagctgaacgaaaccggccataagctcctgtttcgcgaccgcaagttgcgtgttaggcgtgccaccaaggcactgggtataggctggccaaccgagggagtccgccaggctgccacaagggattag

SEQ ID NO: 187706 - DNA, 5250 bp, Artificial Sequence
  derived and/or modified sequence
atgcacctgaagcacctgagaaccctgctgagcccccaggacggcgccgccaaggtgacctgcatggcctggagccagaacaacgccaagttcgccgtgtgcaccgtggacagagtggtgctgctgtacgacgagcacggcgagagaagagacaagttcagcaccaagcccgccgacatgaagtacggcagaaagagctacatggtgaagggcatggccttcagccccgacagcaccaagatcgccatcggccagaccgacaacatcatctacgtgtacaagatcggcgaggactggggcgacaagaaggtgatctgcaacaagttcatccagaccagcgccgtgacctgcctgcagtggcccgccgagtacatcatcgtgttcggcctggccgagggcaaggtgagactggccaacaccaagaccaacaagagcagcaccatctacggcaccgagagctacgtggtgagcctgaccaccaactgcagcggcaagggcatcctgagcggccacgccgacggcaccatcgtgagatacttcttcgacgacgagggcagcggcgagagccagggcaagctggtgaaccacccctgccccccctacgccctggcctgggccaccaacagcatcgtggccgccggctgcgacagaaagatcgtggcctacggcaaggagggccacatgctgcagaccttcgactacagcagagacccccaggagagagagttcaccaccgccgtgagcagccccggcggccagagcgtggtgctgggcagctacgacagactgagagtgttcaactggatccccagaagaagcatctgggaggaggccaagcccaaggagatcaccaacctgtacaccatcaccgccctggcctggaagagagacggcagcagactgtgcgtgggcaccctgtgcggcggcgtggagcagttcgactgctgcctgagaagaagcatctacaagaacaagttcgagctgacctacgtgggccccagccaggtgatcgtgaagaacctgagcagcggcaccagagtggtgctgaagagccactacggctacgaggtggaggaggtgaagatcctgggcaaggagagatacctggtggcccacaccagcgagaccctgctgctgggcgacctgaacaccaacagactgagcgagatcgcctggcagggcagcggcggcaacgagaagtacttcttcgagaacgagaacgtgtgcatgatcttcaacgccggcgagctgaccctggtggagtacggcaacaacgacaccctgggcagcgtgagaaccgagttcatgaacccccacctgatcagcgtgagaatcaacgagagatgccagagaggcaccgaggacaacaagaagctggcctacctgatcgacatcaagaccatcgccatcgtggacctgatcggcggctacaacatcggcaccgtgagccacgagagcagagtggactggctggagctgaacgagaccggccacaagctgctgttcagagacagaaagctgagactgcacctgtacgacatcgagagctgcagcaagaccatgatcctgaacttctgcagctacatgcagtgggtgcccggcagcgacgtgctggtggcccagaacagaaacagcctgtgcgtgtggtacaacatcgaggcccccgagagagtgaccatgttcaccatcagaggcgacgtgatcggcctggagagaggcggcggcaagaccgaggtgatggtgatggagggcgtgaccaccgtggcctacaccctggacgagggcctgatcgagttcggcaccgccatcgacgacggcaactacatcagagccaccgccttcctggagaccctggagatgacccccgagaccgaggccatgtggaagaccctgagcaagctggccctggaggccagacagctgcacatcgccgagagatgcttcagcgccctgggccaggtggccaaggccagattcctgcacgagaccaacgagatcgccgaccaggtgagcagagagtacggcggcgagggcaccgacttctaccaggtgagagccagactggccatgctggagaagaactacaagctggccgagatgatcttcctggagcagaacgccgtggaggaggccatgggcatgtaccaggagctgcacagatgggacgagtgcatcgccgtggccgaggccaagggccaccccgccctggagaagctgagaagaagctactaccagtggctgatggacacccagcaggaggagagagccggcgagctgcaggagagccagggcgacggcctggccgccatcagcctgtacctgaaggccggcctgcccgccaaggccgccagactggtgctgaccagagaggagctgctggccaacaccgagctggtggagcacatcaccgccgccctgatcaagggcgagctgtacgagagagccggcgacctgttcgagaagatccacaacccccagaaggccctggagtgctacagaaagggcaacgccttcatgaaggccgtggagctggccagactggccttccccgtggaggtggtgaagctggaggaggcctggggcgaccacctggtgcagcagaagcagctggacgccgccatcaaccactacatcgaggccagatgcagcatcaaggccatcgaggccgccctgggcgccagacagtggaagaaggccatctacatcctggacctgcaggacagaaacaccgccagcaagtactaccccctggtggcccagcactacgccagcctgcaggagtacgagatcgccgaggagctgtacaccaagggcgacagaaccaaggacgccatcgacatgtacacccaggccggcagatgggagcaggcccacaagctggccatgaagtgcatgagacccgaggacgtgagcgtgctgtacatcacccaggcccaggagatggagaagcagggcaagtacagagaggccgagagactgtacgtgaccgtgcaggagcccgacctggccatcaccatgtacaagaagcacaagctgtacgacgacatgatcagactggtgggcaagcaccaccccgacctgctgagcgacacccacctgcacctgggcaaggagctggaggccgagggcagactgcaggaggccgagtaccactacctggaggcccaggagtggaaggccaccgtgaacatgtacagagccagcggcctgtgggaggaggcctacagagtggccagaacccagggcggcgccaacgcccacaagcacgtggcctacctgtgggccaagagcctgggcggcgaggccgccgtgagactgctgaacaagctgggcctgctggaggccgccgtggaccacgccgccgacaactgcagcttcgagttcgccttcgagctgagcagactggccctgaagcacaagacccccgaggtgcacctgaagtacgccatgttcctggaggacgagggcaagttcgaggaggccgaggccgagttcatcagagccggcaagcccaaggaggccgtgctgatgttcgtgcacaaccaggactgggaggccgcccagagagtggccgaggcccacgaccccgacagcgtggccgaggtgctggtgggccaggccagaggcgccctggaggagaaggacttccagaaggccgagggcctgctgctgagagcccagagacccggcctggccctgaactactacaaggaggccggcctgtggagcgacgccctgagaatctgcaaggactacgtgcccagccagctggaggccctgcaggaggagtacgagagagaggccaccaagaagggcgccagaggcgtggagggcttcgtggagcaggccagacactgggagcaggccggcgagtacagcagagccgtggactgctacctgaaggtgagagacagcggcaacagcggcctggccgagaagtgctggatgaaggccgccgagctgagcatcaagttcctgcccccccagagaaacatggaggtggtgctggccgtgggcccccagctgatcggcatcggcaagcacagcgccgccgccgagctgtacctgaacctggacctggtgaaggaggccatcgacgccttcatcgagggcgaggagtggaacaaggccaagagagtggccaaggagctggaccccagatacgaggactacgtggaccagcactacaaggagttcctgaagaaccagggcaaggtggacagcctggtgggcgtggacgtgatcgccgccctggacctgtacgtggagcagggccagtgggacaagtgcatcgagaccgccaccaagcagaactacaagatcctgcacaagtacgtggccctgtacgccacccacctgatcagagagggcagcagcgcccaggccctggccctgtacgtgcagcacggcgcccccgccaacccccagaacttcaacatctacaagagaatcttcaccgacatggtgagcagccccggcaccaactgcgccgaggcctaccacagctgggccgacctgagagacgtgctgttcaacctgtgcgagaacctggtgaagagcagcgaggccaacagccccgcccacgaggagttcaagaccatgctgctgatcgcccactactacgccaccagaagcgccgcccagagcgtgaagcagctggagaccgtggccgccagactgagcgtgagcctgctgagacacacccagctgctgcccgtggacaaggccttctacgaggccggcatcgccgccaaggccgtgggctgggacaacatggccttcatcttcctgaacagattcctggacctgaccgacgccatcgaggagggcaccctggacggcctggaccacagcgacttccaggacaccgacatccccttcgaggtgcccctgcccgccaagcagcacgtgcccgaggccgagagagaggaggtgagagactgggtgctgaccgtgagcatggaccagagactggagcaggtgctgcccagagacgagagaggcgcctacgaggccagcctggtggccgccagcaccggcgtgagagccctgccctgcctgatcaccggctaccccatcctgagaaacaagatcgagttcaagagacccggcaaggccgccaacaaggacaactggaacaagttcctgatggccatcaagaccagccacagccccgtgtgccaggacgtgctgaagttcatcagccagtggtgcggcggcctgcccagcaccagcttcagcttccagtag

SEQ ID NO: 187707 - DNA, 1536 bp, Artificial Sequence
  derived and/or modified sequence
atggcctggagccagaacaacgccaagttcgccgtgtgcaccgtggacagagtggtgctgctgtacgacgagcacggcgagagaagagacaagttcagcaccaagcccgccgacatgaagtacggcagaaagagctacatggtgaagggcatggccttcagccccgacagcaccaagatcgccatcggccagaccgacaacatcatctacgtgtacaagatcggcgaggactggggcgacaagaaggtgatctgcaacaagttcatccagaccagcgccgtgacctgcctgcagtggcccgccgagtacatcatcgtgttcggcctggccgagggcaaggtgagactggccaacaccaagaccaacaagagcagcaccatctacggcaccgagagctacgtggtgagcctgaccaccaactgcagcggcaagggcatcctgagcggccacgccgacggcaccatcgtgagatacttcttcgacgacgagggcagcggcgagagccagggcaagctggtgaaccacccctgccccccctacgccctggcctgggccaccaacagcatcgtggccgccggctgcgacagaaagatcgtggcctacggcaaggagggccacatgctgcagaccttcgactacagcagagacccccaggagagagagttcaccaccgccgtgagcagccccggcggccagagcgtggtgctgggcagctacgacagactgagagtgttcaactggatccccagaagaagcatctgggaggaggccaagcccaaggagatcaccaacctgtacaccatcaccgccctggcctggaagagagacggcagcagactgtgcgtgggcaccctgtgcggcggcgtggagcagttcgactgctgcctgagaagaagcatctacaagaacaagttcgagctgacctacgtgggccccagccaggtgatcgtgaagaacctgagcagcggcaccagagtggtgctgaagagccactacggctacgaggtggaggaggtgaagatcctgggcaaggagagatacctggtggcccacaccagcgagaccctgctgctgggcgacctgaacaccaacagactgagcgagatcgcctggcagggcagcggcggcaacgagaagtacttcttcgagaacgagaacgtgtgcatgatcttcaacgccggcgagctgaccctggtggagtacggcaacaacgacaccctgggcagcgtgagaaccgagttcatgaacccccacctgatcagcgtgagaatcaacgagagatgccagagaggcaccgaggacaacaagaagctggcctacctgatcgacatcaagaccatcgccatcgtggacctgatcggcggctacaacatcggcaccgtgagccacgagagcagagtggactggctggagctgaacgagaccggccacaagctgctgttcagagacagaaagctgagagtgagaagagccaccaaggccctgggcatcggctggcccaccgagggcgtgagacaggccgccaccagagactag

SEQ ID NO: 187708 - protein, 546 aa, Artificial Sequence [sequence omitted]

SEQ ID NO: 187709 - DNA, 1641 bp, Artificial Sequence
  derived and/or modified sequence
atgtgcagcctgggcctcttcccccctccccctccaaggggccaggtgacactatatgaacacaacaacgagctagtaacgggtagtagctatgagtcccctccacctgactttcgcggccagtggatcaacctccccgtcctgcagcttacaaaggatccgctgaaaaccccgggccggctggaccacggaacaaggacagcttttattcaccatcgagaacaggtgtggaagaggtgcatcaatatctggcgggacgtagggctgttcggcgtgctgaacgagattgccaatagcgaggaggaagtgttcgagtgggtgaaaaccgccagcgggtgggcactcgctctctgcaggtgggctagctccctgcatgggagtctctttcctcacctatccttaagatcagaagatttaattgctgagttcgctcaagtcacaaactggagtagttgctgtctgagagtgttcgcctggcaccctcataccaacaagttcgctgtcgcattgctggacgattctgttagagtctataatgcttcaagcactattgtgcctagcctgaaacaccgcctgcagcggaatgtcgcttctctggcttggaagcctctgtctgcaagcgtgttagcagtggcttgccagtcttgcatcttgatctggaccctcgaccctacttccttgtctactaggccctcatctggctgcgcccaggtgctgagccatcccggtcatacacctgtgacatcacttgcttgggcaccttccggcgggcgattgctgagcgcctcaccagtcgacgcagccattcgcgtgtgggacgtgtctacagagacctgcgttcccttaccatggttccgaggaggcggggtgactaacttgctatggtcaccggacggctctaaaatcctcgccaccacaccaagtgccgtgttccgcgtgtgggaggcccagatgtggacttgcgagagatggccaacactaagcggccgatgccaaaccgggtgttggtcaccggacggaagcagattgctgtttaccgtgctcggcgagccactaatatacagcctaagcttccccgaacgctgtggcgaggggaaggggtgtgtcggtggtgccaaatctgcgacaattgtggccgatctgtctgaaactacaatccaaacacctgacggagaagagagactcggaggcgaagcccattctatggtctgggacccatcgggagaacgactcgccgtgttaatgaaggggaagccacgcgtgcaagacggcaaaccagtcatactactgtttaggactagaaactcccccgttttcgagctgctaccgtgtggaatcattcagggagagcccggagcccaaccccagctgattacgttccatccaagctttaataagggcgccctcctgagtgtcggttggagcacaggacggatcgcccacatccctctgtacttcgtgaatgcacagttcccaaggttctccccagtgctcggcagggcccaggaacccccagcaggtggcggaggctctatccacgatttaccattgttcaccgagacatcaccaacatcagctccctgggacccactccctggtccaccaccagtcctcccgcacagtcctcactcccatctgtag

SEQ ID NO: 187710 - DNA, 1641 bp, Artificial Sequence
  derived and/or modified sequence
atgtgcagcctgggcctcttccccccacctccaccccggggccaggtgaccctgtatgagcacaacaatgagctggtgacaggcagcagctatgagagccccccaccagacttccggggccagtggatcaacctgcctgtgctgcagctgaccaaggaccccctgaagaccccaggccgcctggaccacggcaccaggacagccttcatccaccaccgggagcaggtgtggaagcgctgcatcaacatctggagagatgtgggcctgtttggagtgctgaatgagatcgccaacagcgaggaggaggtgtttgagtgggtgaagacagccagcggctgggccctggccctgtgccgctgggccagcagcctgcacggcagcctcttcccccacctgagcctgcggtctgaggacctgattgctgagtttgcccaggtgaccaactggagcagctgctgcctgcgggtgtttgcctggcacccccacaccaacaagtttgctgtggccctgctggatgacagcgtgcgggtgtacaatgccagcagcaccatcgtgcccagcctgaagcaccggctgcagagaaatgtggccagcctggcctggaagcccctgagcgcctctgtgctggccgtggcctgccagagctgcatcctgatctggaccctggaccccaccagcctgagcacccggcccagcagcggctgtgcccaggtgctgagccaccctggccacacccctgtgaccagcctggcctgggcccccagcggcggccgcctgctgagcgccagccctgtggatgctgccatccgggtgtgggatgtgtccacagagacctgtgtgcccctgccctggttccggggcggcggcgtgaccaacctgctgtggagcccagatggcagcaagatcctggccaccacccccagcgctgtgttccgggtgtgggaggcccagatgtggacctgtgagcgctggcccaccctgagcggccgctgccagacaggctgctggagcccagatggcagccggctgctcttcaccgtgctgggggagcccctcatctacagcctgtccttccctgagcgctgtggggagggcaagggctgtgtgggcggggccaagagcgccaccatcgtggccgacctgtctgagaccaccatccagaccccagatggagaggagcggctgggcggggaggcccacagcatggtgtgggaccccagcggggagcggctggccgtgctgatgaagggcaagccccgggtgcaggacggcaagcctgtgatcctgctcttccgcaccaggaacagccctgtgtttgagctgctgccctgtggcatcatccagggcgagcccggggcccagccccagctgatcaccttccaccccagcttcaacaagggggccctgctgtctgtgggctggagcactggaagaattgcccacatccccctgtactttgtgaatgcccagttcccccgcttcagccctgtgctgggccgggcccaggagcccccagctgggggcggcggcagcatccatgacctgcccctcttcacagagaccagccccaccagcgccccctgggaccccctgcccggccccccacctgtgctgccccacagcccccacagccacctgtag

SEQ ID NO: 187711 - DNA, 1641 bp, Artificial Sequence
  derived and/or modified sequence
atgtgcagcctgggcctgttcccccccccccccccccggggccaggtcacactgtacgaacataacaatgaactggtgacgggaagctcctacgaatcaccgccccccgatttccgtgggcagtggataaatttgccggtgctacagctgactaaagacccactcaagacaccgggtcggctggatcacgggacacgcaccgcattcattcatcaccgtgaacaggtgtggaaacggtgtattaatatatggagggatgtcggtctattcggcgttctcaatgaaattgccaattcggaggaagaagtttttgaatgggtcaagaccgcctctgggtgggctctggccctctgcagatgggcgagctcgctacacggctccctgtttccacatttatctctcagatccgaagatctgatcgcagagtttgcccaagtgaccaactggtcatcgtgctgcctacgggttttcgcctggcatccacataccaataagttcgctgttgcactgctggatgacagcgtgagggtctataatgctagttcaactatcgtgccgtccctcaagcacaggctgcagcggaacgtggcctcgctggcctggaagcccttgtctgcctccgtgttggctgtggcctgccagtcatgcattctgatctggaccctagaccccacatccctgagtaccagacctagctctgggtgcgcgcaggtcctctctcatcctgggcatactccggtcacatcactggcctgggcccccagtgggggcagactcctgtcggcaagcccagtggatgcagccatccgcgtgtgggacgtttctaccgagacttgtgtcccactgccctggttccggggaggaggcgtgactaacttactgtggtctcccgacgggagtaagatccttgcaactaccccttctgctgtgttccgcgtgtgggaggctcagatgtggacttgcgagagatggccaacattaagcggccggtgtcagacagggtgttggagtccagacggatcacgtcttttattcacagtgctgggcgagcccctgatatactcactgtctttccccgaaaggtgcggtgaggggaagggctgtgtgggcggtgcgaagtcggccaccatcgtcgccgacttgtcagagaccactattcagaccccggacggagaggaaaggttagggggggaggcccactcgatggtttgggatccatccggggagagactggccgtactaatgaaaggaaaacctcgggtgcaagacggcaagccagtgatactgctgttcaggacaagaaactctcccgtcttcgagctccttccctgcggcatcatccagggtgaacctggcgctcagcctcagctgattacatttcatcctagctttaataagggtgctctgctgagtgtcggatggagcacaggacgaattgcccatatccctctgtactttgtcaatgcccagtttccccggttctcccccgtgttaggacgtgcccaggaaccccctgccggcgggggcgggtccatccacgatctgccgcttttcacagagactagtcccacttccgccccttgggatcctcttccagggcctcccccagtcctgccacattctcctcactcgcacctttag

SEQ ID NO: 187712 - DNA, 1641 bp, Artificial Sequence
  derived and/or modified sequence
atgtgtagcctgggtctgtttccccctccaccccctagggggcaggtgaccctgtacgaacataataacgaactggttactgggagctcttatgaaagcccaccaccggacttccgaggccaatggataaatctacccgtgttgcaactcacgaaagacccgttgaagacgccaggcaggctcgatcacggcactcggacggcatttatccaccatagagagcaggtgtggaaacgctgcataaatatttggcgagatgtgggcctgttcggtgtgctcaacgagattgcaaactcagaagaggaggtgttcgaatgggtgaaaaccgcctctggatgggcgttagcactctgccggtgggcaagttcactacacggcagcctctttccgcatctgtcactcaggtccgaggaccttattgctgaattcgcccaggtgactaattggtcctcttgctgtctgagagtgtttgcctggcatccacacaccaataaattcgctgtggccctgttggacgacagtgtgagggtgtataatgcctcatcaaccatcgtgccgtctcttaagcacagactgcaacgcaacgtggcatcattagcatggaagcccctttcagctagtgttcttgcggtggcctgccagtcttgcatcctgatttggacactcgaccctactagccttagcacgcggcctagttccggatgcgctcaagtattatcccacccaggtcatacccccgtcactagtctagcatgggctccttcgggcggtcgcctgttgtccgcgtcccctgtggatgctgccataagggtctgggacgtgagcacagaaacttgcgtgcccctgccatggtttaggggtgggggagtgactaatttgctctggagccccgatggaagcaagatcctggccacaaccccctcagccgtgtttagggtgtgggaggctcaaatgtggacctgcgaacggtggccgactctgtcagggaggtgccagactggatgctggtcaccggatggttcaagactgctcttcacagtgctgggcgaacctctgatctattcactgagctttcccgaaagatgcggtgagggaaagggctgcgtcggcggagctaagtccgccaccatagtggcagaccttagcgagacgactatacagacgcctgacggagaggagcgcctgggcggtgaggctcattctatggtctgggacccttcgggggagcggttggcagttctcatgaaaggcaagcctagagtacaggacggaaagcccgtgatacttctgttcaggaccaggaattctcccgtgttcgagcttctcccttgcggaattattcagggagaacccggagcacaaccccagctgatcacttttcacccaagcttcaacaagggagctctgctgagtgtcggatggagcaccgggaggatcgcacacatccccctgtacttcgtgaatgcccagtttcctagatttagtcctgtgctcgggagggctcaggaacctcccgcagggggagggggttccatccacgacctgccattgttcaccgaaacatcaccaacatccgccccttgggatccacttcctggaccccctcctgtgctcccacactctccccatagtcatttgtag

SEQ ID NO: 187713 - DNA, 1641 bp, Artificial Sequence
  derived and/or modified sequence
atgtgcagcctgggcctgttccccccccccccccccagaggccaggtgaccctgtacgagcacaacaacgagctggtgaccggcagcagctacgagagccccccccccgacttcagaggccagtggatcaacctgcccgtgctgcagctgaccaaggaccccctgaagacccccggcagactggaccacggcaccagaaccgccttcatccaccacagagagcaggtgtggaagagatgcatcaacatctggagagacgtgggcctgttcggcgtgctgaacgagatcgccaacagcgaggaggaggtgttcgagtgggtgaagaccgccagcggctgggccctggccctgtgcagatgggccagcagcctgcacggcagcctgttcccccacctgagcctgagaagcgaggacctgatcgccgagttcgcccaggtgaccaactggagcagctgctgcctgagagtgttcgcctggcacccccacaccaacaagttcgccgtggccctgctggacgacagcgtgagagtgtacaacgccagcagcaccatcgtgcccagcctgaagcacagactgcagagaaacgtggccagcctggcctggaagcccctgagcgccagcgtgctggccgtggcctgccagagctgcatcctgatctggaccctggaccccaccagcctgagcaccagacccagcagcggctgcgcccaggtgctgagccaccccggccacacccccgtgaccagcctggcctgggcccccagcggcggcagactgctgagcgccagccccgtggacgccgccatcagagtgtgggacgtgagcaccgagacctgcgtgcccctgccctggttcagaggcggcggcgtgaccaacctgctgtggagccccgacggcagcaagatcctggccaccacccccagcgccgtgttcagagtgtgggaggcccagatgtggacctgcgagagatggcccaccctgagcggcagatgccagaccggctgctggagccccgacggcagcagactgctgttcaccgtgctgggcgagcccctgatctacagcctgagcttccccgagagatgcggcgagggcaagggctgcgtgggcggcgccaagagcgccaccatcgtggccgacctgagcgagaccaccatccagacccccgacggcgaggagagactgggcggcgaggcccacagcatggtgtgggaccccagcggcgagagactggccgtgctgatgaagggcaagcccagagtgcaggacggcaagcccgtgatcctgctgttcagaaccagaaacagccccgtgttcgagctgctgccctgcggcatcatccagggcgagcccggcgcccagccccagctgatcaccttccaccccagcttcaacaagggcgccctgctgagcgtgggctggagcaccggcagaatcgcccacatccccctgtacttcgtgaacgcccagttccccagattcagccccgtgctgggcagagcccaggagccccccgccggcggcggcggcagcatccacgacctgcccctgttcaccgagaccagccccaccagcgccccctgggaccccctgcccggccccccccccgtgctgccccacagcccccacagccacctgtag

SEQ ID NO: 187714 - DNA, 1840 bp, Artificial Sequence
  derived and/or modified sequence
tttcccgttagtcttttcttcacttccgttgagttccgcctcgccgtttgtcccttgcggtacccgtccgcatacgaatctagcccgggaaccgagttgcgggagtgcggtctgtgccgttccggccaggagtttgccgactgcagacgtcctgcgaaccggcaagatgtgctctctggggttgttccctcctccaccgcctcggggtcaagtcaccctatatgagcacaataacgagctggtgacgggcagtagctatgagagcccgccccccgacttccggggccagtggatcaatcttcctgtcctacaactgacaaaggatcccctaaagacccctggaaggctggaccatggcacaagaactgccttcatccatcaccgggagcaagtgtggaagagatgcatcaacatttggcgtgatgtgggcctttttggggtgctaaatgaaattgcaaactcagaagaagaggtgtttgagtgggtgaagacggcatccggctgggccctggcactctgtcgatgggcctcttccctccatgggtccctgttcccccatctgtctctcaggagcgaagatctgatcgctgaatttgcccaagtcacaaattggtccagctgctgcttgcgtgtctttgcatggcacccccacaccaacaagtttgcagtggccctgctagatgactcagtccgtgtgtataatgccagcagcaccatagtcccctccctgaagcaccggctgcagcgaaatgtggcgtctctggcctggaagccccttagtgcctctgtcttggctgtggcctgccagagctgcattcttatctggaccctggaccctacctccttgtctacccgaccctcttctggctgtgcccaagtgctgtctcaccctgggcatacacctgttaccagcttggcctgggcccccagtggggggcggctgctctcagcttcacccgtggatgctgctatccgggtatgggatgtctcaacagagacctgtgtcccccttccctggttccgaggaggtggggtgaccaacctgctctggtccccagacggcagcaaaatcctggctaccactccttcagctgtctttcgagtctgggaggcccagatgtggacttgtgagaggtggcctactctatcagggcgctgtcagactggctgctggagcccagatggcagccgactgctgttcactgtattgggagagccactgatttactccctgtcttttccagaacgttgtggtgagggaaaggggtgcgttggaggtgcaaagtcagcaacgattgtggcagatctgtctgagacaacaatacagacaccagatggtgaggagaggcttgggggagaggctcactccatggtctgggaccccagtggggaacgtctggctgtgcttatgaaaggaaagccaagggtacaggatggtaaaccagtcatcctcctttttcgcactcgaaacagccctgtgtttgagctccttccctgtggcattatccagggggagccaggagcccagccccagctcatcactttccatccttccttcaacaaaggggccctgctcagtgtgggctggtccacaggccgaattgcccacatcccgctgtactttgtcaatgcccagtttccacgttttagcccagtgcttgggcgggcccaggaaccccctgctgggggtggaggctctattcatgacctgcccctctttactgagacatccccaacctctgccccttgggaccctctcccagggccaccacctgttctgccccactccccacattcccacctctaagaataaataagttttccttttgttttccactca

SEQ ID NO: 187715 - protein, 1264 aa, Artificial Sequence
  derived and/or modified sequence
MPEKRLTAEPPTITEEEFEDSLATDDFLVDYFNEFLSLPTFSEAIRFNADYGVFEVANDAPQFLEKQLKKILQNQQPRNPIYDVVRKGKNEVKPVQMNAPDEDETINVNYNIMCLSREEGIKWIKKERLPAFLESDCYFEYRLAKLVSQVRWSKSGMNFTVGSNFSPWIVKKPPSLPPPATEEDNLVIMKKFYVSLGEASYTQTKDWFALAKQSQQTVSTFSLPCCVPYNKLKSPAISSVSENFIFDDGVHPRTKKDPSKTNKLISEFEEEEGEEEEVSVSLQDTPSQALLRVYLEKKQDVDESLTMHFSTCEEFLSSYIYFILRGAIQQIVGKPVGETPDYINFNNITKVSFDDCFESIHGKNFLSELVQTTKERSEEIEQTSLSSKNESAGPESRADWCISHRTYDIGNRKEFERFKKFIKGTLGERYWWLWMDIERLKVLKDPGRHQRHLEKMKKCYLVSNGDYYLSAEILSKFKLLDGSQWNEEHLRNIQSEVLKPLLLYWAPRFCVTHSASTKYASAELKFWHLRQAKPRKDIDPFPQMATLLPLRPKSCIPQIPEIQKEEFSLSQPPKSPNKSPEVKTATQKPWKRELLYPGSSKDDVIEKGSKYMSESSKVIHLTSFTDISECLKPQLDRRYAYTEEPRVKTVSDVGALGGSDMENLLQSLYVENRAGFFFTKFCEHSGNKLWKNSVYFWFDLQAYHQLFYQETLQPFKVCKQAQYLFATYVAPSATLDIGLQQEKKKEIYMKIQPPFEDLFDTAEEYILLLLLEPWTKMVKSDQIAYKKVELVEETRQLDSTYFRKLQALHKETFSKKAEDTTCEIGTGILSLSNVSKRTEYWDNVPAEYKHFKFSDLLNNKLEFEHFRQFLETHSSSMDLMCWTDIEQFRRITYRDRNQRKAKSIYIKNKYLNKKYFFGPNSPASLYQQNQVMHLSGGWGKILHEQLDAPVLVEIQKHVQNRLENVWLPLFLASEQFAARQKIKVQMKDIAEELLLQKAEKKIGVWKPVESKWISSSCKIIAFRKALLNPVTSRQFQRFVALKGDLLENGLLFWQEVQKYKDLCHSHCDESVIQKKITTIINCFINSSIPPALQIDIPVEQAQKIIEHRKELGPYVFREAQMTIFGVLFKFWPQFCEFRKNLTDENIMSVLERRQEYNKQKKKLAVLEDEKSGKDGIKQYANTSVPAIKTALLSDSFLGLQPYGRQPTWCYSKYIEALEQERILLKIQEELEKKLFAGLQPLTNFKASSSTMSLKKNMSAHSSQK

SEQ ID NO: 187716 - DNA, 3795 bp, Artificial Sequence
  derived and/or modified sequence
atgcccgagaagagactgaccgccgagccccccaccatcaccgaggaggagttcgaggacagcctggccaccgacgacttcctggtggactacttcaacgagttcctgagcctgcccaccttcagcgaggccatcagattcaacgccgactacggcgtgttcgaggtggccaacgacgccccccagttcctggagaagcagctgaagaagatcctgcagaaccagcagcccagaaaccccatctacgacgtggtgagaaagggcaagaacgaggtgaagcccgtgcagatgaacgcccccgacgaggacgagaccatcaacgtgaactacaacatcatgtgcctgagcagagaggagggcatcaagtggatcaagaaggagagactgcccgccttcctggagagcgactgctacttcgagtacagactggccaagctggtgagccaggtgagatggagcaagagcggcatgaacttcaccgtgggcagcaacttcagcccctggatcgtgaagaagccccccagcctgcccccccccgccaccgaggaggacaacctggtgatcatgaagaagttctacgtgagcctgggcgaggccagctacacccagaccaaggactggttcgccctggccaagcagagccagcagaccgtgagcaccttcagcctgccctgctgcgtgccctacaacaagctgaagagccccgccatcagcagcgtgagcgagaacttcatcttcgacgacggcgtgcaccccagaaccaagaaggaccccagcaagaccaacaagctgatcagcgagttcgaggaggaggagggcgaggaggaggaggtgagcgtgagcctgcaggacacccccagccaggccctgctgagagtgtacctggagaagaagcaggacgtggacgagagcctgaccatgcacttcagcacctgcgaggagttcctgagcagctacatctacttcatcctgagaggcgccatccagcagatcgtgggcaagcccgtgggcgagacccccgactacatcaacttcaacaacatcaccaaggtgagcttcgacgactgcttcgagagcatccacggcaagaacttcctgagcgagctggtgcagaccaccaaggagagaagcgaggagatcgagcagaccagcctgagcagcaagaacgagagcgccggccccgagagcagagccgactggtgcatcagccacagaacctacgacatcggcaacagaaaggagttcgagagattcaagaagttcatcaagggcaccctgggcgagagatactggtggctgtggatggacatcgagagactgaaggtgctgaaggaccccggcagacaccagagacacctggagaagatgaagaagtgctacctggtgagcaacggcgactactacctgagcgccgagatcctgagcaagttcaagctgctggacggcagccagtggaacgaggagcacctgagaaacatccagagcgaggtgctgaagcccctgctgctgtactgggcccccagattctgcgtgacccacagcgccagcaccaagtacgccagcgccgagctgaagttctggcacctgagacaggccaagcccagaaaggacatcgaccccttcccccagatggccaccctgctgcccctgagacccaagagctgcatcccccagatccccgagatccagaaggaggagttcagcctgagccagccccccaagagccccaacaagagccccgaggtgaagaccgccacccagaagccctggaagagagagctgctgtaccccggcagcagcaaggacgacgtgatcgagaagggcagcaagtacatgagcgagagcagcaaggtgatccacctgaccagcttcaccgacatcagcgagtgcctgaagccccagctggacagaagatacgcctacaccgaggagcccagagtgaagaccgtgagcgacgtgggcgccctgggcggcagcgacatggagaacctgctgcagagcctgtacgtggagaacagagccggcttcttcttcaccaagttctgcgagcacagcggcaacaagctgtggaagaacagcgtgtacttctggttcgacctgcaggcctaccaccagctgttctaccaggagaccctgcagcccttcaaggtgtgcaagcaggcccagtacctgttcgccacctacgtggcccccagcgccaccctggacatcggcctgcagcaggagaagaagaaggagatctacatgaagatccagccccccttcgaggacctgttcgacaccgccgaggagtacatcctgctgctgctgctggagccctggaccaagatggtgaagagcgaccagatcgcctacaagaaggtggagctggtggaggagaccagacagctggacagcacctacttcagaaagctgcaggccctgcacaaggagaccttcagcaagaaggccgaggacaccacctgcgagatcggcaccggcatcctgagcctgagcaacgtgagcaagagaaccgagtactgggacaacgtgcccgccgagtacaagcacttcaagttcagcgacctgctgaacaacaagctggagttcgagcacttcagacagttcctggagacccacagcagcagcatggacctgatgtgctggaccgacatcgagcagttcagaagaatcacctacagagacagaaaccagagaaaggccaagagcatctacatcaagaacaagtacctgaacaagaagtacttcttcggccccaacagccccgccagcctgtaccagcagaaccaggtgatgcacctgagcggcggctggggcaagatcctgcacgagcagctggacgcccccgtgctggtggagatccagaagcacgtgcagaacagactggagaacgtgtggctgcccctgttcctggccagcgagcagttcgccgccagacagaagatcaaggtgcagatgaaggacatcgccgaggagctgctgctgcagaaggccgagaagaagatcggcgtgtggaagcccgtggagagcaagtggatcagcagcagctgcaagatcatcgccttcagaaaggccctgctgaaccccgtgaccagcagacagttccagagattcgtggccctgaagggcgacctgctggagaacggcctgctgttctggcaggaggtgcagaagtacaaggacctgtgccacagccactgcgacgagagcgtgatccagaagaagatcaccaccatcatcaactgcttcatcaacagcagcatcccccccgccctgcagatcgacatccccgtggagcaggcccagaagatcatcgagcacagaaaggagctgggcccctacgtgttcagagaggcccagatgaccatcttcggcgtgctgttcaagttctggccccagttctgcgagttcagaaagaacctgaccgacgagaacatcatgagcgtgctggagagaagacaggagtacaacaagcagaagaagaagctggccgtgctggaggacgagaagagcggcaaggacggcatcaagcagtacgccaacaccagcgtgcccgccatcaagaccgccctgctgagcgacagcttcctgggcctgcagccctacggcagacagcccacctggtgctacagcaagtacatcgaggccctggagcaggagagaatcctgctgaagatccaggaggagctggagaagaagctgttcgccggcctgcagcccctgaccaacttcaaggccagcagcagcaccatgagcctgaagaagaacatgagcgcccacagcagccagaagtag

SEQ ID NO: 187717 - DNA, 3795 bp, Artificial Sequence
  derived and/or modified sequence
atgcctgagaagcgtctgaccgcagagcctcccactatcaccgaggaagaattcgaggactccttggcaacagatgacttcttggtggattatttcaacgagttcttgtccctacctacattttctgaggctatcaggttcaacgcagactatggggtatttgaagtcgcaaacgacgcaccccagtttctggaaaaacaactcaaaaaaattttacaaaatcagcagcccaggaaccctatttatgacgtggttcggaagggtaagaacgaggtgaaaccagtgcagatgaacgctcctgatgaggatgagaccatcaatgttaattacaatatcatgtgtctatccagggaggagggaatcaaatggataaagaaagagcgcctcccagcatttctcgagtccgactgctactttgagtatcgtctcgcgaagctggtgagtcaagttcgatggtcaaagagcgggatgaattttacggtgggtagcaactttagcccgtggatagtaaaaaagccccctagcctcccaccgcccgctacggaagaggacaatctggttattatgaagaaattttatgtttctttgggggaggctagctacacccagacaaaagattggtttgccttggcaaagcagagtcaacagaccgtgtcaacattcagcctgccgtgttgtgtgccgtacaacaagctgaaatccccagctatcagttctgtctctgagaactttatctttgacgatggggtgcatcctcgcaccaagaaggatccctcaaaaactaacaagttaatctctgaatttgaagaagaagaaggcgaggaagaagaagtgtccgtatcgctgcaggataccccaagtcaagccctgttacgggtctacctagagaaaaaacaggacgttgacgaaagccttaccatgcacttctccacttgtgaggaattcctgtcgtcgtacatttacttcattctgaggggtgctattcagcagattgtaggcaagccagttggagagacgccagattatattaattttaataacattacgaaggtcagtttcgatgactgttttgaaagtattcatgggaagaattttctgagcgaactggtgcagactacaaaggagcgatctgaggaaattgagcaaacgtctctgtcttcaaagaatgagtctgcggggccggaaagccgggccgactggtgtatcagccatcggacttacgacattgggaaccggaaggagtttgagcggttcaagaagtttatcaagggcactcttggagagaggtattggtggctatggatggacatcgaaaggctcaaggtgcttaaggaccctggccgacaccagcggcacttagaaaagatgaagaaatgctatttggttagcaatggggactattatctaagcgccgagattctgagtaagttcaagcttttggatggatcacagtggaacgaggaacatctgcgcaacatccagagcgaagttctcaagcctctcttgctctattgggcccccagattctgtgtgacacacagtgcaagcacaaagtacgcctcagctgaactcaaattctggcacctccgccaggcaaagcccaggaaagacatagatcccttcccccagatggctacattacttcctctgagacccaagtcgtgtatcccacagatccctgagatacagaaggaggaattctctctcagccagccacctaagagcccaaacaagtcacccgaggtaaaaaccgcaactcagaagccttggaaaagggagctcctatatccgggctctagcaaggatgatgttattgagaaaggcagcaagtatatgagtgagtcctccaaagtcatccacttaaccagtttcacggatatttcagaatgcttgaagccacagcttgaccggcgctatgcctacactgaggaaccccgcgtcaaaaccgtgtccgatgtcggagctctagggggcagtgatatggaaaaccttttgcagtctctttacgtggaaaatcgcgccggatttttctttaccaagttttgtgagcactctggcaacaagctctggaagaactcagtttacttctggtttgatctgcaagcttatcaccagctgttttaccaagagacgctgcagcctttcaaggtttgcaaacaggcacagtatctgttcgccacttacgtggccccatcagccactcttgacattggactgcaacaggagaaaaagaaagagatttatatgaagattcagccaccatttgaggacctatttgatacagctgaggaatacatcctgctgcttttgctcgaaccatggaccaagatggttaaatccgatcagattgcttataaaaaggtagagcttgtcgaagagacccgccagctggacagcacatattttcgcaagttgcaggccctgcataaagaaaccttctccaagaaggcggaagataccacttgcgagatagggaccggcatcctaagcctctctaatgtatccaaaagaacggaatactgggataacgttcctgccgagtataaacacttcaaattcagcgaccttcttaataacaaactcgagttcgagcacttccggcagttcctggaaacacattcgtctagtatggatttaatgtgctggactgatatcgaacagttccgcagaataacttatcgcgatagaaaccagcgcaaagcgaagagtatttatatcaagaacaagtatctgaataaaaagtacttctttggccccaatagccctgcctctttgtatcagcagaatcaggttatgcacttgtctggcggatggggaaagattctgcatgagcagcttgatgcacctgtcctcgtggagatccagaagcacgtacaaaatcgccttgaaaatgtctggctgcccctgtttctcgcctcagagcagttcgccgctaggcaaaagattaaggtgcagatgaaggatatcgctgaagaactcctcttacagaaggcggagaagaagatcggggtctggaaacctgtggagagtaagtggatcagcagctcctgtaaaatcatcgcgttccgcaaagcgctgttgaaccccgtgacaagcaggcaatttcagaggttcgttgcccttaagggggacctgctggaaaacgggctgcttttctggcaagaagtccagaagtacaaagacctttgtcacagccactgcgatgaatccgtcattcaaaagaagattacaaccatcattaattgtttcattaatagtagtattcctcctgccctccagatcgatattcctgtggagcaggctcagaagattattgaacataggaaggaactcggcccatacgtgtttcgcgaagcgcagatgaccatttttggagttctgtttaagttttggccacagttttgcgagttccggaagaacctgactgacgagaatatcatgtctgtgctagagcgcaggcaggagtacaacaaacagaaaaaaaagcttgctgtgctggaggatgaaaagagcgggaaggatgggatcaaacagtacgccaacacctctgtgccagctatcaagaccgccttgctgtccgactctttcctgggattacagccctacggacgccagcctacatggtgttactcaaaatatatagaagctctcgaacaggagaggatattgctcaaaattcaggaagagctggaaaagaagctgttcgcaggcctccagcctctgacaaatttcaaagcttcgagcagcaccatgtctctaaaaaagaacatgagtgcacactcatcacagaagtag

SEQ ID NO: 187718 - DNA, 3795 bp, Artificial Sequence
  derived and/or modified sequence
atgcctgagaagaggctgacagctgagccccccaccatcacagaggaggagtttgaggacagcctggccacagatgacttcctggtggactacttcaatgagttcctgagcctgcccaccttcagcgaggccatccgcttcaatgctgactatggagtgtttgaggtggccaatgatgccccccagttcctggagaagcagctgaagaagatcctgcagaaccagcagcccaggaaccccatctatgatgtggtgaggaagggcaagaatgaggtgaagcctgtgcagatgaatgccccagatgaagatgagaccatcaacgtgaactacaacatcatgtgcctgagccgggaggagggcatcaagtggatcaagaaggagcggctgcctgccttcctggagagtgactgctactttgagtaccgcctggccaagctggtgtcccaggtgcgctggagcaagagcggcatgaacttcaccgtgggcagcaacttcagcccctggatcgtgaagaagccacccagcctgcccccaccagccacagaggaggacaacctggtgatcatgaagaagttctacgtgtccctgggggaggccagctacacccagaccaaggactggtttgccctggccaagcagagccagcagacagtgtccaccttcagcctgccctgctgcgtgccctacaacaagctgaagagccctgccatcagctctgtgtctgagaacttcatctttgatgatggagtgcaccccaggaccaagaaggaccccagcaagaccaacaagctgatcagcgagtttgaggaggaggagggggaggaggaggaggtgtctgtgtccctgcaggacacccccagccaggccctgctgcgggtgtacctggagaagaagcaggatgtggatgagagcctgaccatgcacttcagcacctgtgaggagttcctgagcagctacatctacttcatcctgcggggggccatccagcagatcgtgggcaagcctgtgggggagaccccagactacatcaacttcaacaacatcaccaaggtgtcctttgatgactgctttgagagcatccacggcaagaacttcctgtctgagctggtgcagaccaccaaggagaggtctgaggagattgagcagaccagcctgagcagcaagaatgaatctgctggccctgagagcagagctgactggtgcatcagccacaggacctatgacatcggcaacaggaaggagtttgagcgcttcaagaagttcatcaagggcaccctgggggagcgctactggtggctgtggatggacatcgagcggctgaaggtgctgaaggaccccggccgccaccagaggcacctggagaagatgaagaagtgctacctggtgtccaatggagactactacctgtctgctgagatcctgagcaagttcaagctgctggatggcagccagtggaatgaggagcacctgaggaacatccagagcgaggtgctgaagcccctgctgctgtactgggccccccgcttctgtgtgacccacagcgccagcaccaagtatgccagcgctgagctgaagttctggcacctgcggcaggccaagcccaggaaggacatcgaccccttcccccagatggccaccctgctgcccctgcggcccaagagctgcatcccccagatccctgagatccagaaggaggagttcagcctgagccagccccccaagagccccaacaagagccctgaggtgaagacagccacccagaagccctggaagcgggagctgctgtacccaggcagcagcaaggatgatgtgattgagaagggcagcaagtacatgtctgagagcagcaaggtgatccacctgaccagcttcacagacatcagtgaatgtctgaagccccagctggacagaagatatgcctacacagaggagccccgggtgaagacagtgtctgatgtgggcgccctgggcggcagtgacatggagaacctgctgcagagcctgtatgtggagaacagagctggcttcttcttcaccaagttctgtgagcacagcggcaacaagctgtggaagaacagcgtgtacttctggtttgacctgcaggcctaccaccagctgttctaccaggagaccctgcagcccttcaaggtgtgcaagcaggcccagtacctgtttgccacctacgtggcccccagcgccaccctggacatcggcctgcagcaggagaagaagaaggagatctacatgaagatccagcccccatttgaggacctgtttgacacagctgaggagtacatcctgctgctgctgctggagccctggaccaagatggtgaagagtgaccagatcgcctacaagaaggtggagctggtggaggagacccggcagctggacagcacctacttcaggaagctgcaggccctgcacaaggagaccttcagcaagaaggccgaggacaccacctgtgagatcggcaccggcatcctgagcctgagcaatgtgtccaagaggacagagtactgggacaacgtgcctgctgagtacaagcacttcaagttcagtgacctgctgaacaacaagctggagtttgagcacttccggcagttcctggagacccacagcagctccatggacctgatgtgctggacagacatcgagcagttccgccgcatcacctacagagacaggaaccagaggaaggccaagagcatctacatcaagaacaagtacctgaacaagaagtacttcttcggccccaacagccctgccagcctgtaccagcagaaccaggtgatgcacctgagcggcggctggggcaagatcctgcacgagcagctggatgcccctgtgctggtggagatccagaagcacgtgcagaaccggctggagaatgtgtggctgcccctcttcctggccagcgagcagtttgctgcccggcagaagatcaaggtgcagatgaaggacattgctgaggagctgctgctgcagaaggccgagaagaagattggagtgtggaagcctgtggagagcaagtggatcagcagcagctgcaagatcatcgccttcaggaaggccctgctgaaccctgtgaccagccggcagttccagagatttgtggccctgaagggggacctgctggagaatggcctgctcttctggcaggaggtgcagaagtacaaggacctgtgccacagccactgtgatgagagcgtcatccagaagaagatcaccaccatcatcaactgcttcatcaacagcagcatccccccagccctgcagattgacatccctgtggagcaggcccagaagatcatcgagcacaggaaggagctgggcccctacgtgttccgggaggcccagatgaccatcttcggcgtgctcttcaagttctggccccagttctgtgagttcaggaagaacctgacagatgagaacatcatgtctgtgctggagcggcggcaggagtacaacaagcagaagaagaagctggccgtgctggaggatgagaagagcggcaaggatggcatcaagcagtatgccaacacctctgtgcctgccatcaagacagccctgctgagtgacagcttcctgggcctgcagccctacggccggcagcccacctggtgctacagcaagtacatcgaggccctggagcaggagcgcatcctgctgaagatccaggaggagctggagaagaagctgtttgctggcctgcagcccctgaccaacttcaaggccagcagcagcaccatgagcctgaagaagaacatgtctgcccacagcagccagaagtag

SEQ ID NO: 187719 - DNA, 3795 bp, Artificial Sequence
  derived and/or modified sequence
atgcccgagaagcggctgaccgccgagccccccaccatcaccgaggaggaatttgaggatagtctggctacagacgactttctcgtcgactatttcaatgaattcctgagtttgcctactttttccgaggcaattaggttcaacgccgactacggggtttttgaggtcgctaacgacgctccccagttcttggaaaaacagctgaagaagatcctgcagaaccaacagcctcgcaacccaatctatgacgtcgtgcgaaagggcaagaatgaggtcaaacctgtccaaatgaacgccccagacgaggacgagacgattaacgtgaactacaacattatgtgcctgtcacgcgaagaaggaatcaaatggatcaaaaaagaacgtctaccagcgtttctggagtctgattgctacttcgagtaccgtctcgcaaagcttgtttcccaggtgcgatggagtaagagcgggatgaacttcacagtagggtccaattttagtccttggattgtgaagaagcctccttctttgcccccaccagcgactgaggaggacaacctggtgattatgaagaagttttacgtgtccctgggagaagcctcatatacgcagaccaaagactggtttgcactcgctaaacagagccagcagaccgtatccaccttctccctgccgtgctgtgtcccctataacaaactgaaatcgcctgcaatatcttccgtgtctgaaaacttcatattcgacgacggggtgcatccacggaccaaaaaggatccctctaaaaccaataagttaatatcagagtttgaagaagaagagggcgaagaagaagaagtctctgtttcactccaggataccccctctcaggcactgttgcgagtgtacctggaaaagaagcaagacgtggacgagagcctgaccatgcactttagcacatgtgaggaattcctgagcagctacatctatttcattctccggggggcaattcagcagatcgtcggcaagccggtaggtgagacacccgactatatcaatttcaacaacataaccaaggtgtccttcgatgactgcttcgagtctattcacgggaaaaactttctgagcgagctcgtccaaaccacaaaggaacgctccgaggaaattgaacagacctctttgtctagcaaaaacgaatctgctgggcctgaaagtcgggccgattggtgtattagtcatagaacttatgacatcggtaacagaaaggaatttgagaggtttaaaaagttcattaaaggaaccttaggcgagcggtactggtggctctggatggatatagaacgcttgaaggtcttaaaagacccagggcggcaccagagacacctggagaagatgaaaaaatgttatctggtgtccaacggggactattacctctcggccgagattctctcaaagttcaagctcctggacggtagtcaatggaacgaagaacatcttcgcaatatccagagcgaggtcctaaagcctctactactttattgggctccacgcttctgcgtcactcactcggcgagcactaagtatgcgtcagccgaactgaagttctggcatctccgtcaagctaagccgcgcaaggacattgacccgtttccgcagatggccacccttctgcctctcagaccaaaaagctgtataccacagatacccgagatccagaaggaggagtttagcctgtcccagcctcccaaatccccgaacaaaagcccagaagttaagaccgcgactcagaaaccatggaagcgcgagctgctgtacccagggtctagcaaagacgacgtcatcgagaaagggtccaaatacatgtccgagtcaagtaaagtcatccacctcacctcatttaccgacatatccgagtgcctgaagcctcagctggaccggcggtatgcctatactgaggagcctcgtgtgaaaacagtctcagacgtcggcgcgctcggaggcagcgacatggagaacttactgcaatccctctacgtggagaacagggctgggttctttttcacaaagttttgcgagcactccgggaacaaactgtggaaaaactccgtgtacttttggtttgacctgcaggcctatcaccaactgttttatcaagagacgctccagcctttcaaagtatgtaagcaggcccagtaccttttcgccacgtatgtcgccccaagtgccactctggatattggcctgcaacaagaaaaaaaaaaagagatctatatgaagatacagcctccgtttgaggatctgtttgatacggccgaggaatatattcttctgctgcttttggaaccctggacgaaaatggtgaagtccgaccagatcgcctataaaaaggtggagttggtggaagaaactagacagcttgactccacgtatttccgcaaactgcaggcgctgcataaagagaccttcagcaaaaaagcggaggataccacatgtgaaattggaaccgggattctctccttgagcaatgtctcgaagcgtaccgagtactgggacaacgttccagctgaatataaacacttcaaattctcggacctgctaaacaacaagctggaattcgagcatttccgccaatttctggagacacattctagctctatggaccttatgtgttggaccgatatcgaacagtttcgacggataacatatcgagaccggaatcagagaaaggccaaaagcatctacattaagaacaagtacctaaacaagaaatacttcttcggacccaacagtcccgccagtctctaccagcaaaatcaggtcatgcacttgtccggcggttggggtaaaatcctgcatgagcaactggacgctccagtgctggtcgaaatacagaagcacgtccaaaataggctggaaaatgtttggctacctttattcttagcttcagagcagttcgccgccaggcagaagatcaaagtgcagatgaaagatatcgcggaagagttgctgctgcaaaaggccgagaagaagatcggcgtttggaagccagttgaaagtaagtggatctccagcagctgtaaaatcatcgctttccgtaaagcgcttctgaaccccgttacttcgcggcagtttcagagatttgttgccctgaagggcgatctgctcgaaaatggtctattattctggcaggaggtgcaaaaatacaaagacctctgccattcacattgtgatgaaagtgtgatacagaaaaaaattaccacaataataaattgcttcataaatagctctatcccccctgcacttcagatagatattccagttgaacaggctcaaaagatcatcgaacaccgaaaggagcttggcccctacgtgtttcgcgaagcccagatgactattttcggcgtgctcttcaagttctggccacagttctgcgagtttcgtaaaaaccttaccgacgagaacattatgagcgtgctggaaagacgccaggagtacaataaacagaagaaaaagctggccgtgctggaggatgagaagagtgggaaagacgggattaagcagtatgccaatacaagcgttcccgcaatcaaaacggctctgttgagtgatagtttccttgggctacaaccttacgggcggcaacctacctggtgttattctaagtatattgaggcactcgaacaggagagaatattgttaaagatccaggaggagttggaaaagaagctcttcgccggcttgcagcccttgaccaatttcaaggcgtccagcagcactatgagccttaaaaaaaatatgagcgcccattcttcccagaagtag

SEQ ID NO: 187720 - DNA, 3795 bp, Artificial Sequence
  derived and/or modified sequence
atgcccgagaaacgcttaaccgcagaacccccaacaatcaccgaggaagaattcgaggactctctggctactgatgattttctagtggactacttcaatgaattcttatccctacctacattttcagaagccattaggtttaatgcagactatggggtcttcgaggtggccaacgatgcgcctcagttcctagaaaagcagttgaaaaaaatacttcaaaatcagcagccaagaaaccctatctatgatgtggtcagaaagggaaaaaacgaggtcaagcctgtgcaaatgaatgctcctgacgaggacgaaacaattaacgtaaactataatatcatgtgtctgagcagggaagagggcataaagtggattaaaaaagaaagactaccagccttcctggagagtgattgctacttcgagtatcgactggccaagctcgtgtctcaagtgcgttggagtaagtctggcatgaactttactgtgggtagcaatttcagtccttggattgtgaagaagccaccttctctcccacccccagccaccgaggaggataacctggtgatcatgaaaaagttctacgtgagcttgggagaggccagctacactcagaccaaggattggtttgccctcgcgaaacagtcacaacagacagtcagcacattcagtttaccctgttgtgtgccgtacaacaagctcaagagccctgctataagctccgtgagcgaaaattttattttcgatgacggtgtccaccccagaacaaagaaagatccgtctaagaccaacaaactcatttcggagtttgaggaggaggagggcgaggaagaggaggtatccgtgtccctgcaggacactccctctcaggcacttttgcgggtgtatttagagaaaaagcaggacgtcgatgaatccctcacgatgcactttagcacgtgcgaagagttcctttctagctatatctactttatattgaggggcgctatccagcagattgttgggaaacccgttggagagactccagactacatcaactttaacaatattacgaaggtgtccttcgatgattgtttcgagagtatccacggcaagaacttcctctctgaacttgtccagactaccaaggagcggtcagaagaaatcgagcagacaagcctgtcctccaaaaatgagtccgctggacctgagagccgtgccgactggtgcattagccacagaacatacgacatcgggaataggaaggagttcgaaaggttcaagaagtttatcaagggaaccctgggcgagcggtactggtggctgtggatggatattgaacggctgaaggtactcaaggacccgggtagacatcagcggcatctggaaaagatgaaaaagtgttacctggtgtccaacggggattattatctcagtgcagagatactgtccaagttcaaactgctcgacggcagccagtggaacgaggagcacctgaggaacattcagtcggaagtgctgaagccgctcctcctctactgggctcccagattttgtgtgacacattcagcatctaccaagtatgcctccgccgagctcaagttctggcatctgcgccaggcgaaaccacgaaaggacatcgatccatttccccagatggcaacgttactgcctctgcggccaaagagttgtatccctcagatccctgagattcagaaggaagagttctccttgagtcagccgcctaagtcacccaacaaatccccagaggtgaaaaccgccacacagaagccctggaagcgtgagctgctgtatcctggctcatcaaaggatgacgtgatcgagaaaggctccaagtacatgagtgaatcatcgaaagtcattcatctcacgtctttcactgatatctccgagtgcctgaagccccagctggataggcggtacgcctacacagaggagccgagagtcaaaaccgttagcgatgtcggtgccctgggcggatcagatatggaaaacctcctgcagagcctatatgtggaaaacagagcgggattctttttcacgaaattctgtgaacatagcggcaataaattgtggaagaactctgtctacttctggtttgacctgcaagcatatcatcaacttttctatcaagagactttacagccatttaaggtctgcaagcaagcacagtacctgttcgctacttacgtggccccttctgccaccttagatatcggcctgcagcaggagaaaaagaaagagatttacatgaaaattcaaccccctttcgaagatttattcgatactgcggaggaatatatactccttctcctgctggagccctggacgaaaatggtgaagtcagaccaaattgcctataagaaagtcgagctggtggaggagaccaggcagctagactctacctatttcagaaaattacaagccctccacaaggagaccttttcgaaaaaggcggaggatactacctgtgaaataggcaccggcattttgtctctttccaatgtgagcaagaggacggagtactgggacaatgtcccggctgagtataaacatttcaagtttagtgatctcctgaacaataaattagagttcgaacactttcgtcagttcttggaaacccacagctcttcaatggacttgatgtgctggacggacattgaacagttccgtcggatcacttacagagaccggaatcagcgcaaggcaaaatccatatatataaagaataagtaccttaacaaaaagtacttttttggccctaacagcccagcatctctctatcagcagaaccaggtgatgcatctgtccgggggatggggtaaaatacttcacgaacagctggacgctcccgtgctcgtggaaattcagaaacacgtccaaaatcgcttggaaaatgtgtggctccccctcttcctggcctccgagcaatttgctgctaggcaaaaaataaaggtccagatgaaagatatcgccgaggagctcctactgcagaaagccgagaagaagatcggagtatggaagcccgtcgaatctaagtggatcagttcaagttgtaagataatcgctttccggaaagcactgttgaaccctgttacaagtaggcagtttcagcgtttcgtggccttgaagggcgatctcctggaaaatggattacttttttggcaggaggttcagaagtataaggatttgtgccattcccattgtgacgagtcagttatacagaagaagattacaacaattatcaactgcttcatcaactctagtattcctccagccctacagatcgacatccccgttgagcaggcacaaaagatcattgaacacagaaaggagctaggcccatacgtgtttcgcgaagctcaaatgacaatattcggcgtcctgtttaagttctggccacagttttgtgagttccgaaaaaatctgaccgacgagaacataatgtcagtgctggaacgtcgccaagagtacaataagcaaaagaagaaacttgccgtcttggaagatgagaagagcggcaaagatggcattaagcagtacgccaatacttctgtgccagcgataaaaaccgccctgttatcggatagcttcctcggtttgcagccctatggtaggcagcccacctggtgctatagtaagtatatcgaagctttggagcaagaacggattcttttgaagattcaggaagaattagagaagaagctctttgctggattacagcctttaacgaacttcaaagcgagcagttccacaatgagcctgaagaagaacatgtccgcacactcgtcccagaaatag

SEQ ID NO: 187721 - DNA, 4296 bp, Artificial Sequence
  derived and/or modified sequence
ccggcctcggcctccctgggcggccgtattgtctaagctccatagcaaccccggcgcggcgccggccacgctagccagcgtagctccggagcccgcgcgccgtcgccgcgtcgctcaggccctgacccgcgctggacccgcgcgctagggccctgacggcccgcgcgggctccaggcgcgggcagcggggacggcatgcccgagaagaggctcaccgcggagccaccaactattacagaagaagaatttgaagattctctggcaacagatgatttccttgtagactactttaatgaattcctaagccttccaaccttttcagaggcaattagatttaatgcagattatggagtttttgaagtagctaatgatgctccacaatttctggaaaaacaactgaaaaaaattctacaaaaccagcaacctcgaaatcccatttatgatgttgtaaggaaaggaaagaatgaggttaaacctgttcaaatgaatgcccccgatgaagatgagaccattaatgtcaactacaatattatgtgtctcagtcgtgaagaaggtattaagtggatcaaaaaagaaagacttccagcatttctggaaagtgattgttactttgaatacaggttagccaaattggtctcacaagtaagatggagcaagtccggcatgaatttcacagtaggatcaaatttttctccctggatcgtgaaaaaaccacccagtctaccacctcctgccactgaagaagataatcttgtaattatgaaaaagttctatgtatcacttggtgaggcttcctatactcaaacaaaagattggtttgcattagcaaaacaaagtcagcaaacagtatcaaccttttcgttaccctgttgtgtaccctacaacaaacttaaatcaccagctatttcatctgtttctgagaattttatctttgatgatggagttcaccctaggacaaaaaaggacccatctaaaaccaacaaattgatttctgaatttgaagaagaagaaggagaagaagaagaggtgtctgtatctctacaagacactccttctcaagctcttctgagagtataccttgaaaagaaacaggatgttgatgaaagcctgacaatgcatttctcaacatgtgaagaatttttaagctcctatatatactttattttgagaggagcaattcagcaaattgttggaaagccagttggagaaaccccagactatataaacttcaacaatataacaaaagtgtcatttgatgattgttttgagtctattcatggcaagaattttttaagtgaattagttcaaactacaaaggagaggtcagaagagatagaacaaacaagtttaagttcaaagaatgagagcgctggaccagagagcagggcggactggtgtatttctcataggacttatgacattggcaatagaaaggagtttgaaagatttaagaaatttataaaaggtacattgggagagagatattggtggctatggatggatattgagaggttaaaagttcttaaggatcctggaagacatcaaagacatcttgagaagatgaaaaaatgctatctagtgagcaatggagattactacctttctgcagaaatcttatcaaaatttaaactgttagatggatcacagtggaatgaagagcatttaagaaatattcagtctgaagttttaaaacctttacttctgtattgggcaccaagattctgtgttactcattcagcctcaacaaaatatgctagtgctgaactgaaattctggcacctccgtcaagcaaaaccaaggaaggatattgacccttttccacaaatggcaaccctcttgccattaagacccaaatcttgcattccacagatacctgagatccagaaagaagaattcagcttatcacaacctcctaaatctcccaataaatcacctgaagtaaaaacagcaactcaaaagccttggaagcgggagcttttgtatccaggttcttctaaggatgatgtgattgagaaagggtcaaagtacatgtcagaaagcagcaaagtcattcatttaacatcttttactgacatttctgaatgtctcaagccccagctggatagaagatacgcttatacagaagaacctagggttaaaaccgtgtcagatgttggtgccttgggaggatctgacatggaaaatttgttgcaatctttgtatgtagaaaatagagctggattcttctttactaaattctgcgagcattcagggaacaagttgtggaagaacagtgtgtacttttggtttgacctgcaggcttatcatcagcttttctaccaagaaacacttcagccttttaaagtatgcaagcaagcgcaatatctttttgccacatacgttgctccttctgccactcttgacattggactccaacaggaaaagaaaaaagaaatttatatgaaaatacagccaccatttgaagacctttttgacacagcagaggaatatatccttctcctccttcttgagccatggacaaagatggtaaaatcggaccaaattgcttataaaaaggtggagctggtggaagaaactcgacagttagactccacatacttcagaaagctacaggctttgcataaagagacattttccaagaaagctgaggacaccacttgtgaaattggaactggcattttatcactctctaacgtctctaaacgaacagaatattgggataatgttcctgcagaatacaagcattttaagtttagtgatctgcttaacaacaaactggagtttgaacatttccgtcagtttcttgagactcattcttcaagcatggatcttatgtgctggacagacattgagcagttccggagaataacttacagagatcgaaatcaaaggaaggcaaaatctatatacattaaaaacaaataccttaataaaaaatatttctttggacccaacagtccagcttctctgtatcagcagaaccaggtaatgcatttaagtggtggctgggggaagattcttcatgagcagcttgatgcacctgttctagttgaaatccagaagcatgtgcaaaataggctagaaaatgtatggctgccattgtttcttgcaagtgaacagtttgcagcacgtcagaagataaaggtacagatgaaagacatagcagaagagctcttactacagaaggctgaaaagaaaatcggggtctggaagcctgtggagagtaagtggatctcttcatcttgtaaaatcattgcttttcgcaaagcattattgaatccagttacttcaagacaatttcaacgttttgtggctctaaaaggagatttattggaaaatggtttactcttttggcaagaagtacaaaaatataaggacttgtgccattctcattgtgatgagtctgtcatccagaagaagattacaactattatcaactgctttattaattccagtattccaccagctttacaaattgacattccagtagagcaagcccagaagattattgaacaccggaaggagttaggaccatatgtatttagagaggcacagatgacaatttttggggttctgtttaaattctggcctcagttctgtgagtttaggaagaatttaacagatgaaaatattatgagtgttttagagagaagacaagaatataataagcagaaaaaaaaattggcagtcctagaagacgaaaaatctggaaaggatggaatcaaacaatatgcaaatacttcagtgcctgctatcaaaactgctttactcagtgattccttcctaggcctccaaccatatggccgacagccaacctggtgctactcaaagtatatagaagccttagaacaggagagaattcttcttaagatccaagaagaactagaaaaaaagttgtttgcaggcttgcaacctctcacaaattttaaggctagctcttcaactatgtctttgaaaaagaatatgtctgcccacagcagccagaagtgacagcattcttgtgaatgtttacatcctgctgctgataggttcaaggaattctttaaaccagattctgctgacatgagaagctccagtgatttgtttttttgaaggtctgtatcagagcaagcctaacatctaaataaagtttgattctggattttccaggtgggaaataaataaagaaaatttggcttgtcttactctcgcagttttaaaattatagctattctgtacacatgacatacaagactataagaactgtttaacttatttagaataaaacaactactatctaggtttgaagaaccaaaa

SEQ ID NO: 187722 - protein, 573 aa, Artificial Sequence
  derived and/or modified sequence
MKETIQGTGSWGPEPPGPGIPPAYSSPRRERLRWPPPPKPRLKSGGGFGPDPGSGTTVPARRLPVPRPSFDASASEEEEEEEEEEDEDEEEEVAAWRLPPRWSQLGTSQRPRPSRPTHRKTCSQRRRRAMRAFRMLLYSKSTSLTFHWKLWGRHRGRRRGLAHPKNHLSPQQGGATPQVPSPCCRFDSPRGPPPPRLGLLGALMAEDGVRGSPPVPSGPPMEEDGLRWTPKSPLDPDSGLLSCTLPNGFGGQSGPEGERSLAPPDASILISNVCSIGDHVAQELFQGSDLGMAEEAERPGEKAGQHSPLREEHVTCVQSILDEFLQTYGSLIPLSTDEVVEKLEDIFQQEFSTPSRKGLVLQLIQSYQRMPGNAMVRGFRVAYKRHVLTMDDLGTLYGQNWLNDQVMNMYGDLVMDTVPEKVHFFNSFFYDKLRTGYDGVKRWTKNVDIFNKELLLIPIHLEVHWSLISVDVRRRTITYFDSQRTLNRRCPKHIAKYLQAEAVKKDRLDFHQGWKGYFKMNVARQNNDSDCGAFVLQYCKHLALSQPFSFTQQDMPKLRRQIYKELCHCKLTV

SEQ ID NO: 187723 - protein, 574 aa, Artificial Sequence
  derived and/or modified sequence
MKETIQGTGSWGPEPPGPGIPPAYSSPRRERLRWPPPPKPRLKSGGGFGPDPGSGTTVPARRLPVPRPSFDASASEEEEEEEEEEDEDEEEEVAAWRLPPRWSQLGTSQRPRPSRPTHRKTCSQRRRRAMRAFRMLLYSKSTSLTFHWKLWGRHRGRRRGLAHPKNHLSPQQGGATPQVPSPCCRFDSPRGPPPPRLGLLGALMAEDGVRGSPPVPSGPPMEEDGLRWTPKSPLDPDSGLLSCTLPNGFGGQSGPEGERSLAPPDASILISNVCSIGDHVAQELFQGSDLGMAEEAERPGEKAGQHSPLREEHVTCVQSILDEFLQTYGSLIPLSTDEVVEKLEDIFQQEFSTPSRKGLVLQLIQSYQRMPGNAMVRGFRVAYKRHVLTMDDLGTLYGQNWLNDQVMNMYGDLVMDTVPEKVHFFNSFFYDKLRTKGYDGVKRWTKNVDIFNKELLLIPIHLEVHWSLISVDVRRRTITYFDSQRTLNRRCPKHIAKYLQAEAVKKDRLDFHQGWKGYFKMNVARQNNDSDCGAFVLQYCKHLALSQPFSFTQQDMPKLRRQIYKELCHCKLTV

SEQ ID NO: 187724 - DNA, 1722 bp, Artificial Sequence
  derived and/or modified sequence
atgaaggagaccatccagggcaccggcagctggggccccgagccccccggccccggcatcccccccgcctacagcagccccagaagagagagactgagatggccccccccccccaagcccagactgaagagcggcggcggcttcggccccgaccccggcagcggcaccaccgtgcccgccagaagactgcccgtgcccagacccagcttcgacgccagcgccagcgaggaggaggaggaggaggaggaggaggaggacgaggacgaggaggaggaggtggccgcctggagactgccccccagatggagccagctgggcaccagccagagacccagacccagcagacccacccacagaaagacctgcagccagagaagaagaagagccatgagagccttcagaatgctgctgtacagcaagagcaccagcctgaccttccactggaagctgtggggcagacacagaggcagaagaagaggcctggcccaccccaagaaccacctgagcccccagcagggcggcgccaccccccaggtgcccagcccctgctgcagattcgacagccccagaggcccccccccccccagactgggcctgctgggcgccctgatggccgaggacggcgtgagaggcagcccccccgtgcccagcggcccccccatggaggaggacggcctgagatggacccccaagagccccctggaccccgacagcggcctgctgagctgcaccctgcccaacggcttcggcggccagagcggccccgagggcgagagaagcctggccccccccgacgccagcatcctgatcagcaacgtgtgcagcatcggcgaccacgtggcccaggagctgttccagggcagcgacctgggcatggccgaggaggccgagagacccggcgagaaggccggccagcacagccccctgagagaggagcacgtgacctgcgtgcagagcatcctggacgagttcctgcagacctacggcagcctgatccccctgagcaccgacgaggtggtggagaagctggaggacatcttccagcaggagttcagcacccccagcagaaagggcctggtgctgcagctgatccagagctaccagagaatgcccggcaacgccatggtgagaggcttcagagtggcctacaagagacacgtgctgaccatggacgacctgggcaccctgtacggccagaactggctgaacgaccaggtgatgaacatgtacggcgacctggtgatggacaccgtgcccgagaaggtgcacttcttcaacagcttcttctacgacaagctgagaaccggctacgacggcgtgaagagatggaccaagaacgtggacatcttcaacaaggagctgctgctgatccccatccacctggaggtgcactggagcctgatcagcgtggacgtgagaagaagaaccatcacctacttcgacagccagagaaccctgaacagaagatgccccaagcacatcgccaagtacctgcaggccgaggccgtgaagaaggacagactggacttccaccagggctggaagggctacttcaagatgaacgtggccagacagaacaacgacagcgactgcggcgccttcgtgctgcagtactgcaagcacctggccctgagccagcccttcagcttcacccagcaggacatgcccaagctgagaagacagatctacaaggagctgtgccactgcaagctgaccgtgtag

SEQ ID NO: 187725 - DNA, 1725 bp, Artificial Sequence
  derived and/or modified sequence
atgaaggagaccatccagggcaccggcagctggggccccgagccccccggccccggcatcccccccgcctacagcagccccagaagagagagactgagatggccccccccccccaagcccagactgaagagcggcggcggcttcggccccgaccccggcagcggcaccaccgtgcccgccagaagactgcccgtgcccagacccagcttcgacgccagcgccagcgaggaggaggaggaggaggaggaggaggaggacgaggacgaggaggaggaggtggccgcctggagactgccccccagatggagccagctgggcaccagccagagacccagacccagcagacccacccacagaaagacctgcagccagagaagaagaagagccatgagagccttcagaatgctgctgtacagcaagagcaccagcctgaccttccactggaagctgtggggcagacacagaggcagaagaagaggcctggcccaccccaagaaccacctgagcccccagcagggcggcgccaccccccaggtgcccagcccctgctgcagattcgacagccccagaggcccccccccccccagactgggcctgctgggcgccctgatggccgaggacggcgtgagaggcagcccccccgtgcccagcggcccccccatggaggaggacggcctgagatggacccccaagagccccctggaccccgacagcggcctgctgagctgcaccctgcccaacggcttcggcggccagagcggccccgagggcgagagaagcctggccccccccgacgccagcatcctgatcagcaacgtgtgcagcatcggcgaccacgtggcccaggagctgttccagggcagcgacctgggcatggccgaggaggccgagagacccggcgagaaggccggccagcacagccccctgagagaggagcacgtgacctgcgtgcagagcatcctggacgagttcctgcagacctacggcagcctgatccccctgagcaccgacgaggtggtggagaagctggaggacatcttccagcaggagttcagcacccccagcagaaagggcctggtgctgcagctgatccagagctaccagagaatgcccggcaacgccatggtgagaggcttcagagtggcctacaagagacacgtgctgaccatggacgacctgggcaccctgtacggccagaactggctgaacgaccaggtgatgaacatgtacggcgacctggtgatggacaccgtgcccgagaaggtgcacttcttcaacagcttcttctacgacaagctgagaaccaagggctacgacggcgtgaagagatggaccaagaacgtggacatcttcaacaaggagctgctgctgatccccatccacctggaggtgcactggagcctgatcagcgtggacgtgagaagaagaaccatcacctacttcgacagccagagaaccctgaacagaagatgccccaagcacatcgccaagtacctgcaggccgaggccgtgaagaaggacagactggacttccaccagggctggaagggctacttcaagatgaacgtggccagacagaacaacgacagcgactgcggcgccttcgtgctgcagtactgcaagcacctggccctgagccagcccttcagcttcacccagcaggacatgcccaagctgagaagacagatctacaaggagctgtgccactgcaagctgaccgtgtag

SEQ ID NO: 187726 - DNA, 1722 bp, Artificial Sequence
  derived and/or modified sequence
atgaaagagacgatacaggggactggctcatggggcccagagccgccaggcccaggaatacctcctgcatactcgagcccacgcagggagaggcttagatggccccctcctcctaagccgagattaaagagcggggggggcttcgggccagaccccggatccggcaccaccgttcccgccagaaggctaccagtacccaggcccagcttcgacgcaagcgcctcggaagaagaagaggaggaggaggaagaagaggatgaggatgaggaggaagaggtagcagcttggcgcctgcccccacgatggtcacaactgggcacaagccagcggcccagaccctcaagacccacccataggaaaacatgttcgcagaggcgcagaagggctatgagagcttttagaatgctgctgtacagcaagagtacctctctgacctttcattggaagctgtggggccggcaccgcgggagacggaggggccttgctcatcccaaaaatcatctgtcaccccagcaaggcggcgctaccccgcaggtcccaagcccctgttgtcgatttgatagccctcgtggccccccgcccccccggctgggattgctcggggctctcatggccgaggatggcgttcgggggtctccgcccgtcccgtctggtccgcccatggaggaagatggattacgctggacacctaagtcccccttggaccccgactccggcttgctatcctgcactttgcctaacggattcggcgggcagagcggtcccgaaggggaacggtctctggcacccccagatgcctccatcctgatctccaatgtctgcagcatcggtgaccatgtcgctcaggagctgttccagggaagtgaccttgggatggcagaggaggccgagagaccgggagaaaaagcaggacagcacagtccattacgcgaggagcacgtaacttgtgtgcagagcattttggatgaattcctgcagacctacggatctctgataccactgagtaccgacgaagttgtcgagaagctggaggacatcttccagcaggagttttccaccccaagtcgtaaggggttggttctccagcttatccagagctaccagaggatgcctggaaacgcaatggtacgggggttcagagtcgcttataagcgccatgtgctaacgatggatgacctggggaccttgtatggtcagaattggcttaacgatcaggtgatgaacatgtacggcgacctggtgatggacactgtgccagaaaaagtacactttttcaactcattcttttatgacaagttgaggactgggtacgatggagtgaagcggtggaccaagaatgtggatatcttcaacaaagaacttctgctgattcccattcacctggaggtacattggagcctgatttcagtcgacgtgcggcgcaggacaattacttattttgactcccagcgcacgctcaacagaagatgccccaagcacatcgccaaatatcttcaggcagaagcggtgaagaaggatcgactggacttccatcagggctggaagggctattttaaaatgaacgtggcgcggcaaaacaatgatagcgattgtggtgctttcgttttgcagtactgtaaacatctggcgttgtcacagcctttttcgttcacccagcaggatatgcccaagctccgcagacaaatatataaggagctctgccattgtaaactcacagtatag

SEQ ID NO: 187727 - DNA, 1725 bp, Artificial Sequence
  derived and/or modified sequence
atgaaggagacgattcagggcacagggtcttggggtccagagcctccaggacccggaatacctccagcctattctagcccgcgacgggagcggctgcggtggccacctcccccaaagcctcgcctgaagtcaggtggtggcttcggacccgaccccgggagtggaactacagtccctgcacggcgacttcctgttccgcggccctcctttgacgcatctgcaagcgaggaagaggaggaagaggaagaagaggaggatgaggatgaagaggaggaggttgccgcctggcgactcccgccacggtggtcgcaattgggaacgagccagcgcccccgtccttcacgacccactcaccgcaagacatgtagtcagaggcgacgcagagccatgcgagcgtttcgaatgctgctgtactcaaaatccaccagtctgaccttccactggaaactgtggggaaggcaccgtggccgaagaagaggcctggcccatcctaagaatcacctgagtccgcagcaggggggggctaccccgcaggtaccgagcccgtgttgcaggtttgactcaccccgcggaccacccccccccaggctagggctcctaggcgccctaatggcagaagacggagtgagaggcagtccaccggtccccagcgggccccctatggaagaggacggccttcggtggactccaaaatcaccattagatcccgattcagggctgctcagctgtacgctgcctaatggattcggcggacagagtggaccggagggggagagaagcctcgccccacccgacgcttctatccttataagcaacgtgtgctccatcggcgaccatgtagcgcaagagctgtttcagggctcggacctgggaatggccgaggaagccgaacggcccggagaaaaagccgggcaacatagtcctctgagggaagaacacgtcacctgcgttcagtcgatactcgacgaatttttacagacatatgggagtcttatccctctcagtacggacgaagtggtggagaagctcgaggacattttccagcaggagttttctacaccaagccggaaaggactggttctgcagctgattcaatcctaccagagaatgccaggtaacgcaatggtgcgggggttccgggtagcttacaagcgacatgtactcacgatggatgatctggggacactgtacggccagaactggttaaatgaccaggttatgaacatgtacggcgacttagttatggacactgtcccagagaaggtgcacttttttaatagttttttctatgacaagctcaggaccaaagggtacgatggcgtgaagcgctggacaaaaaatgttgatatctttaacaaggagctgcttctcatcccaatccacctggaagtccattggtcactgattagcgtagacgtaagacggcggaccatcacgtattttgactctcagcggacactcaaccgacggtgcccaaagcatatagctaagtaccttcaggccgaggccgtcaagaaggataggctcgactttcaccagggctggaaggggtacttcaagatgaacgtcgcgagacagaacaatgactcagactgcggcgcttttgttctgcaatactgtaaacacctcgcgctttcgcagccattctctttcactcagcaggacatgccaaaactcaggaggcagatctataaggaactttgccattgtaaacttactgtctag

SEQ ID NO: 187728 - DNA, 1722 bp, Artificial Sequence
  derived and/or modified sequence
atgaaggagaccatccagggcaccggctcctggggccctgagcccccaggccctggcatccccccagcctacagcagcccccggcgggagcggctgcgctggcccccaccacccaagccccggctgaagagcggcggcggcttcggccctgaccccggcagcggcaccaccgtgcctgcccggcggctgcctgtgccccggcccagctttgatgccagcgccagcgaggaggaggaggaggaggaggaggaggaggatgaagatgaggaggaggaggtggccgcctggaggctgcccccacgctggagccagctgggcaccagccagaggccccggcccagccggcccacccacaggaagacctgcagccagaggagaagaagagccatgagggccttcaggatgctgctgtacagcaagagcaccagcctgaccttccactggaagctgtggggccgccaccggggcagaagaagaggcctggcccaccccaagaaccacctgagcccccagcagggcggggccaccccccaggtgcccagcccctgctgccgctttgacagcccccggggccccccaccaccccggctgggcctgctgggcgccctgatggccgaggatggagtgcggggcagcccccctgtgcccagcggcccccccatggaggaggatggcctgcgctggacccccaagagccccctggaccctgacagcggcctgctgagctgcaccctgcccaatggatttggaggccagagcggccctgagggggagaggagcctggcccccccagatgccagcatcctgatcagcaatgtgtgcagcatcggggaccacgtggcccaggagctgttccagggcagtgacctgggcatggccgaggaggccgagaggcctggagagaaggccggccagcacagccccctgcgggaggagcacgtgacctgtgtgcagagcatcctggatgagttcctgcagacctacggcagcctcatccccctgagcacagatgaggtggtggagaagctggaggacatcttccagcaggagttcagcacccccagcaggaagggcctggtgctgcagctgatccagagctaccagaggatgcctggaaatgccatggtgcggggcttccgggtggcctacaagagacatgtgctgaccatggatgacctgggcaccctgtatggccagaactggctgaatgaccaggtgatgaacatgtacggggacctggtgatggacacagtgcctgagaaggtgcacttcttcaacagcttcttctatgacaagctgaggacaggctatgatggagtgaagcgctggaccaagaatgtggacatcttcaacaaggagctgctgctgatccccatccacctggaggtgcactggagcctcatctctgtggatgtgagaagaaggaccatcacctactttgacagccagaggaccctgaacagacgctgccccaagcacatcgccaagtacctgcaggccgaggccgtgaagaaggaccggctggacttccaccagggctggaagggctacttcaagatgaatgtggcccggcagaacaatgacagcgactgtggggcctttgtgctgcagtactgcaagcacctggccctgagccagcccttctccttcacccagcaggacatgcccaagctgcggcggcagatctacaaggagctgtgccactgcaagctgactgtgtag

SEQ ID NO: 187729 - DNA, 1725 bp, Artificial Sequence
  derived and/or modified sequence
atgaaggagaccatccagggcaccggctcctggggccctgagcccccaggccctggcatccccccagcctacagcagcccccggcgggagcggctgcgctggcccccaccacccaagccccggctgaagagcggcggcggcttcggccctgaccccggcagcggcaccaccgtgcctgcccggcggctgcctgtgccccggcccagctttgatgccagcgccagcgaggaggaggaggaggaggaggaggaggaggatgaagatgaggaggaggaggtggccgcctggaggctgcccccacgctggagccagctgggcaccagccagaggccccggcccagccggcccacccacaggaagacctgcagccagaggagaagaagagccatgagggccttcaggatgctgctgtacagcaagagcaccagcctgaccttccactggaagctgtggggccgccaccggggcagaagaagaggcctggcccaccccaagaaccacctgagcccccagcagggcggggccaccccccaggtgcccagcccctgctgccgctttgacagcccccggggccccccaccaccccggctgggcctgctgggcgccctgatggccgaggatggagtgcggggcagcccccctgtgcccagcggcccccccatggaggaggatggcctgcgctggacccccaagagccccctggaccctgacagcggcctgctgagctgcaccctgcccaatggatttggaggccagagcggccctgagggggagaggagcctggcccccccagatgccagcatcctgatcagcaatgtgtgcagcatcggggaccacgtggcccaggagctgttccagggcagtgacctgggcatggccgaggaggccgagaggcctggagagaaggccggccagcacagccccctgcgggaggagcacgtgacctgtgtgcagagcatcctggatgagttcctgcagacctacggcagcctcatccccctgagcacagatgaggtggtggagaagctggaggacatcttccagcaggagttcagcacccccagcaggaagggcctggtgctgcagctgatccagagctaccagaggatgcctggaaatgccatggtgcggggcttccgggtggcctacaagagacatgtgctgaccatggatgacctgggcaccctgtatggccagaactggctgaatgaccaggtgatgaacatgtacggggacctggtgatggacacagtgcctgagaaggtgcacttcttcaacagcttcttctatgacaagctgcggaccaagggctatgatggagtgaagcgctggaccaagaatgtggacatcttcaacaaggagctgctgctgatccccatccacctggaggtgcactggagcctcatctctgtggatgtgagaagaaggaccatcacctactttgacagccagaggaccctgaacagacgctgccccaagcacatcgccaagtacctgcaggccgaggccgtgaagaaggaccggctggacttccaccagggctggaagggctacttcaagatgaatgtggcccggcagaacaatgacagcgactgtggggcctttgtgctgcagtactgcaagcacctggccctgagccagcccttctccttcacccagcaggacatgcccaagctgcggcggcagatctacaaggagctgtgccactgcaagctgactgtgtag

SEQ ID NO: 187730 - DNA, 1722 bp, Artificial Sequence
  derived and/or modified sequence
atgaaggagaccatccagggcaccggcagctggggccccgagccccccggaccagggatccccccggcctattcctcaccccgtcgagaacgccttcggtggcctcctcccccaaagccaagactgaaaagcggtggcgggttcggaccggatcctggatccggcaccactgtgccagcccggaggttgcccgttcccagaccgtcgttcgatgccagtgcttctgaagaggaagaggaagaagaagaagaagaggacgaagacgaagaagaggaggtggccgcttggaggttaccacctaggtggtcccagcttgggacgtcacagagaccaaggccctcgagaccaacacaccggaaaacatgtagccagaggaggcgaagagctatgcgggcattccgtatgctgctgtattccaaaagtaccagtttgacattccactggaaactgtgggggagacaccgcggtcggaggagggggctagcccaccctaagaaccacctgagcccccagcagggcggtgcaacgcctcaggtgccgtccccatgctgccggtttgatagtccacggggtcctccccccccgcgcctgggcttgctgggcgcacttatggcagaggacggtgtgcgcggaagccccccagtgccgagcggaccaccaatggaagaagatggcttaaggtggacccctaaatcacctctggatcctgattccggtttactctcgtgcaccttgccaaatggatttggcgggcagtctggtcccgagggggagagaagcctagctcctccagacgccagtattctaatttccaacgtctgctctattggagaccacgttgcacaagagttgtttcagggatctgatctcgggatggcggaagaagccgagcgacccggggagaaggccggccagcacagccccctccgcgaagagcacgtcacctgcgttcagagcattcttgatgaattcctgcaaacctacgggagtctgatccccctttccacagatgaggtagtggagaagctcgaagatatctttcagcaggaattctcaacacctagtaggaaggggctggtactgcagctgattcagtcctatcaaagaatgcccgggaatgccatggtgaggggatttagggtggcttataagaggcacgttctgaccatggacgatctggggacattgtatgggcagaactggctcaatgatcaggtgatgaatatgtatggagacctggttatggataccgttcctgagaaagtgcacttcttcaatagtttcttttatgacaaattacggaccggctacgatggcgtgaaaagatggactaaaaatgtggatatatttaataaggaactgctgctaattcccattcacttggaggtccactggtccctgatcagtgtagatgttaggcgcagaactatcacgtactttgacagccaacggaccctgaaccggaggtgcccaaagcatatcgccaagtacctccaagctgaggccgtgaaaaaggatcgcttggactttcaccagggatggaagggatactttaaaatgaatgtggccaggcaaaacaacgactcagattgcggcgccttcgtgcttcaatactgcaaacacctagcactgagtcagccatttagtttcacacagcaggacatgccaaagctgcgccgacagatatacaaagagttgtgtcactgcaaattgacagtttag

SEQ ID NO: 187731 - DNA, 1725 bp, Artificial Sequence
  derived and/or modified sequence
atgaaggagaccatccagggcaccggcagctggggccccgagccccctggcccaggtattccgcccgcttattcaagccccaggcgcgaacgactgaggtggccaccacccccaaagcccaggttaaagtccgggggtgggttcggcccagatccaggctccggaaccaccgtgccagctaggcgcttgcccgtaccaaggccttccttcgatgcatccgcatctgaagaggaggaggaagaagaagaggaagaagatgaagatgaggaggaagaagtggcagcttggaggttaccaccacggtggagccagttgggcactagccaaaggcccagacccagtcgccctacacatcgcaaaacgtgcagccagaggcgccggagggcaatgagggcattcagaatgctcctgtattccaagtctactagcttaacattccattggaagctatggggcaggcaccgagggagacgaagagggctcgcccaccccaaaaaccatctgagtcctcagcaggggggagctacgccacaggtaccaagcccttgctgcagatttgactccccacggggcccaccacctccgcgactagggctgctcggtgctcttatggccgaagatggcgttcgcgggtctccccccgtcccgagcggtcctcctatggaggaggacggactgcggtggacccctaagagcccactcgacccggacagtggccttttatcttgtacccttcctaacggcttcggtggccagtccggccccgagggagaaagatcgctagcacccccagatgcgtctattcttattagcaacgtgtgctccatcggggatcatgtcgcccaggaattattccaggggtcagacctggggatggcagaagaggccgaacggcctggcgaaaaggccgggcagcattctcccctgcgcgaagagcatgtcacctgtgtgcagtcaatcttggacgagtttttacagacatatggctccctcatccccctatccacagacgaggtggtcgagaaactcgaggatattttccagcaggagttcagcaccccaagcagaaaaggtttggtcttacagctgattcagagctatcagcgcatgccgggtaatgccatggtacggggattccgggtcgcttataagcgccatgtgctcacaatggatgatctggggacgctgtatggccagaactggttgaacgaccaggtaatgaatatgtatggcgacctggtcatggacacagtccctgagaaggtacacttcttcaactctttcttttatgataaattacgtactaagggatatgacggtgtaaagaggtggacgaaaaatgtcgatatcttcaacaaagaactgctgctgatacctattcacctggaggtgcattggagcctgatatccgtcgacgtgcgccgcaggactatcacctacttcgattcccagaggactctaaatagaaggtgccctaagcacatagccaagtacctgcaagccgaggccgttaagaaagataggctggattttcaccagggttggaagggatatttcaagatgaatgtggccaggcagaataacgattccgattgtggagcctttgtcctgcaatattgtaaacacctggcactttcgcagcctttttcgtttacacagcaggacatgcccaagcttcgtaggcagatttataaggagttatgtcactgcaagcttaccgtatag

SEQ ID NO: 187732 - DNA, 1722 bp, Artificial Sequence
  derived and/or modified sequence
atgaaggaaaccattcagggcacgggtagctgggggcctgaaccacccggaccaggaatccctcctgcttactctagccccaggcgggaacgccttaggtggccacccccacctaagcccaggctaaagtccggcggaggatttggtccagaccccggtagcgggacgactgtgcccgcacggagattacctgttccccgtccatcttttgatgcatctgccagcgaggaggaggaggaagaagaagaggaagaagatgaagatgaggaagaggaggtcgctgcctggcggttgccccctaggtggtcccagcttggaacctctcagcgaccacggccaagcaggcccacccaccgaaaaacttgcagccagcgccgacggagagcgatgcgcgctttccggatgctgctgtacagtaagtcaacatctctgacctttcattggaagctttggggaaggcacagggggaggagaagaggcttggcccaccccaaaaaccatctctcaccacaacagggcggagcaactccacaagtgccttctccctgctgtagattcgacagtcccaggggcccacccccaccaagattggggctgctaggtgccttgatggccgaagatggagtgagggggtctccacctgttcccagcggccctcctatggaggaagatggcctgcgatggacaccaaaaagccctctcgatcccgacagcggcctattgtcctgtacactgccaaacggatttggtggacagtcagggcctgaaggagaacggtcccttgccccaccggacgctagcatactaattagcaacgtgtgctcaatcggcgaccatgtggctcaggagctgttccaaggtagtgatttaggtatggctgaggaggcagagaggcccggagagaaagccggacaacatagccctctccgggaagagcatgtgacgtgtgtgcaatccatcctggacgagttccttcaaacttacggaagcctgatacccctgagtacagatgaggtggtggaaaagctcgaggatatctttcagcaagaatttagtacgccatcaagaaaaggactcgtgcttcagctcatccaatcttaccaaaggatgcctggaaacgcaatggtccgcggatttagagtcgcgtacaaacggcacgtgcttaccatggatgacctggggaccctgtacggacagaactggcttaacgaccaagtgatgaacatgtacggagatttggtgatggataccgtgccggagaaggtgcatttttttaattcattcttttacgacaaactgcgcacaggctatgacggcgttaagaggtggactaagaatgttgacatctttaacaaggagctgctccttattcctattcatctcgaggtgcattggagtcttatcagcgtcgatgttcgcagaaggacaatcacgtacttcgacagccagagaacgctgaaccgccgttgccccaaacacatagccaagtatctccaagctgaagcggtgaagaaagatcggctggattttcatcaaggttggaaaggctactttaaaatgaacgtggctagacagaacaatgacagcgactgcggcgcatttgttttacagtattgcaaacaccttgctctgtctcagccatttagctttacgcagcaggatatgccaaaacttagaagacagatctataaggagctctgccattgtaagctgaccgtgtag

SEQ ID NO: 187733 - DNA, 1725 bp, Artificial Sequence
  derived and/or modified sequence
atgaaggaaacgattcagggcaccggttcctgggggccagaaccacctgggccagggattccaccggcttactccagcccccgtagggagaggctccgatggccccctccacctaaacccagactgaagtccggcggaggatttggcccagatccaggatccggcacgaccgttcccgctaggaggttacctgtgcccaggccaagctttgatgccagcgcctcagaagaggaggaagaagaagaagaggaggaggacgaagatgaggaggaggaggtggccgcatggaggttgccacctaggtggtctcaactcggcaccagccagaggcctaggccttcaagaccaactcataggaagacatgttcacagagacggcgacgggctatgagggctttccgcatgctgctgtacagtaaaagcacctccctgacatttcattggaaattgtggggtcgtcacagggggcgacgaagagggttggctcatcctaagaaccatttgtcccctcagcaagggggtgcaactccccaagtaccatcaccctgctgccggttcgattctcctcgtggacccccacctccacgcttagggctacttggagccctcatggccgaggacggagtaaggggcagccctccagtgcccagcggtccgcctatggaagaggacggtttgaggtggacacccaagtcgcccctcgatccagacagtggccttctctcttgcaccctacccaacggatttggtggccagtcaggacctgagggcgaaagaagcctggctcctcctgacgcctctattctcatatcaaatgtttgcagcattggcgatcacgtcgctcaggagctgtttcaggggtccgatctaggcatggccgaggaagcagagcggcctggggagaaggctggccagcattctcccttgcgtgaagaacacgtgacatgcgttcagagtatcctggatgagttcctgcagacctatggtagtctcattccgctgagtactgatgaagttgtagaaaagctagaggacatcttccagcaagagttcagtacgccttcgaggaaaggtctggtcctgcaactgattcagagttaccagagaatgcccggtaatgccatggtccgaggtttccgcgttgcctataaacggcacgtcctcaccatggatgacctcgggaccctgtacggtcagaattggctgaatgatcaagtgatgaatatgtatggagatctcgtgatggacacggtgcccgagaaggtacattttttcaacagctttttctatgacaagctccgtacaaaagggtatgacggagtcaagagatggacaaaaaatgtggacatctttaataaagaacttctgctaataccaattcatctagaggtgcactggtctctaatctctgtggatgtcagacgacggaccattacttatttcgactcccagcgaacgcttaatcgtcggtgtcccaagcatattgccaaatacctacaggccgaagccgtgaagaaagaccggctggatttccatcaaggatggaagggctattttaaaatgaacgtggctaggcagaacaacgattctgactgtggggctttcgtcttgcagtactgcaaacatctcgcgctttctcagcccttcagctttacacagcaggatatgcctaagctccgcaggcagatttataaggagctgtgtcattgtaaactcaccgtgtag

SEQ ID NO: 187734 - DNA, 2429 bp, Artificial Sequence
  derived and/or modified sequence
cccggggctcgcgggaggggaaggaggagggggggaggagtggcggcggcggcggtggcgctggtggcggcggtggcggaggtggaggtggaggtggaagctgaagctgaagcagagccagaggcggcgcggcggggtgctcggcggcgcggcacgcggcccagaagcgttggaatcctgaattgagacggctgcgcctaaagacagcaggagtggcggggccgccgccgtcgccggagagatgagccgggaagcttgaggccggagacgcccgccttcgggcccgtccgcccggcttccccgctcccgggtactggaagatgaaagagactatacaagggaccgggtcctgggggcctgagcctcctggacccggcatacccccagcttactcaagtcccaggcgggagcgtcttcgttggcccccacctcccaaaccccgactcaagtcaggtggagggtttgggccagatcctgggtcagggaccacagtgccagccagacgcctccctgtcccccgaccctcttttgatgcctcagcaagtgaagaggaggaagaagaggaggaggaggaggatgaagatgaagaggaggaagtggcagcttggaggctgcccccaagatggagtcagctgggaacctcccagcggccccgcccttcccgccccactcatcgaaaaacctgctcacagcgccgccgccgagccatgagagccttccggatgctgctctactcaaaaagcacctcgctgacattccactggaagctttgggggcgccaccggggccggcggcggggcctcgcacaccccaagaaccatctttcaccccagcaagggggtgcgacgccacaggtgccatccccctgttgtcgttttgactccccccgggggccacctccaccccggctgggtctgctaggtgctctcatggctgaggatggggtgagagggtctccaccagtgccctctgggccccccatggaggaagatggactcaggtggactccaaagtctcctctggaccctgactcgggcctcctttcatgtactctgcccaacggttttgggggacaatctgggccagaaggggagcgcagcttggcaccccctgatgccagcatcctcatcagcaatgtgtgcagcatcggggaccatgtggcccaggagctttttcagggctcagatttgggcatggcagaagaggcagagaggcctggggagaaagccggccagcacagccccctgcgagaggagcatgtgacctgcgtacagagcatcttggacgaattccttcaaacgtatggcagcctcatacccctcagcactgatgaggtagtagagaagctggaggacattttccagcaggagttttccaccccttccaggaagggcctggtgttgcagctgatccagtcttaccagcggatgccaggcaatgccatggtgaggggcttccgagtggcttataagcggcacgtgctgaccatggatgacttggggaccttgtatggacagaactggctcaatgaccaggtgatgaacatgtatggagacctggtcatggacacagtccctgaaaaggtgcatttcttcaatagtttcttctatgataaactccgtaccggttatgatggggtgaaaaggtggaccaaaaacgtggacatcttcaataaggagctactgctaatccccatccacctggaggtgcattggtccctcatctctgttgatgtgaggcgacgcaccatcacctattttgactcgcagcgtaccctaaaccgccgctgccctaagcatattgccaagtatctacaggcagaggcggtaaagaaagaccgactggatttccaccagggctggaaaggttacttcaaaatgaatgtggccaggcagaataatgacagtgactgtggtgcttttgtgttgcagtactgcaagcatctggccctgtctcagccattcagcttcacccagcaggacatgcccaaacttcgtcggcagatctacaaggagctgtgtcactgcaaactcactgtgtgagcctcgtaccccagaccccaagcccataaatgggaagggagacatgggagtcccttcccaagaaactccagttcctttcctctcttgcctcttcccactcacttccctttggtttttcatatttaaatgtttcaatttctgtatttttttttctttgagagaatacttgttgatttctgatgtgcagggggtggctacagaaaagcccctttcttcctctgtttgcaggggagtgtggccctgtggcctgggtggagcagtcatcctcccccttccccgtgcagggagcaggaaatcagtgctgggggtggtgggcggacaataggatcactgcctgccagatcttcaaacttttatatatatatatatatatatatatatatatat

SEQ ID NO: 187735 - DNA, 2222 bp, Artificial Sequence
  derived and/or modified sequence
ccgccttcgggcccgtccgcccggcttccccgctcccgggtactggaagatgaaagagactatacaagggaccgggtcctgggggcctgagcctcctggacccggcatacccccagcttactcaagtcccaggcgggagcgtcttcgttggcccccacctcccaaaccccgactcaagtcaggtggagggtttgggccagatcctgggtcagggaccacagtgccagccagacgcctccctgtcccccgaccctcttttgatgcctcagcaagtgaagaggaggaagaagaggaggaggaggaggatgaagatgaagaggaggaagtggcagcttggaggctgcccccaagatggagtcagctgggaacctcccagcggccccgcccttcccgccccactcatcgaaaaacctgctcacagcgccgccgccgagccatgagagccttccggatgctgctctactcaaaaagcacctcgctgacattccactggaagctttgggggcgccaccggggccggcggcggggcctcgcacaccccaagaaccatctttcaccccagcaagggggtgcgacgccacaggtgccatccccctgttgtcgttttgactccccccgggggccacctccaccccggctgggtctgctaggtgctctcatggctgaggatggggtgagagggtctccaccagtgccctctgggccccccatggaggaagatggactcaggtggactccaaagtctcctctggaccctgactcgggcctcctttcatgtactctgcccaacggttttgggggacaatctgggccagaaggggagcgcagcttggcaccccctgatgccagcatcctcatcagcaatgtgtgcagcatcggggaccatgtggcccaggagctttttcagggctcagatttgggcatggcagaagaggcagagaggcctggggagaaagccggccagcacagccccctgcgagaggagcatgtgacctgcgtacagagcatcttggacgaattccttcaaacgtatggcagcctcatacccctcagcactgatgaggtagtagagaagctggaggacattttccagcaggagttttccaccccttccaggaagggcctggtgttgcagctgatccagtcttaccagcggatgccaggcaatgccatggtgaggggcttccgagtggcttataagcggcacgtgctgaccatggatgacttggggaccttgtatggacagaactggctcaatgaccaggtgatgaacatgtatggagacctggtcatggacacagtccctgaaaaggtgcatttcttcaatagtttcttctatgataaactccgtaccaagggttatgatggggtgaaaaggtggaccaaaaacgtggacatcttcaataaggagctactgctaatccccatccacctggaggtgcattggtccctcatctctgttgatgtgaggcgacgcaccatcacctattttgactcgcagcgtaccctaaaccgccgctgccctaagcatattgccaagtatctacaggcagaggcggtaaagaaagaccgactggatttccaccagggctggaaaggttacttcaaaatgaatgtggccaggcagaataatgacagtgactgtggtgcttttgtgttgcagtactgcaagcatctggccctgtctcagccattcagcttcacccagcaggacatgcccaaacttcgtcggcagatctacaaggagctgtgtcactgcaaactcactgtgtgagcctcgtaccccagaccccaagcccataaatgggaagggagacatgggagtcccttcccaagaaactccagttcctttcctctcttgcctcttcccactcacttccctttggtttttcatatttaaatgtttcaatttctgtatttttttttctttgagagaatacttgttgatttctgatgtgcagggggtggctacagaaaagcccctttcttcctctgtttgcaggggagtgtggccctgtggcctgggtggagcagtcatcctcccccttccccgtgcagggagcaggaaatcagtgctgggggtggtgggcggacaataggatcactgcctgccagatcttcaaacttttatatatatatatatatatatatatatatatataaaaatatataaatgccacggtcctgctctggtcaataaaggatcctttgttgatacgtaa

SEQ ID NO: 187736 - protein, 160 aa, Artificial Sequence
  derived and/or modified sequence
MTLEELVACDNAAQKMQTVTAAVEELLVAAQRQDRLTVGVYESAKLMNVDPDSVVLCLLAIDEEEEDDIALQIHFTLIQSFCCDNDINIVRVSGMQRLAQLLGEPAETQGTTEARDLHCLLVTNPHTDAWKSHGLVEVASYCEESRGNNQWVPYISLQER

SEQ ID NO: 187737 - DNA, 483 bp, Artificial Sequence
  derived and/or modified sequence
atgaccctggaggagctggtggcctgcgacaacgccgcccagaagatgcagaccgtgaccgccgccgtggaggagctgctggtggccgcccagagacaggacagactgaccgtgggcgtgtacgagagcgccaagctgatgaacgtggaccccgacagcgtggtgctgtgcctgctggccatcgacgaggaggaggaggacgacatcgccctgcagatccacttcaccctgatccagagcttctgctgcgacaacgacatcaacatcgtgagagtgagcggcatgcagagactggcccagctgctgggcgagcccgccgagacccagggcaccaccgaggccagagacctgcactgcctgctggtgaccaacccccacaccgacgcctggaagagccacggcctggtggaggtggccagctactgcgaggagagcagaggcaacaaccagtgggtgccctacatcagcctgcaggagagatag

SEQ ID NO: 187738 - DNA, 483 bp, Artificial Sequence
  derived and/or modified sequence
atgaccttggaggaacttgtcgcatgcgacaatgccgcccaaaagatgcagacggtgacagcggccgttgaagagctgctagtggcagcccaacggcaagaccgactgactgttggcgtttacgagagtgccaagctaatgaacgtagatcccgacagcgtggtcttgtgcttattagccatagacgaagaggaggaggacgacattgctctccaaatacattttacactgattcagtccttttgttgtgataatgacatcaatatcgtacgggtaagcggtatgcaacggttggcccagctactcggggagcctgctgaaacccagggtacaaccgaggcccgagatctccactgtttactcgtgactaatccacacaccgatgcttggaaaagtcacgggttagtggaggtagcttcatattgcgaagagagccgaggtaacaatcagtgggtaccttacatatccctgcaggagcggtag

SEQ ID NO: 187739 - DNA, 483 bp, Artificial Sequence
  derived and/or modified sequence
atgaccctggaggagctggtggcctgtgacaatgctgcccagaagatgcagacagtgacagctgctgtggaggagctgctggtggccgcccagaggcaggaccggctgactgtgggcgtgtatgaaagtgccaagctgatgaatgtggaccctgattctgtggtgctgtgcctgctggccattgatgaggaggaggaggatgacatcgccctgcagatccacttcaccctcatccagagcttctgctgtgacaatgacatcaacatcgtgcgggtgtctggcatgcagaggctggcccagctgctgggggagcctgctgagacccagggcaccacagaggcccgggacctgcactgcctgctggtgaccaacccccacacagatgcctggaagagccacggcctggtggaggtggccagctactgtgaggagagccggggcaacaaccagtgggtgccctacatcagcctgcaggagaggtag

SEQ ID NO: 187740 - DNA, 483 bp, Artificial Sequence
  derived and/or modified sequence
atgaccctggaggagctggtggcctgcgacaacgccgcccagaagatgcagactgttactgcagccgtggaggagttactagtggctgcacaaagacaggatcgtctcaccgtgggcgtgtacgagagtgccaaactaatgaatgtggacccagatagtgtggtgctgtgtctcctggctatcgacgaggaagaggaggatgatatcgcactacagatacactttacccttattcaaagcttctgctgcgacaacgatattaacatcgtacgcgtgtcaggtatgcagagactagcacaactgctcggagagccagcggaaacacagggaactaccgaggcaagggaccttcactgcctcctcgttacaaacccacatacagacgcttggaaatcacacggtctcgtagaggtcgcctcctactgcgaagaatcccgcggcaataatcagtgggttccctacatttcgcttcaggaacgttag

SEQ ID NO: 187741 - DNA, 483 bp, Artificial Sequence
  derived and/or modified sequence
atgaccctggaggagctggtggcctgtgataacgccgcacagaagatgcagacagtcactgctgctgtggaggagctgttagtggcagctcagaggcaggaccggcttacagttggcgtgtacgagtcagcaaagctcatgaacgttgatcccgacagcgtggtcctctgcctcttggccattgatgaggaggaagaagatgatatcgctctccagatccacttcacgcttatacaaagtttttgctgtgacaacgatatcaatatagttagagtctccgggatgcagcggctggcccaattactcggcgagcctgcagagactcaagggaccactgaggctagagacctgcactgtcttctcgtgactaatccccacacggatgcatggaaatctcatggattggtagaagtagcttcatattgtgaagaaagcaggggaaataatcagtgggtcccttatatcagcctccaggaacggtag

SEQ ID NO: 187742 - DNA, 1375 bp, Artificial Sequence
  derived and/or modified sequence
tcagatcgccgaagcgtcggactaccgttggtttccgcaacttcctggattatcctcgccaaggactttgcaatatatttttccgccttttctggaaggatttcgctgcttcccgaaggtcttggacgagcgctctagctctgtgggaaggttttgggctctctggctcggattttgcaatttctccctggggactgccgtggagccgcatccactgtggattataattgcaacatgacgctggaagagctcgtggcgtgcgacaacgcggcgcagaagatgcagacggtgaccgccgcggtggaggagcttttggtggccgctcagcgccaggatcgcctcacagtgggggtgtacgagtcggccaagttgatgaatgtggacccagacagcgtggtcctctgcctcttggccattgacgaggaggaggaggatgacatcgccctgcaaatccacttcacgctcatccagtccttctgctgtgacaacgacatcaacatcgtgcgggtgtcgggcatgcagcgcctggcgcagctcctgggagagccggccgagacccagggcaccaccgaggcccgagacctgcattgtctcctggtcacgaaccctcacacggacgcctggaagagccacggcttggtggaggtggccagctactgcgaagaaagccggggcaacaaccagtgggtcccctacatctctcttcaggaacgctgaggcccttcccagcagcagaatctgttgagttgctgccacaaacaaaaaatacaataaatatttgaaccccctcccccccagcacaacccccccaaaacaacccaacccacgaggaccatcgggggcagagtcgttggagactgaagaggaagaggaggaggagaaggggagtgagcggccgcccccagggcggagatccaggagctggcggccgccgatccgatggagaaggggggacccaggccagcaggagacaggacccccgaagctgaggccttgggatggagcagaagccggagtggcggggcacgctgccgccttccccatcacggagggtccagactgtccactcgggggtggagtgagactgactgcaagccccaccctccttgagactggagctggcgtctgcatacgagagacttggttgaacttggttggtccttgtctgcaccctcgacaagaccacactttgggacttgggagctggggctgaagttgctctgtacccatgaactcccagtttgcgaattatagagacaatctattttgttacttgcacttgttattcgaaccactgagagcgagatgggaagcatagatatctatatttttatttctactatgagggccttgtaataaatttctaaagcctctg

SEQ ID NO: 187743 - protein, 342 aa, Artificial Sequence
  derived and/or modified sequence
MNNPIPSNLKSEAKKAAKILREFTEITSRNGPDKIIPAHVIAKAKGLAILSVIKAGFLVTARGGSGIVVARLPDGKWSAPSAIGIAGLGGGFEIGIEVSDLVIILNYDRAVEAFAKGGNLTLGGNLTVAVGPLGRNLEGNVALRSSAAVFTYCKSRGLFAGVSLEGSCLIERKETNRKFYCQDIRAYDILFGDTPRPAQAEDLYEILDSFTEKYENEGQRINARKAAREQRKSSAKELPPKPLSRPQQSSAPVQLNSGSQSNRNEYKLYPGLSSYHERVGNLNQPIEVTALYSFEGQQPGDLNFQAGDRITVISKTDSHFDWWEGKLRGQTGIFPANYVTMN

SEQ ID NO: 187744 - protein, 51 aa, Artificial Sequence
  derived and/or modified sequence
MNNPIPSNLKSEAKKAAKILREFTEITSRNGPDKIIPAHVIAKAKGLAILS

SEQ ID NO: 187745 - DNA, 1029 bp, Artificial Sequence
  derived and/or modified sequence
atgaacaaccccatccccagcaacctgaagagcgaggccaagaaggccgccaagatcctgagagagttcaccgagatcaccagcagaaacggccccgacaagatcatccccgcccacgtgatcgccaaggccaagggcctggccatcctgagcgtgatcaaggccggcttcctggtgaccgccagaggcggcagcggcatcgtggtggccagactgcccgacggcaagtggagcgcccccagcgccatcggcatcgccggcctgggcggcggcttcgagatcggcatcgaggtgagcgacctggtgatcatcctgaactacgacagagccgtggaggccttcgccaagggcggcaacctgaccctgggcggcaacctgaccgtggccgtgggccccctgggcagaaacctggagggcaacgtggccctgagaagcagcgccgccgtgttcacctactgcaagagcagaggcctgttcgccggcgtgagcctggagggcagctgcctgatcgagagaaaggagaccaacagaaagttctactgccaggacatcagagcctacgacatcctgttcggcgacacccccagacccgcccaggccgaggacctgtacgagatcctggacagcttcaccgagaagtacgagaacgagggccagagaatcaacgccagaaaggccgccagagagcagagaaagagcagcgccaaggagctgccccccaagcccctgagcagaccccagcagagcagcgcccccgtgcagctgaacagcggcagccagagcaacagaaacgagtacaagctgtaccccggcctgagcagctaccacgagagagtgggcaacctgaaccagcccatcgaggtgaccgccctgtacagcttcgagggccagcagcccggcgacctgaacttccaggccggcgacagaatcaccgtgatcagcaagaccgacagccacttcgactggtgggagggcaagctgagaggccagaccggcatcttccccgccaactacgtgaccatgaactag

SEQ ID NO: 187746 - DNA, 1029 bp, Artificial Sequence
  derived and/or modified sequence
atgaacaatcctattccatccaatttgaaatccgaagccaagaaggccgccaagattttgcgcgagtttacagaaatcacctcacgcaacggaccagacaagattataccagcacacgttatagcaaaagccaaaggattggcgatcctgtccgtcattaaggccgggtttctcgttacggctcgcggtggctccggtattgttgtggccagactgccagatggcaaatggtccgcccccagcgcaattggcatcgccgggctgggcggaggattcgaaattgggatcgaagtttctgacctcgtcataatccttaactacgatcgcgccgtagaggctttcgccaagggggggaatctgacgttaggcgggaatctgaccgtggctgttggaccgctgggccggaatctggaggggaacgttgccctccggtcttctgccgctgtgttcacatattgcaagtcccgagggctgttcgctggtgtttctttggaaggctcgtgcctcatcgaacgcaaagagaccaatagaaagttttactgccaggacattagggcctacgatattctgtttggtgacacccctcgaccagcccaagccgaggatctgtacgagatactggactcttttaccgagaaatatgagaacgagggccaacgaatcaatgctcgcaaagccgcaagagaacagaggaaatccagtgccaaagagctgccacctaagcccttgtcccggccacaacagagctccgcccctgtgcagctcaatagtggctctcagagcaatcggaatgaatataaattgtatccaggactctcctcttatcacgagcgggtgggcaatctgaatcagcccatcgaggttaccgccctttattcctttgagggccagcagccaggggaccttaacttccaggcaggcgatagaatcactgttatttcgaaaaccgatagtcacttcgattggtgggaaggaaaactcagaggtcagaccggaatcttccccgccaactacgtgactatgaattag

SEQ ID NO: 187747 - DNA, 1029 bp, Artificial Sequence
  derived and/or modified sequence
atgaataaccccattccctctaacctgaagtccgaagcaaagaaagctgccaagatcctgagagaattcaccgagatcacttctagaaatggacccgataagatcatacccgcacatgtgattgctaaggccaagggcttggcaatcctgtccgtcatcaaggcaggcttcttggtcacggcgcggggtggatcgggaatagttgttgctcgcctgccagacggaaaatggagcgcgcctagtgctatcgggatcgcggggttgggaggaggctttgagattggcattgaggtgtctgaccttgtcatcatactgaattatgatagagccgtcgaagcatttgcaaagggaggaaatctaacactgggcggtaacctgaccgtcgctgtcggacccttaggtcgcaacttagaagggaatgtggcccttcgcagttctgctgcggtgttcacatactgcaaatcccgtggactgtttgcaggcgtgtcgttagaaggaagttgtctgattgagcggaaggagacaaatcggaagttttattgtcaggacatccgcgcctacgatatcctcttcggcgataccccacggcctgctcaagccgaagatctgtatgagattctggattcttttacagaaaaatacgagaacgaagggcagcggattaacgcacgcaaggctgctcgcgagcaaagaaagtccagcgcaaaggaactcccgcccaaacccctgtcccgaccccagcaaagctcagcaccagtacaactgaactcgggatctcaatccaaccgcaacgaatataaactgtatcccggtctctcttcctaccatgagcgtgtaggcaatctcaaccaacccatcgaagtcaccgccctgtactccttcgaaggacagcagccaggagacctcaatttccaggctggggacaggattaccgttattagtaaaaccgattcccatttcgactggtgggaaggtaagctgaggggacagacagggatcttccccgcaaattacgtgacaatgaattag

SEQ ID NO: 187748 - DNA, 1029 bp, Artificial Sequence
  derived and/or modified sequence
atgaacaaccccatccccagcaacctgaagtctgaggccaagaaggccgccaagatcctgcgggagttcacagagatcaccagcagaaatggaccagacaagatcatcccagcccacgtgattgccaaggccaagggcctggccatcctgagcgtcatcaaggccggcttcctggtgacagcccggggcggcagcggcatcgtggtggcccggctgcctgatggcaagtggagcgcccccagcgccatcggcattgctggcctgggcggcggctttgagatcggcatcgaggtgtctgacctggtgatcatcctgaactatgacagagctgtggaggcctttgccaagggcggcaacctgaccctgggcggcaacctgactgtggccgtgggccccctgggcaggaacctggagggcaatgtggccctgcggagcagcgctgctgtgttcacctactgcaagagccggggcctgtttgctggggtgtccctggagggcagctgcctgattgaaaggaaggagaccaacaggaagttctactgccaggacatccgggcctatgacatcctgtttggagacacccccaggcctgcccaggccgaggacctgtatgagatcctggacagcttcacagagaagtatgaaaatgaaggccagaggatcaatgccaggaaggccgcccgggagcagaggaagagcagcgccaaggagctgccccccaagcccctgagccggccccagcagagcagcgcccctgtgcagctgaacagcggcagccagagcaacagaaatgagtacaagctgtacccaggcctgagcagctaccacgagcgggtgggcaacctgaaccagcccatcgaggtgacagccctgtacagctttgagggccagcagcccggggacctgaacttccaggccggggaccgcatcaccgtcatcagcaagacagacagccactttgactggtgggagggcaagctgcggggccagacaggcatcttccctgccaactacgtgaccatgaactag

SEQ ID NO: 187749 - DNA, 1029 bp, Artificial Sequence
  derived and/or modified sequence
atgaacaaccccatccccagcaacctgaagagcgaggccaagaaggccgcaaagattttgcgggagttcactgagatcacctccagaaacgggccagacaagattattcccgcacatgtcatcgctaaagccaaagggctcgcaattctgtctgtcattaaggctggtttcttggtgactgcccgaggcggatccggaattgtcgtggccaggcttccggacgggaaatggtctgccccatctgctatcggcatagctggtctcgggggcggctttgaaatcggaattgaggtctcggacctggtgattatcttgaattatgaccgcgcagtggaggcattcgctaagggaggaaatcttacgctggggggtaacctgaccgtggcggtaggcccactgggtagaaacttggaaggcaatgtggccctgcgctcctcggcagccgtttttacctactgtaaaagccggggtctctttgccggagtgtcactggagggctcctgcctaatcgagcgaaaagagaccaaccgcaagttttactgtcaagacattagagcttacgacatcctgtttggcgacaccccccgaccagcccaagctgaggatctgtatgagatactggattcattcactgagaagtacgagaacgaaggccagagaatcaacgctcgtaaggctgctcgggagcagaggaaatcgtctgcaaaggaactgccccccaagccactaagtagacctcaacagtcgagcgcccctgtgcagttaaattcagggtcccagagcaataggaatgagtacaagctttaccctgggctgtcaagctaccacgagcgagtcggtaatttgaatcagccaattgaggtcactgcactctacagctttgagggacagcagcccggagatctgaatttccaagctggcgaccggattactgtgatatctaaaacagactctcacttcgattggtgggagggtaagctgcgagggcaaacaggaattttcccagccaattatgtcacaatgaactag

SEQ ID NO: 187750 - DNA, 1029 bp, Artificial Sequence
  derived and/or modified sequence
atgaacaaccccatccccagcaacctgaagagcgaggccaagaaggccgccaaaatactccgggagttcactgagatcaccagccgcaacggcccggacaagatcattcctgcccacgtgatcgcgaaggccaaaggacttgcgatcctcagcgttatcaaggctggattcctagtcactgcgcgaggcggtagtggaatcgtagttgcccggcttcccgacggaaagtggagtgcaccatccgctatcggaatcgctggactgggaggcggcttcgagatcggtattgaggtgagtgacttggtaattatcctgaattatgaccgagcagtcgaggcattcgcaaaggggggaaatttgaccttgggtggcaacctaacagtggccgtcgggccactgggacgcaacctcgagggcaacgttgcgctcaggtcgtcggcagctgtctttacttattgtaagtcccggggtctgttcgcgggcgtctcactggaggggtcctgtcttatagagagaaaagagacaaatcgaaagttctactgtcaggatatcagagcatatgacatactttttggtgatacccccagacccgcacaggctgaagatctgtacgaaatcttggacagctttacagagaagtacgagaatgaagggcagcgcataaacgctaggaaggccgccagggagcagagaaaaagctctgctaaagagctgccccctaaacccttgagtagaccccagcagtcctcagccccagtccagcttaacagcgggtcccagagcaacagaaacgagtacaaactctatcccgggctgtcatcataccatgagagagtgggaaacttaaaccagccaattgaggtcaccgcgctgtattccttcgaaggccagcaacccggggatttgaacttccaggctggcgacaggatcaccgtgatatccaaaactgatagtcacttcgactggtgggagggtaaactacggggacagactgggatattccctgctaattatgtgaccatgaactag

SEQ ID NO: 187751 - DNA, 1029 bp, Artificial Sequence
  derived and/or modified sequence
atgaataacccaattccgagcaacttaaaatcagaggctaagaaagctgctaagatactgcgagagttcactgagattactagtcggaacgggccagacaagattatccccgctcacgtcatagctaaggctaaaggcctcgcaatacttagtgttataaaggctggctttctggtcactgcaagagggggttccggcatcgtggtagcccgtctacccgacggcaaatggagcgcaccatccgcaatcgggattgccggtctcgggggaggatttgagatcgggatagaagtctcagatcttgtaattatcctgaactacgatcgcgctgtggaggcgtttgcaaaagggggaaacctaacgctcggcggtaatctaactgtcgcagtgggccctttgggccgaaatctcgagggcaatgtcgccttaaggtcaagcgccgctgtcttcacatactgcaagagccggggtttgttcgccggtgtgtcactagaaggcagctgtctgatcgaacgcaaggagactaacaggaagttttattgccaggacatccgagcgtatgacatactgtttggagatacacctcgcccagctcaggcagaggatctgtatgagatcctcgactcatttacagaaaaatacgagaacgaaggacagagaattaacgcccgaaaagcagctcgggagcaacgcaagagttctgccaaggaactaccgccaaagcccctctcaagacctcaacagtcctctgccccagttcagcttaactcggggagccagagcaatagaaacgagtataaactatatccagggctgagcagctatcacgagagagtgggcaacttgaatcagcccatcgaggtgacagccttatatagctttgagggacagcagccaggcgacctgaactttcaggcaggtgaccgcattaccgtcatctcgaaaacagattcgcactttgactggtgggagggtaagcttagaggacagacaggtatcttccctgctaactacgtgacgatgaattag

SEQ ID NO: 187752 - DNA, 1029 bp, Artificial Sequence
  derived and/or modified sequence
atgaacaatcccattccatctaaccttaagagcgaagctaaaaaagccgcaaagattcttcgggaattcaccgagatcacgtctcgcaacgggccagacaaaatcatcccggcacacgtcatcgcaaaggcaaaaggtctagctatactctctgtgatcaaggcaggttttttggtaactgccagggggggttcaggaatagttgtcgcacggctgcccgacgggaaatggagcgcgccttcggcaatcggcatagctggtttaggcggaggcttcgaaattggaatcgaagtctcagatctcgttattatccttaattacgaccgggcagtggaagcctttgcgaaaggtggcaatctaacattgggcggaaacctgactgtagctgtgggccctctgggtcggaatctggaaggcaatgttgccctgcggagctctgccgctgtctttacctactgcaagtctcgtggattgtttgccggagtgagtttggagggctcttgcctgatcgagaggaaggagacaaacagaaagttttattgccaagacatcagggcctatgatatattgttcggcgacacccctcggccagcccaggctgaagacctgtacgagatccttgacagcttcaccgaaaagtatgagaacgaaggacaaaggatcaacgccaggaaagctgccagggagcaacgaaaaagttccgcaaaggagctcccccctaagcctctgtctaggccccagcagtcatcggcccctgtccagctgaactccgggtctcagtcaaatcgtaatgagtacaagctgtaccccggtctctccagttatcatgaacgggttgggaacctgaatcagcccatcgaggtgaccgctctctattccttcgaaggtcagcaaccaggggacctgaacttccaggcaggagacagaataacagtgatctccaaaaccgatagccactttgattggtgggagggaaagcttaggggacagacaggaatctttccagccaattatgtcaccatgaactag

SEQ ID NO: 187753 - DNA, 1763 bp, Artificial Sequence
  derived and/or modified sequence
ctccttgtccgcggggcggggcagcgcgccttcctcttcctgggcagcctcgggacggggcgccgcggccgggcgggcagcatgaataaccctataccttccaatttgaaatcagaagcaaaaaaggctgccaaaatattaagagaattcacagaaataacttccagaaatggacctgataagatcattcctgctcacgtaattgcgaaggctaaaggccttgcaattctgtctgtgatcaaagccgggttcctggtgactgccagaggaggcagcgggattgtagtggcgcgccttccagatggaaaatggtctgcaccctcagccattgggatagctggccttggtggaggatttgaaataggaattgaggtatcagacttggtgataattctgaattatgaccgtgctgtagaagcttttgcaaaaggcggaaatctgaccctcggagggaacttgactgtggcggttgggcccttgggaaggaacttggaaggaaacgtggccctgagaagctccgctgccgtcttcacgtactgcaagtcaaggggactctttgcaggcgtgtctttagaagggagctgtttgattgaaaggaaagaaactaatagaaaattttattgtcaagatatccgagcttatgacattttatttggagatacaccgcggcctgctcaagccgaagatctttatgaaattcttgattcctttactgaaaagtatgaaaatgaaggacaacgaatcaatgcaagaaaagcagcaagggagcagaggaagtcttctgctaaagaattacctccaaagccattgtcaagaccacagcagtcatctgcaccagtccagctgaactctggctctcaaagtaacagaaatgaatataagctctatcctggactttccagctatcatgagagagttggcaatttgaatcaacccatagaagtgacagcgctgtattcatttgaaggacagcagcctggggatttgaattttcaagctggagacagaatcacagttatatcaaaaacagattcacattttgattggtgggaaggaaaacttcgaggtcaaactggcatttttccagccaactacgtaaccatgaattaaagcgtatactattttcttctttgagaattacaaaaaaattatttctacactgacaggatttactagttaagcaatgtttaatataaattttaaaaaacttctgttctacaaaatttccattccgtatgtaaaagattttgtttttctatataaaaagagctgactgacatatctttaaatactttgtactaactttatcacacttactgtgtcatagaatatcatacagtttatacgctcatagttctcttgtgaacacttcaaacatcgctaagcatttgatctggccatgtatatggtagctgtgttttaatttgagaatcttgagggtagagccacaaatttcaattcttacatttccatttgcaaagtgactagagaaaaagaaatcagcttaaatgaggtattaagtaatgtttagagtcgtaggtattaactagaatataaatccttagaaattgtctttataccttcaaaaattatactatgcatttatcatagaaatgtgattacaaagaagtctgactaccatgtctttaaacatatggcatctctcaacttttcttccttatggggctacatttgttcatttccagcagtagcataaacttacggtgacatggtagacttgtctctaaataaaatttttaaat

SEQ ID NO: 187754 - DNA, 2064 bp, Artificial Sequence
  derived and/or modified sequence
cgaaggcctgagcgcggcccggcgggcgcgtggtttttgtcccgcgaaacgtacacggcgggtgttttgcgccgcctccttcgtcacctgccgcaggaagtgtggaactggtctcaatcggttgaccaccttaaggaaataggatttacactgtggacagagatgtgtcctttacacttcatttgaaccaatatgcccatgctcctgtggaggctgagttggaaagtgacacgaagctgcccccccgcaagagagcagaaataaggatctggcatgtcaacacaaacataggaagttgaggcagtcaaagggaaataactgctaccctgactctgctgagagcctcacaagtccctgtgcacgccagcttgtttgccatgaataaccctataccttccaatttgaaatcagaagcaaaaaaggctgccaaaatattaagagaattcacagaaataacttccagaaatggacctgataagatcattcctgctcacgtaattgcgaaggctaaaggccttgcaattctgtctgtgatcaaagccgggttcctggtgactgccagaggaggcagcgggattgtagtggcgcgccttccagatggaaaatggtctgcaccctcagccattgggatagctggccttggtggaggatttgaaataggaattgaggtatcagacttggtgataattctgaattatgaccgtgctgtagaagcttttgcaaaaggcggaaatctgaccctcggagggaacttgactgtggcggttgggcccttgggaaggaacttggaaggaaacgtggccctgagaagctccgctgccgtcttcacgtactgcaagtcaaggggactctttgcaggcgtgtctttagaagggagctgtttgattgaaaggaaagaaactaatagaaaattttattgtcaagatatccgagcttatgacattttatttggagatacaccgcggcctgctcaagccgaagatctttatgaaattcttgattcctttactgaaaagtatgaaaatgaaggacaacgaatcaatgcaagaaaagcagcaagggagcagaggaagtcttctgctaaagaattacctccaaagccattgtcaagaccacagcagtcatctgcaccagtccagctgaactctggctctcaaagtaacagaaatgaatataagctctatcctggactttccagctatcatgagagagttggcaatttgaatcaacccatagaagtgacagcgctgtattcatttgaaggacagcagcctggggatttgaattttcaagctggagacagaatcacagttatatcaaaaacagattcacattttgattggtgggaaggaaaacttcgaggtcaaactggcatttttccagccaactacgtaaccatgaattaaagcgtatactattttcttctttgagaattacaaaaaaattatttctacactgacaggatttactagttaagcaatgtttaatataaattttaaaaaacttctgttctacaaaatttccattccgtatgtaaaagattttgtttttctatataaaaagagctgactgacatatctttaaatactttgtactaactttatcacacttactgtgtcatagaatatcatacagtttatacgctcatagttctcttgtgaacacttcaaacatcgctaagcatttgatctggccatgtatatggtagctgtgttttaatttgagaatcttgagggtagagccacaaatttcaattcttacatttccatttgcaaagtgactagagaaaaagaaatcagcttaaatgaggtattaagtaatgtttagagtcgtaggtattaactagaatataaatccttagaaattgtctttataccttcaaaaattatactatgcatttatcatagaaatgtgattacaaagaagtctgactaccatgtctttaaacatatggcatctctcaacttttcttccttatggggctacatttgttcatttccagcagtagcataaacttacggtgacatggtagacttgtctctaaataaaatttttaaatgttta

SEQ ID NO: 187755 - protein, 2946 aa, Artificial Sequence [sequence omitted]

SEQ ID NO: 187756 - protein, 2946 aa, Artificial Sequence
  derived and/or modified sequence
MASEKPGPGPGLEPQPVGLIAVGAAGGGGGGSGGGGTGGSGMGELRGASGSGSVMLPAGMINPSVPIRNIRMKFAVLIGLIQVGEVSNRDIVETVLNLLVGGEFDLEMNFIIQDAESITCMTELLEHCDVTCQAEIWSMFTAILRKSVRNLQTSTEVGLIEQVLLKMSAVDDMIADLLVDMLGVLASYSITVKELKLLFSMLRGESGIWPRHAVKLLSVLNQMPQRHGPDTFFNFPGCSAAAIALPPIAKWPYQNGFTLNTWFRMDPLNNINVDKDKPYLYCFRTSKGVGYSAHFVGNCLIVTSLKSKGKGFQHCVKYDFQPRKWYMISIVHIYNRWRNSEIRCYVNGQLVSYGDMAWHVNTNDSYDKCFLGSSETADANRVFCGQLGAVYVFSEALNPAQIFAIHQLGPGYKSTFKFKSESDIHLAEHHKQVLYDGKLASSIAFTYNAKATDAQLCLESSPKENASIFVHSPHALMLQDVKAIVTHSIHSAIHSIGGIQVLFPLFAQLDNRQLNDSQVETTVCATLLAFLVELLKSSVAMQEQMLGGKGFLVIGYLLEKSSRVHITRAVLEQFLSFAKYLDGLSHGAPLLKQLCDHILFNPAIWIHTPAKVQLSLYTYLSAEFIGTATIYTTIRRVGTVLQLMHTLKYYYWVINPADSSGITPKGLDGPRPSQKEIISLRAFMLLFLKQLILKDRGVKEDELQSILNYLLTMHEDENIHDVLQLLVALMSEHPASMIPAFDQRNGIRVIYKLLASKSESIWVQALKVLGYFLKHLGHKRKVEIMHTHSLFTLLGERLMLHTNTVTVTTYNTLYEILTEQVCTQVVHKPHPEPDSTVKIQNPMILKVVATLLKNSTPSAELMEVRRLFLSDMIKLFSNSRENRRCLLQCSVWQDWMFSLGYINPKNSEEQKITEMVYNIFRILLYHAIKYEWGGWRVWVDTLSIAHSKVTYEAHKEYLAKMYEEYQRQEEENIKKGKKGNVSTISGLSSQTTGAKGGMEIREIEDLSQSQSPESETDYPVSTDTRDLLMSTKVSDDILGNSDRPGSGVHVEVHDLLVDIKAEKVEATEVKLDDMDLSPETLVGGENGALVEVESLLDNVYSAAVEKLQNNVHGSVGIIKKNEEKDNGPLITLADEKEDLPNSSTSFLFDKIPKQEEKLLPELSSNHIIPNIQDTQVHLGVSDDLGLLAHMTGSVDLTCTSSIIEEKEFKIHTTSDGMSSISERDLASSTKGLEYAEMTATTLETESSSSKIVPNIDAGSIISDTERSDDGKESGKEIRKIQTTTTTQAVQGRSITQQDRDLRVDLGFRGMPMTEEQRRQFSPGPRTTMFRIPEFKWSPMHQRLLTDLLFALETDVHVWRSHSTKSVMDFVNSNENIIFVHNTIHLISQMVDNIIIACGGILPLLSAATSPTGSKTELENIEVTQGMSAETAVTFLSRLMAMVDVLVFASSLNFSEIEAEKNMSSGGLMRQCLRLVCCVAVRNCLECRQRQRDRGNKSSHGSSKPQEVPQSVTATAASKTPLENVPGNLSPIKDPDRLLQDVDINRLRAVVFRDVDDSKQAQFLALAVVYFISVLMVSKYRDILEPQRETTRTGSQPGRNIRQEINSPTSTVVVIPSIPHPSLNHGFLAKLIPEQSFGHSFYKETPAAFPDTIKEKETPTPGEDIQVESSIPHTDSGIGEEQVASILNGAELETSTGPDAMSELLSTLSSEVKKSQESLTENPSETLKPATSISSISQTKGINVKEILKSLVAAPVEIAECGPEPIPYPDPALKRETQAILPMQFHSFDRSVVVPVKKPPPGSLAVTTVGATTAGSGLPTGSTSNIFAATGATPKSMINTTGAVDSGSSSSSSSSSFVNGATSKNLPAVQTVAPMPEDSAENMSITAKLERALEKVAPLLREIFVDFAPFLSRTLLGSHGQELLIEGLVCMKSSTSVVELVMLLCSQEWQNSIQKNAGLAFIELINEGRLLCHAMKDHIVRVANEAEFILNRQRAEDVHKHAEFESQCAQYAADRREEEKMCDHLISAAKHRDHVTANQLKQKILNILTNKHGAWGAVSHSQLHDFWRLDYWEDDLRRRRRFVRNAFGSTHAEALLKAAIEYGTEEDVVKSKKTFRSQAIVNQNAETELMLEGDDDAVSLLQEKEIDNLAGPVVLSTPAQLIAPVVVAKGTLSITTTEIYFEVDEDDSAFKKIDTKVLAYTEGLHGKWMFSEIRAVFSRRYLLQNTALEVFMANRTSVMFNFPDQATVKKVVYSLPRVGVGTSYGLPQARRISLATPRQLYKSSNMTQRWQRREISNFEYLMFLNTIAGRTYNDLNQYPVFPWVLTNYESEELDLTLPGNFRDLSKPIGALNPKRAVFYAERYETWEDDQSPPYHYNTHYSTATSTLSWLVRIEPFTTFFLNANDGKFDHPDRTFSSVARSWRTSQRDTSDVKELIPEFYYLPEMFVNSNGYNLGVREDEVVVNDVDLPPWAKKPEDFVRINRMALESEFVSCQLHQWIDLIFGYKQRGPEAVRALNVFHYLTYEGSVNLDSITDPVLREAMEAQIQNFGQTPSQLLIEPHPPRSSAMHLCFLPQSPLMFKDQMQQDVIMVLKFPSNSPVTHVAANTLPHLTIPAVVTVTCSRLFAVNRWHNTVGLRGAPGYSLDQAHHLPIEMDPLIANNSGVNKRQITDLVDQSIQINAHCFVVTADNRYILICGFWDKSFRVYSTETGKLTQIVFGHWDVVTCLARSESYIGGDCYIVSGSRDATLLLWYWSGRHHIIGDNPNSSDYPAPRAVLTGHDHEVVCVSVCAELGLVISGAKEGPCLVHTITGDLLRALEGPENCLFPRLISVSSEGHCIIYYERGRFSNFSINGKLLAQMEINDSTRAILLSSDGQNLVTGGDNGVVEVWQACDFKQLYIYPGCDAGIRAMDLSHDQRTLITGMASGSIVAFNIDFNRWHYEHQNRY

SEQ ID NO: 187757 - protein, 739 aa, Artificial Sequence
  derived and/or modified sequence
MFSEIRAVFSRRYLLQNTALEVFMANRTSVMFNFPDQATVKKVVYSLPRVGVGTSYGLPQARRISLATPRQLYKSSNMTQRWQRREISNFEYLMFLNTIAGRTYNDLNQYPVFPWVLTNYESEELDLTLPGNFRDLSKPIGALNPKRAVFYAERYETWEDDQSPPYHYNTHYSTATSTLSWLVRIEPFTTFFLNANDGKFDHPDRTFSSVARSWRTSQRDTSDVKELIPEFYYLPEMFVNSNGYNLGVREDEVVVNDVDLPPWAKKPEDFVRINRMALESEFVSCQLHQWIDLIFGYKQRGPEAVRALNVFHYLTYEGSVNLDSITDPVLREAMEAQIQNFGQTPSQLLIEPHPPRSSAMHLCFLPQSPLMFKDQMQQDVIMVLKFPSNSPVTHVAANTLPHLTIPAVVTVTCSRLFAVNRWHNTVGLRGAPGYSLDQAHHLPIEMDPLIANNSGVNKRQITDLVDQSIQINAHCFVVTADNRYILICGFWDKSFRVYSTETGKLTQIVFGHWDVVTCLARSESYIGGDCYIVSGSRDATLLLWYWSGRHHIIGDNPNSSDYPAPRAVLTGHDHEVVCVSVCAELGLVISGAKEGPCLVHTITGDLLRALEGPENCLFPRLISVSSEGHCIIYYERGRFSNFSINGKLLAQMEINDSTRAILLSSDGQNLVTGGDNGVVEVWQACDFKQLYIYPGCDAGIRAMDLSHDQRTLITGMASGSIVAFNIDFNRWHYEHQNRY

SEQ ID NO: 187758 - DNA, 8841 bp, Artificial Sequence
  derived and/or modified sequence
atggcctcagaaaaacctgggcccggccccgggcttgagccccagcccgtgggtctgatcgcggtcggagcagccgggggcggtggcgggggctctgggggcgggggtactggcggctctggaatgggggaactgaggggcgcaagtggttccggaagcgtgatgctgccagcaggcatgatcaatcccagcgtgccaattaggaacatacggatgaagttcgccgtgttgatcggcctcattcaggtgggggaggtgagtaatcgggatatagtggaaacagtcctgaacctccttgtcggcggcgaattcgatctagaaatgaacttcattatccaagacgccgaatccataacatgtatgacagaactcttggagcactgtgatgtgacttgtcaggcggagatttggagtatgtttactgctatcctacgtaagagcgtgcggaacctgcagacctctacagaggtcgggcttatcgagcaggtcctcctgaagatgtccgctgtcgacgacatgatcgccgatcttttggtggacatgttgggcgtgctggcaagttattccatcactgttaaggaattgaagcttcttttctcaatgctccgcggagaatcaggcatctggcctcggcatgcagtgaagcttctgtcagtcctgaatcaaatgcctcagaggcacggtccagatactttcttcaattttccagggtgtagtgccgcagcaatcgctctgccgcctattgctaaatggccgtaccagaacggattcaccttaaatacttggtttcggatggatcctctgaacaacatcaacgtagataaggataaaccatatctttattgcttcaggacctctaagggtgtcgggtacagtgcacacttcgtggggaactgcctgatcgtgacctccctgaaaagtaagggcaaaggtttccagcactgcgtcaagtacgatttccagccaaggaaatggtatatgatttccattgtccatatctacaaccgatggcgcaatagcgagatcaggtgctacgtgaacggacaactagtgagctacggcgatatggcatggcatgtaaatactaacgacagctatgataagtgcttccttggcagtagcgaaacagctgatgcgaatagggtgttttgcgggcagcttggagcagtgtatgtgttttccgaggcattaaatcctgcccagattttcgcaattcatcagctgggccctggatataagtctacattcaagttcaagtctgagagcgacatccacctggcggagcatcataagcaggtcctatacgacggcaagctggcctcttctattgctttcacgtacaatgctaaggccaccgatgcacagctctgcctcgaatcttctccaaaagaaaatgctagcatatttgtgcatagcccgcatgccctgatgcttcaggacgtcaaagccattgtgacacattcaatacattcagcaattcacagcataggagggatccaagtcctcttcccactgtttgcccagttggacaatcggcagttgaatgattctcaggttgaaaccaccgtatgcgccactcttttagcttttctcgtggagctacttaagagctcagtggcgatgcaagagcagatgttggggggtaaaggatttctggtgatcggctacctcttggaaaagtcatccagggtccatataaccagggcagtgctagaacagttcctcagtttcgcaaagtacctggacggcctgagccacggcgcaccactgctaaagcagttgtgtgaccatattttatttaaccctgcaatatggattcataccccggccaaggtccaattgagtttgtacacctacctgtcggcagaattcattgggacggccaccatttatacgacaattaggagggtaggaactgtattacaattaatgcacaccctgaaatactactattgggtgattaatcctgccgactcatccgggatcactccaaagggtctggatggcccaaggccttctcaaaaggagatcatttcccttcgggccttcatgctattgtttctcaaacagctgatccttaaggacagaggagtcaaagaggacgaactgcagtctatccttaattatctgcttactatgcacgaagacgagaacatccacgatgtcctgcagctacttgtggccttgatgtctgagcacccagcctctatgattcccgccttcgatcagcgcaacggcatcagagttatctacaagctgttggccagcaagtctgaaagcatctgggtccaagccttaaaagtgctgggttattttctgaaacatctgggtcacaaacgcaaagtggaaatcatgcacactcattcccttttcacactcctgggtgagcggctcatgttgcacacaaatacggtgaccgtcacaacctacaacaccttgtatgaaattttgactgaacaggtgtgtacccaggtagtccacaagccacatcccgagccggattcaactgtaaagattcaaaacccgatgatcctgaaggtggtggcaaccctcttaaagaattccaccccgagcgctgagcttatggaagtgcggcgacttttcctatcagacatgattaaactcttctcaaacagcagggaaaaccgtcgctgtctcctgcaatgttccgtttggcaagactggatgttctctctcggctatattaatccaaaaaacagtgaggagcagaaaattacggagatggtctacaacattttcaggatcctgctctatcacgcaattaaatacgaatgggggggttggagagtgtgggttgataccttaagcatcgctcacagcaaggtaacatacgaggcccataaggagtacttggcgaaaatgtatgaagaataccagcgacaagaagaagagaatatcaaaaaaggaaagaaggggaatgtctcaactattagtggtttatcttctcagaccaccggcgccaaaggtgggatggaaatcagggagattgaggacctcagccagtctcagagcccagagtccgaaaccgactatcccgtgagcactgacacacgggatttgttaatgtctactaaggtgagtgatgatatactgggcaatagcgaccgccctgggagcggagtacacgttgaggtgcatgacttgcttgtggacatcaaggcagaaaaggtcgaggccacagaggtcaagctggatgacatggatctgtcgcccgaaacattggtagggggcgagaacggggccctagtcgaagtggagtctttgctcgacaacgtgtactcagcagccgtggaaaaacttcagaataacgtgcacggctccgtaggcattatcaagaagaatgaggagaaggataacgggcctctgatcactctagccgacgagaaagaggacttgccaaactcctccacctcgttcctgtttgataagatcccgaagcaagaggagaaactccttcccgaactctcaagtaatcatatcatcccaaacatacaggatacccaggttcacctcggggtcagtgatgacctagggctgctggcgcatatgaccgggtcggtggatctgacttgcactagctctattattgaagaaaaggagttcaaaatccacactacgtccgatggtatgagttctatctcggagcgggacctggccagctcaactaaaggtctggaatatgctgagatgacggccaccaccctggagactgagagttcaagcagtaaaattgtcccaaatatcgacgccggttccataatctccgatacagaacgctctgatgacggcaaagaaagcggcaaggagatccgcaaaattcaaaccactacaaccacccaggctgtgcagggacgtagcatcacacagcaggatagagatctccgcgtcgaccttgggtttcgaggaatgcccatgaccgaggagcagaggagacagttttcccccgggccacggaccaccatgttccgtattcccgaattcaaatggagccctatgcatcagagactcctgaccgatctgttgttcgcactggagactgatgtgcacgtgtggcgctctcattcgacaaagtccgttatggattttgtgaatagcaacgaaaatataatcttcgtacataatactattcacctcatttcccagatggtcgacaacatcattattgcctgtggaggcatactgccacttctgtccgctgccacctctcctactgtgagcaaaacagaattggaaaatatcgaggtcacccaaggaatgtcagctgaaaccgccgttacctttctatccagacttatggccatggtcgatgtgctggtattcgcctcctccctcaatttttcagagatcgaggcagaaaagaacatgtcttctggcgggctgatgcgccagtgcctgaggctcgtgtgttgtgtggccgttaggaattgtcttgagtgcagacagagacagcgcgaccgtgggaacaagagctcacacggctcctctaaaccacaagaggtcccacagtcggtgactgccactgccgcaagcaaaacaccccttgagaacgtgcctggtaacctgagtcctattaaggaccctgataggctcctgcaggatgttgatatcaacagattacgagcagtagtttttcgcgacgtggatgatagtaaacaggcacagtttctggccctcgcagttgtgtattttatttccgttctgatggtcagcaagtaccgcgacattttggagccacaaagagagaccacccgcacggggagccagccaggccgcaatatcagacaagagatcaattcaccaacgtcaaccgtcgtcgtcataccctctattccccacccctcattgaatcatggcttcctggcaaaactcattcccgaacagagcttcggacattctttctacaaagaaacccccgccgcgttcccagataccatcaaggagaaggagactccaactccaggagaagacatacaagtggagtcaagcattccacacacggacagtggtattggggaggaacaggtggcaagcatactcaacggagcagagttggaaaccagcacaggtccagatgccatgagcgagcttttgagcaccttaagtagtgaagtgaaaaagtctcaagagagtctgactgagaaccccagcgagacccttaagcccgccacctccatatcttccatctcacagactaaagggattaacgtaaaggaaattcttaagtcactagttgctgcaccggtggagattgccgagtgcggtcctgagccaataccatatcccgatcccgcactgaagcgagaaactcaggctatactacctatgcaattccactcctttgacagaagcgttgtggtgcctgttaaaaaacctccccctggctccctggctgttactactgtgggagccaccactgcaggtagtggactgcctaccggtagtacgagcaacatctttgcagccacgggagccacccccaaatcgatgatcaatacaacgggcgcagtggatagtggaagctctagctctagcagcagtagttcttttgtaaatggagctacttctaagaatttgcccgctgtacagacagtggcacctatgcccgaagactcggcagagaatatgtccatcaccgctaaattggaacgcgccctggaaaaggtggctccattgctgagagaaatcttcgtcgattttgctccattcctctcgcgcactctactcggctctcacggccaggagttgcttattgagggtctggtgtgtatgaagtccagtacgtcagtggtcgagctggttatgctgttgtgctcacaggaatggcagaatagcatccagaagaatgccggtctggcattcatagaacttattaacgagggcaggctcctttgccatgctatgaaagaccacattgttcgggtggccaacgaagccgagttcattctcaacaggcagagggcagaagatgtgcacaagcatgccgagttcgaaagtcagtgtgctcaatatgccgccgatcgtcgggaggaggagaagatgtgcgatcacttaattagtgcagcgaagcatcgggatcacgtcacggcaaaccagttgaaacagaagatcttgaacatattgactaacaagcatggggcctggggcgctgtgtcccactctcaactccatgatttttggagactcgattactgggaggacgacttaagaaggaggagaagattcgttcgtaatgccttcggctcaacgcacgctgaggctctgcttaaggccgcaatcgaatacggaaccgaagaggacgtggtgaaatctaagaagacattccggagccaggccatagtgaatcagaatgctgagacagagctgatgttagagggggacgatgacgccgtgtctcttttacaagaaaaggaaatcgacaacttagcggggcctgtggtgttgtctactccagcccagctcatagctccggtagtcgtcgctaaaggaactttgagcataacaactacagaaatctacttcgaagtcgacgaggatgatagcgccttcaagaagattgacaccaaagttctcgcatacactgaagggttacacgggaagtggatgttctcggagatcagggcagttttctcaaggagatatttgctgcaaaatacggccctggaggtatttatggctaatcgcacaagcgttatgtttaactttccagatcaagccaccgtgaagaaggtagtgtatagcttgcctcgggtaggagttgggacaagctacggccttcctcaggcccgccgcataagcctagccacgcccagacagctgtacaagtcatctaacatgacacagcgctggcaacggagggagatttccaacttcgaatacctgatgtttctgaatacaatcgccggcaggacatataacgacctgaatcagtatcctgtgtttccctgggtgctgaccaactacgagtctgaggaactggatctgacactgccagggaattttcgggacctttctaagccgattggcgcattaaatcctaagagggcagtcttttacgctgaacgctacgagacatgggaggatgaccaatccccgccctaccactacaatacacattattcaaccgcgacctcgacactttcttggctggtgagaattgaacctttcactacctttttcctgaatgccaacgatggaaaatttgatcacccagacagaaccttctcttcagtggcaaggtcttggcgcacgtctcaacgcgatacatccgacgttaaggagctgattccagaattctactacttgcccgagatgtttgtgaattccaatggctataacctcggggtacgcgaagacgaagttgtggtgaatgacgtcgatctcccaccatgggcaaaaaaaccagaggactttgtgcgcatcaatcgcatggctctcgaatctgaattcgtgtcatgccaactgcatcagtggatagatctcatctttggctacaaacagcgcggacctgaggcagtcagagccttaaatgtgttccattatctaacatatgaaggttctgtcaatctagattctatcacggaccccgtgctgagggaggctatggaggctcagattcagaacttcggccagacacccagccagttgctcattgaaccccacccaccacggtcgagcgccatgcacctgtgttttctgccccaaagtccattgatgtttaaggaccagatgcagcaggatgtgatcatggtgctaaaatttccatccaactccccggtgacccacgtcgcggctaatactttaccccacttaaccataccagcagtcgtgaccgtgacgtgttctcgattgtttgccgtgaaccgttggcacaatactgtcggactcagaggcgccccaggatatagccttgaccaagcccatcatctgcctattgagatggaccccttgatcgcaaataattcaggcgtgaacaaacggcagatcactgacctcgttgaccaatcgattcagattaacgctcactgctttgtggtgacagcagataatcggtacatcttgatctgcggattttgggataagagttttcgggtgtactcgaccgagactgggaagctcacacaaatcgtctttggacactgggacgtcgtgacgtgcctcgcgaggagtgagtcttatattgggggagactgctacatcgtatccggatcccgcgacgccacactactactgtggtactggagcggccggcatcacattataggggataatccaaactcatccgattatcctgctcccagagccgttcttacaggacacgaccatgaggtagtttgtgtctctgtctgcgccgagctcggacttgtgatctcaggtgctaaggagggtccctgccttgtgcatacaatcactggagacctgttgcgggcgctggaagggcctgagaattgccttttccctagactgatttctgtgtcctctgaggggcactgcatcatttattacgagcggggtcgcttctccaacttctcaatcaacggtaagctcctggcacagatggaaatcaatgattctacacgagccatccttctgtcttccgatggacagaacttagtgaccggcggtgataacggagtggtcgaggtgtggcaggcttgcgattttaaacagctgtatatctatccggggtgtgacgccggcatccgggccatggacctctctcatgaccagcggactctaattaccggcatggcttcagggagtatcgtggcttttaacatagacttcaacagatggcactatgaacaccagaaccgctattag

SEQ ID NO: 187759 - DNA, 8841 bp, Artificial Sequence
  derived and/or modified sequence
atggcaagcgagaaaccggggccgggccccgggttggagccacagcctgtcgggctcattgccgtcggggcggccgggggaggaggaggagggagcggaggcggcggaacaggcggttcaggaatgggagaattgcggggagcaagcgggtccgggtccgtaatgcttccagcagggatgattaacccatcagtccctatccggaatataaggatgaaatttgccgttctaatcggactgatccaggttggagaagtgtctaaccgggatatcgtggaaacagttcttaacttgctggtgggaggcgagtttgacctggagatgaatttcataatccaggatgctgagagtatcacgtgtatgactgaattgttagagcattgtgacgtgacatgccaggccgaaatatggtcgatgtttacagcaattctgcggaaatccgtgcggaatctacagacctccacggaggtggggctgattgagcaagtcctgctcaaaatgtcggccgtggacgatatgattgctgatcttctcgtcgatatgctaggggtgctggcctcatacagtattacggtgaaggaacttaagctattgttttcgatgttgaggggagaatcagggatttggcccaggcatgctgtgaaattactgtccgtcttgaaccagatgcctcagcgacatggccccgatacttttttcaatttccctggatgctcagctgcagccattgcactacctcctattgcaaagtggccctatcaaaatggctttacccttaatacttggtttaggatggatcccctgaacaacatcaacgtggataaagataagccctatctgtattgttttcgcacctcaaaaggggtgggctattctgcgcattttgtgggcaactgtctgatcgtgacctccttgaagagcaaggggaaggggttccagcactgcgtgaagtacgatttccagcctcggaaatggtacatgataagcattgtccatatttataaccggtggcgcaattctgaaattagatgctatgtaaatggacaactcgtaagctatggggacatggcatggcacgtcaacacaaatgatagctatgacaagtgttttctggggagtagtgaaaccgcagatgctaaccgggtgttctgtggtcaacttggtgctgtctacgtcttcagtgaagctttgaacccagcccagatttttgccatccaccagcttggtcccgggtacaagtccaccttcaaattcaagtctgagtccgacatccaccttgcggagcatcacaagcaggtgctttacgatggtaagctggcaagcagcatagcatttacctacaacgccaaggcgacagatgctcagctgtgcctggagagttctccaaaggagaacgcatctatcttcgtgcacagtcctcatgcactgatgctacaggacgttaaggcgatcgtcactcacagcattcactctgcgatccattctatcggcggcattcaggttctctttccactatttgcccaattggacaatcgccagttaaacgacagccaggtcgagaccaccgtgtgtgctacccttttagcattcttagtggagctgctgaagagctctgtagccatgcaagaacaaatgctgggagggaagggttttctcgtgatcggctaccttcttgagaagagcagtagagtgcacatcacacgggccgtgttagaacaattcctgagcttcgcaaaatatctcgatggcttgtcccacggggccccactgttaaaacagctgtgtgatcatatcctttttaaccccgctatttggattcacactccggcgaaagtgcagctgtcgctctatacctatttaagtgctgagtttatcggcaccgctaccatttacacaactatcagacgtgtgggtaccgttctccagttaatgcatactttaaaatactattattgggtgataaatcccgctgacagttcaggaatcacacccaaaggactagacgggccccggccaagtcaaaaagagatcatctcactgcgcgcgttcatgctgttattcctgaagcagctcatcctgaaggaccgtggggtgaaagaggacgagctgcagagcatcctgaattacctcctgactatgcatgaagatgaaaatatacacgatgtcctccagctcctagtggctctgatgtcggaacaccccgcaagcatgattcccgcctttgaccagcgtaacgggattagggttatctacaaactcctggcatccaaatcagaatctatctgggttcaggcactcaaagtgctcggatactttctaaagcatttgggccataaaagaaaggtggaaatcatgcacactcactcactcttcacactcctgggcgaacgactgatgctccacactaacactgtaactgttacgacatacaataccctttacgagatactcactgagcaggtatgtacccaggtggtgcataaacctcatcccgagccggattccactgtgaagatacagaatccaatgatccttaaggtggttgctaccctactcaagaacagtacccctagtgcagagctgatggaggttcgcagactgttcctaagcgacatgattaagctattttccaactctcgtgagaatagacggtgcctacttcaatgctctgtctggcaggactggatgttttcgctgggctacataaatccgaagaactctgaagagcaaaagataaccgagatggtgtataatatctttcggattctgttatatcatgcaattaagtatgagtggggggggtggagagtgtgggtggacactttgtcaattgcgcatagcaaggtgacctacgaggcccacaaagagtacctggctaagatgtacgaagagtatcagaggcaggaagaagagaacatcaagaagggaaagaaaggcaacgtcagcaccatttctggcttgtcatcccagacgaccggggccaaaggtggtatggaaatccgcgaaatcgaggatctttcccaaagccagtcccctgagtctgaaaccgactaccctgtgagcaccgacacaagagatctcctcatgtcgaccaaagtcagtgacgatatcctgggtaattccgatcggccaggaagcggcgtacatgtcgaagtgcacgaccttcttgtggacattaaggctgaaaaggtggaggccaccgaagtgaagctggacgacatggatctaagcccggagaccctagtgggaggtgagaacggcgccctggtggaggtggaaagcttgctggataacgtatatagcgccgccgtggagaagctccagaacaacgtgcacggaagtgtgggcattataaagaagaatgaggagaaggataacggacctttaatcactctggccgacgagaaggaggacctgcctaattcttctacaagttttctgttcgacaagattccgaagcaagaggaaaagttgctgcccgaactcagtagcaatcatatcatccctaatattcaggacactcaggtacatctgggggtgtccgacgatctgggcctgcttgcccacatgaccgggagcgtggacttaacatgcacaagttcgataattgaggaaaaagaatttaagattcataccacctctgacggaatgtcgagcatctcagagcgcgacttggcaagttcgaccaaaggcctcgagtatgccgagatgactgctacaaccctggagacggagtcgtccagttcaaagattgtgccaaatatcgacgccggaagtatcatctcagacacggagcgcagcgatgatggtaaagagtcagggaaggaaatccgaaagattcagactacaaccactacccaagcagtgcagggacgctctattacacaacaggatcgcgatctccgcgtggatttgggatttcgcgggatgcccatgactgaggagcagaggcggcagttttcgccaggcccacgcacaacaatgttcagaattccagagtttaaatggtcgcctatgcatcagaggttgctgaccgatctcctttttgctcttgaaaccgacgtccacgtatggagatcacattccacaaagagtgtcatggacttcgtgaacagcaacgaaaacatcatcttcgtgcataacacaatccatctcatctcccaaatggtcgataacatcattatcgcatgcggggggattttgcccctacttagtgctgctacaagtccaactggatcgaagaccgagctggagaacatcgaggtcacgcaggggatgagcgcagagaccgcagtgaccttcttatctcgtctcatggctatggtcgacgtcctcgttttcgctagtagtctgaattttagcgaaattgaagccgagaagaacatgtccagtggtgggttgatgcgccagtgcctccgactggtctgttgcgttgcagtccgcaattgcctcgaatgtagacagaggcagcgggacagaggcaacaagtcttcccacggatcgagcaaaccacaggaggtcccgcaatccgtgaccgctactgcagcctccaaaaccccgttagaaaatgttcctggcaacctctctccaatcaaagatccggatcgcctgctgcaggatgtggatatcaacaggcttcgggcagtcgtgtttcgagacgtggacgattctaaacaggcacaatttctagcattggccgtggtgtactttatctctgtgttgatggtgagcaaatatagagatatcctggagccacaaagagaaaccactagaacagggtcccagccaggccgaaatattcggcaagaaatcaatagccccacttctaccgtcgtggtcatccctagcattccgcacccgagccttaatcacgggtttttggctaagttgatccctgaacagagctttgggcacagtttctataaagaaacccctgctgctttccccgacacgatcaaggagaaagaaacgcctactccgggagaggatattcaggtagagtcctccatcccacatactgattcaggaatcggagaagagcaagttgcgtctatcctgaatggtgcagagctggaaacatctactggtccagacgcaatgagcgagctgctgtctaccctgtcctctgaggttaagaaatcccaggaatctttaactgagaacccctctgagacactgaagccggcaacatccattagcagtatatctcagacaaagggaattaatgtgaaagaaatcctgaagtctctcgttgcagcccctgtagaaatcgcggagtgtggccctgaaccaatcccctaccctgacccagcccttaagcgcgagacccaagccattcttcctatgcaattccatagtttcgacagatccgtggtggtgcctgttaagaagccccccccaggatccctcgccgttaccaccgtgggggctaccacagctggttctgggttaccaactggctcaacttcaaatatttttgccgccaccggcgcgaccccaaaatcaatgatcaatacaactggcgccgtagactctgggtcttcaagctcatccagtagctccagcttcgtcaatggggctacttctaagaatctgccagcagtgcagaccgtcgcacccatgccagaggactcagcagagaacatgtctattactgcaaaactggagcgggctttggaaaaagtcgccccactgctaagggaaatcttcgtagacttcgcccctttcttgtcacgcaccttgttggggtctcacgggcaggagctgctgatcgaaggtttggtgtgcatgaagtcctcaacaagcgtggtggaactcgtgatgttgctctgttcccaggagtggcagaactccattcagaaaaatgctggactggcatttatcgaactcatcaacgagggccgactgctgtgtcatgcgatgaaagaccatatcgttcgcgtggctaacgaggctgagttcatattaaacaggcagagggctgaagacgttcacaagcacgccgagttcgaatctcaatgcgcccagtacgcagctgatcgtcgcgaggaggaaaaaatgtgcgaccatttgattagtgccgcgaagcacagagatcacgtgactgctaatcaactcaagcagaagattcttaacattcttacaaacaaacacggcgcctggggggccgtgagccactctcagttgcatgatttttggagactggattactgggaggacgatctgagacgcagacgtcggttcgtcaggaacgcctttggctccacacacgcagaggctctgctgaaagcagctattgagtatgggactgaggaagatgttgtgaaaagcaaaaagacctttagaagtcaggccattgtcaaccaaaacgcagagactgaactgatgttagagggcgacgatgatgcggtgagcctgctacaggagaaggaaatcgacaatctagcaggaccagtggtcctgagcacccctgctcaattgatagcccccgttgtggtggcgaaaggaacactgagcatcaccactaccgaaatatattttgaggtggatgaggacgattctgcgtttaaaaagattgatacaaaagtgttggcatacacggagggtttgcacggcaagtggatgttttctgagatccgagctgtgttctcacggcggtacctcctccagaatacggcgctggaggtgttcatggcgaacaggactagcgtgatgttcaacttcccagatcaggctaccgtgaagaaggtagtttattccctgccgcgagtgggtgtgggcacaagctatggccttccccaggcacgcagaatctcactagcaacaccacgacagctttataagtcatcaaatatgacccagcgctggcaacgacgggaaatatcaaatttcgaatacctgatgtttctcaacactattgcaggacgcacttacaatgacttaaatcaatatccagtgtttccatgggttctgacgaactacgagagcgaggagctggatctgactctaccaggtaactttagagacttgtcaaagcctattggggcactcaatccaaagagggcagtcttctatgccgagaggtacgaaacatgggaggacgaccaatcccccccttatcactacaatacccactactccactgccacctctacgttgtcatggctggtccgcatcgagccctttactaccttctttctgaatgcaaatgacgggaaattcgatcatcccgacagaaccttctcttcagtagctcgctcttggagaactagtcagcgcgatacctcagacgttaaagagctgataccagaattttactatctccccgagatgtttgtgaacagcaacggctataatctcggcgttcgggaagatgaggtggtggtgaacgatgtggacctccctccatgggccaaaaagcctgaagatttcgttcgcatcaaccgcatggcgctggaaagtgaattcgtatcttgccagctacaccagtggattgacctgatcttcgggtataagcaacgcggcccggaagccgtgcgcgcactgaacgtgttccactatctgacatatgagggatcggtcaacctcgattccatcacagaccctgttcttagagaggcaatggaggctcagatacaaaattttggccaaacccccagccagctcctgatagaaccgcatcctccacggagctcagctatgcacctgtgctttttgccacagtcaccacttatgtttaaggaccaaatgcagcaggacgtaataatggtcttaaaatttccttccaactcacctgtgacccatgtggcagctaacacacttccacacctgacgatcccagcggtggtgaccgtcacctgcagccgtctgttcgccgtcaacaggtggcataataccgtgggactccggggtgctccgggctacagccttgaccaggcccaccacctgccaatcgagatggatccattaatcgccaataattccggcgtcaataagagacagatcacggatctcgttgaccagtccattcagataaacgcccattgcttcgtggtgactgctgataacaggtatatcctgatttgtgggttctgggacaaaagctttagggtttattcgacggaaaccggcaaactgacacaaatcgtgttcggtcactgggacgtagtaacttgtttagcgcgcagcgagagctacataggtggggattgctacattgtctctggtagccgagacgcaacactcctcctttggtattggtcaggtagacatcacattattggcgacaacccaaatagcagtgactatcccgccccaagggcggtcctgactggccacgaccacgaggtggtttgtgtgtctgtctgtgcagagttgggcctcgtgataagtggcgccaaagagggcccctgcttggtacacacgatcaccggagatctgctgcgcgccctggagggccccgagaattgcctattcccccgtctcataagcgtcagcagtgaaggacattgcatcatatactatgaacggggcaggttcagtaatttctccatcaatggaaagctcttagcccagatggaaataaacgactctaccagagccattctcttgtcttcagacgggcagaatctggtcaccggcggagataatggggttgttgaagtgtggcaggcatgcgatttcaagcagctgtatatctatcctggatgcgatgctggtatccgcgcaatggacttaagccacgatcagaggactctaatcaccggtatggcctctggctcgatcgtagcatttaatatagatttcaaccgctggcactacgaacaccagaacagatactag

SEQ ID NO: 187760 - DNA, 8841 bp, Artificial Sequence
  derived and/or modified sequence
atggctagcgaaaagccaggaccaggacccggactggagccgcagcctgtgggtctgattgcagttggagcagctggtggtggtggcggcggttccggcggtggcgggacaggagggagtgggatgggcgaactaaggggggcctctgggtctggttctgtgatgcttccagcaggaatgataaacccatcagtccctattcgtaacattaggatgaagttcgcagtgttaatcggcctcattcaagtgggagaggttagtaatagggacatcgtcgagacggtgctcaacctgctggtgggtggcgaatttgatctggagatgaactttattattcaagacgccgaaagtattacatgtatgacggaattgctggaacactgcgacgtcacttgccaggccgaaatatggagcatgtttaccgcgatattgaggaagtcagtacgtaacttgcagacgtcaaccgaagtcgggctcatcgagcaggtgctgctgaaaatgagcgccgttgacgacatgatcgctgatctcttagtcgatatgctcggggtccttgcttcctactccatcaccgtgaaagaattgaagctgctgttttcaatgctgagaggcgaaagcggtatttggccgcggcacgccgtcaagttgctatctgtgctcaaccagatgccacagcggcacggtccagatactttcttcaactttccagggtgtagtgcggctgcaatcgccttgccacccattgctaagtggccatatcaaaatggctttacgctcaacacatggtttcgaatggatccactcaacaacatcaatgtagacaaagacaaaccctacttgtactgttttagaactagcaaaggagtcggatactcagcacactttgtaggaaactgcttaattgtcacgagtctcaaaagtaaggggaaaggtttccaacactgtgtgaaatatgattttcagccaaggaaatggtatatgatttccatcgtacatatctataacaggtggagaaatagcgaaatacgatgctacgtgaatggacaactggtgtcctatggtgacatggcatggcacgttaatacgaacgacagctacgacaaatgttttctggggagttccgagacagcggacgcaaatcgagtgttctgtggtcaactgggggccgtgtacgttttctccgaagcactgaatccggcacaaattttcgccattcaccagctgggcccgggatataagtccacctttaaatttaagtcggagagtgatatccacctggcagaacaccataagcaggtgctgtacgatggaaagttggcatccagcatcgcttttacgtacaatgcaaaagccacagatgcacagttatgtctggaatcgagccccaaagagaatgctagcatctttgtgcactcaccgcacgcactcatgttgcaagatgtgaaggccatcgtgacacattctatccacagcgccattcactctattgggggcatccaggtcctcttcccacttttcgcccagcttgataacaggcagctcaacgacagtcaagtagagaccactgtatgtgcgactcttctggccttccttgtggaattgctcaaaagctccgtggccatgcaagagcaaatgctggggggcaaaggcttcttggtgatcgggtacctgcttgagaagagttcacgcgtccacatcacccgagccgttcttgaacaatttttaagtttcgctaagtacttggatgggctctctcacggggctccactgctcaagcaactttgtgatcacatcctctttaaccccgccatctggatccatacgccagcaaaagtgcaactctcactttatacgtatctgtcagccgaatttattggcacagccaccatttacacaactattcgacgcgtgggcacagtgctgcagcttatgcacactctgaaatactattattgggtgatcaatccagccgacagtagcggcattaccccaaagggactagacggcccacgcccttctcagaaagagattatctctctgagagcctttatgctgctttttctgaaacagctcattctgaaggaccgaggagttaaggaagatgaactgcagtccatcctgaactatttgttaaccatgcatgaggacgagaatatccacgatgtattgcagctcttagtcgccttaatgtctgagcacccagcaagcatgatccctgccttcgatcagcgaaacggtatcagggttatctataagcttctagctagtaagtctgagagcatttgggttcaggccttgaaggtgctgggatattttcttaagcatttggggcataagaggaaggtggaaattatgcacacccactctttgttcaccctgctgggcgagcggctcatgctgcatacaaacacggtcactgtgacaacctacaatacgttatacgaaattctgaccgaacaggtttgcacccaagtggtgcacaagccccacccggaaccggactccactgtgaagattcaaaatcccatgatccttaaagtcgtggccacactcctgaaaaatagcactccctctgcagagctcatggaagttagacgactcttcctcagcgatatgatcaagctcttttccaactcccgcgagaacagacgatgtctgttacagtgttccgtctggcaggactggatgtttagtctcggatatatcaacccaaaaaattcggaagaacaaaagattactgagatggtttataacatcttccgaatactactgtaccacgccattaagtatgagtgggggggctggcgcgtgtgggtggacaccttgagcatcgcccatagcaaagttacatatgaagcccataaagaatatcttgccaaaatgtatgaagaataccagcggcaggaagaggagaacataaaaaaaggcaaaaaggggaacgtgagtacaatatcagggctttcatcccaaacaactggtgcaaaaggagggatggaaattcgtgaaatcgaggatctgtcacagtcccagtcgcctgaatccgaaaccgactacccagtctccactgacacccgagatcttctcatgtctaccaaggtgagtgacgatatcctaggcaattccgaccgacctggaagcggagtacatgtggaggtgcatgacctgctggtagacataaaagcagaaaaggttgaggccaccgaagttaagttagatgacatggaccttagccctgagacacttgtgggtggcgagaacggcgcacttgtggaggtagagtctctcttggataatgtatattcggcagccgtggagaagctgcagaacaacgtacacggctccgtgggtatcatcaagaaaaatgaagagaaggacaatggcccgctgattactctggctgacgagaaggaggatctgcctaactcttccaccagttttctgtttgataaaatcccaaaacaggaagaaaagctcctgcccgaactgtcttctaatcacatcataccaaatattcaagatacgcaggtgcacctgggggtgagtgacgatctaggcctattagcacatatgacaggatcggtggacctcacctgcacctcctctatcattgaggaaaaggagttcaagattcacaccacgtctgacgggatgagttctatttcggagcgggatctggcctctagcaccaagggcttggagtacgccgagatgaccgcaactacactggagacagagtcttcatctagtaaaatcgtgccaaatatcgacgccgggtccatcatcagtgacactgagcggtcggatgatggaaaagagtccggaaaggagatacgcaaaatacagactacaactacaacccaagcggtccagggtagaagtataacacagcaggacagagacctgcgagtcgacctggggttccgcgggatgcctatgaccgaggagcagaggcgccagtttagtcccgggccaagaacaactatgttccgcatccctgagtttaagtggtccccaatgcaccagcgactgctcaccgacctgctgtttgccctggagacagacgtgcacgtttggcgtagccatagcacaaaatcagttatggacttcgtgaactctaacgagaatatcatcttcgtccacaatactatccacctcatctctcagatggtagataatattatcatcgcttgcggcggcatccttccgctgctctctgctgcgacctccccaaccgtctctaaaactgaactggagaacatcgaggtgacccaaggcatgagcgcagaaacagcagtgaccttcctgagcaggctaatggcaatggtcgacgtgttggtgttcgcatcaagtctgaactttagcgagatcgaagctgaaaaaaatatgtcttccggcgggctcatgcgacagtgtttgaggctcgtgtgttgtgtcgctgtccgcaattgcctagagtgtcgtcagagacagagggaccggggaaataagtcctcacacggctcctccaagccccaagaggtgccacagtcagtgaccgccaccgccgcctccaaaacgcccttagagaacgtcccaggtaacctgtcacccatcaaggacccagatcggcttttgcaggatgttgacattaaccgcctgagagcagttgtgttcagagacgtggatgacagcaagcaggcacaatttcttgcactggctgtcgtgtattttatatcagtcctgatggtgtccaagtaccgagatatcttagagccccagcgtgagactaccagaactggatcgcagcctggtcggaacatccgccaggagattaattcaccaacctccaccgtggtggtgattccgtcaataccgcacccgagcttaaatcatgggtttttagctaagttaatccctgagcaatcatttgggcacagcttctataaggagaccccggcagcttttcctgacacaatcaaagagaaagagacccccacgccaggcgaggatattcaggtagagtccagtattccccatacagactcgggtatcggagaagaacaggttgcttcaattctcaacggcgcggagctcgagacatctactggaccggacgccatgtcagagttgctttcaaccctgagcagtgaagtgaagaagtcccaggagtctcttaccgagaacccatctgagacactaaaacccgccacctctatttcttctatttcacagacaaagggtattaatgtcaaagagattctgaagtcactggtcgccgctcccgtggagatagccgagtgcggcccggaacctattccatacccagatcctgctctcaagagagagacacaggctatactgcccatgcaatttcactcgttcgatcggtcagtggtggtaccagtgaagaagcccccacccggctcactggcggtcaccacagtcggggcgaccaccgccggtagcggcctgcccactggcagtacttccaacatctttgccgccaccggagcaactcctaagagtatgatcaatacaacaggcgccgttgacagcggtagctcctcctcatctagttctagctctttcgtaaatggcgcaacctctaagaacttaccagcggttcagactgtcgctccaatgccagaggattcagccgaaaatatgagcatcactgcaaagctagaaagggcgctcgagaaggttgcacctctgcttcgggagatctttgtggactttgcaccctttctcagtaggacactgttagggtcccatgggcaggagctcctgattgaaggtctggtgtgtatgaaatccagtacctcagtggtggaactggtcatgctcctctgcagtcaggaatggcagaactctatccagaaaaacgccggcttagcgttcatagaactcatcaacgaaggtagactactgtgccacgctatgaaagatcatatcgtgcgggtggctaatgaggccgaatttatcttgaatcgccagagagctgaagatgtgcataagcatgccgagttcgagtcccagtgcgcccagtacgctgcagaccgacgggaagaggaaaagatgtgtgatcatttgatctcagcagctaaacatcgggaccatgtaactgcaaaccagctgaaacagaagattctcaacattctgaccaataagcacggggcctggggggcggtatcccatagccagttgcacgacttttggcggctcgattactgggaggatgatctccgccggcgccggagatttgtgaggaacgcattcgggtctacacacgctgaggcattacttaaggctgcaatcgagtacggtacggaagaggatgtcgtgaaaagtaagaagacctttaggagccaagccatagtgaatcaaaacgccgagacagaactgatgttagagggcgatgatgacgcggtaagcctgctgcaggagaaagagattgacaacctggcagggcccgtcgttttgagcacaccagcacagttgatcgctccggtggttgttgcaaagggaaccctgagcattacaaccacggagatctacttcgaggtggatgaagacgattcagcatttaagaagatcgatacaaaggtgctcgcctatacagaagggctgcatgggaagtggatgttttctgagattcgcgcagtcttctccaggcgatatttgctccagaacacagctttggaagtcttcatggctaatcgcacttccgtcatgtttaacttccctgaccaggcaaccgtcaagaaagtggtatatagcctcccgcgtgtgggcgttggtacgtcctacggcctacctcaagcccggaggatcagccttgctactcctcggcagctgtataagtccagtaatatgacacagcgatggcagcgaagagaaatttccaacttcgagtatcttatgttcctgaacactatagccggacgtacctacaacgacctgaatcagtatcccgtgttcccctgggtcttgactaattatgagtcagaagagcttgatcttaccttaccaggcaattttagagatttgagtaagccaattggggcactgaatcccaagcgagcggttttttatgcggagaggtatgaaacctgggaggacgatcaaagtccaccttaccattacaatacccactattctactgctacttccaccctgagttggctggtgagaattgagccttttacgacattcttccttaatgccaatgatggtaagttcgatcatcccgataggactttttcttccgtggcaaggtcctggaggactagtcaaagggatacaagcgatgtgaaggaactcatccctgagttctactacctgccggagatgttcgtgaattcaaatggatacaatctgggcgtgcgtgaggatgaagtggtggtcaacgatgtggatctcccgccttgggccaaaaaacctgaggacttcgtgagaatcaacaggatggcgctggagtctgagttcgtctcttgccagctgcatcagtggatcgatcttatcttcggctacaagcagcgtggtccagaagcagtgagggcactgaatgtttttcactacctaacctatgagggctccgtcaacttggatagcattacggacccagtgcttagagaggcaatggaggcccagattcagaatttcggccaaactccgagccagttattgattgagccccaccccccaaggtcatccgctatgcatctctgctttctgccgcagtcacctctcatgttcaaagaccagatgcagcaggatgtgattatggtcctgaagtttccatcaaattcacccgttactcatgtggccgccaatactctaccacatttgacgattcctgccgtagtgacggtaacgtgttctcggctgtttgccgttaacaggtggcataacaccgtggggctcaggggagcccccgggtattctctggatcaggctcaccatctccctatcgagatggaccctctcattgcgaataacagcggggtgaacaagagacaaattaccgatttggtagaccagtccatccagattaatgcccactgcttcgttgtaaccgctgacaaccgatatatactgatctgcgggttctgggataagagcttcagggtttactccacagagacaggtaaactgacgcagatcgtgttcggccattgggatgtggtcacctgtctcgcccggagcgagtcatacataggcggcgattgttacatcgtctctggttcccgggatgctacacttctcctgtggtactggagtggccgtcatcacatcattggagacaacccaaacagttccgactatccggcgcctcgtgcggtcttgactggtcatgatcacgaggtggtctgcgtcagcgtgtgcgcggagctcggccttgtgatttccggcgccaaggaggggccatgcttggtgcataccataacgggagacctcctgcgtgccctggaagggcctgagaactgcctgtttccaaggctgataagcgtcagttcagaagggcactgtattatctactatgagagagggcgcttttccaacttctctataaacggcaagctgttagctcagatggagatcaatgactccactcgagccatcctgttatcttccgatggacagaacctagtcacgggcggcgacaatggagtcgtcgaggtctggcaggcctgcgacttcaagcagctgtacatctacccaggctgtgacgcagggatcagggccatggacctgtcacacgaccagagaactttgataacaggaatggcgtccgggtccatcgtggcctttaatatcgatttcaatagatggcattatgagcaccagaacagatattag

SEQ ID NO: 187761 - DNA, 8841 bp, Artificial Sequence
  derived and/or modified sequence
atggccagcgagaagccaggccctggccctggcctggagccccagcctgtgggcctgattgctgtgggcgctgctgggggcggcggcggcggcagcggcggcggcggcactggaggcagcggcatgggagagctgcggggggccagcggcagcggctctgtgatgctgcctgctggcatgatcaaccccagcgtgcccatccggaacatccgcatgaagtttgctgtgctgattggcctcatccaggtgggggaggtgagcaacagagacatcgtggagaccgtgctgaacctgctggtgggcggggagtttgacctggagatgaacttcatcatccaggatgctgagagcatcacctgcatgacagagctgctggagcactgtgatgtgacctgccaggccgagatctggagcatgttcaccgccatcctgaggaagtctgtgaggaacctgcagaccagcacagaggtgggcctcatcgagcaggtgctgctgaagatgtctgctgtggatgacatgattgctgacctgctggtggacatgctgggcgtgctggccagctacagcatcaccgtgaaggagctgaagctgctcttctccatgctgcggggggagagcggcatctggcccaggcatgctgtgaagctgctgtctgtgctgaaccagatgccccagagacatggccctgacaccttcttcaacttccctggctgcagcgctgctgccatcgccctgccccccatcgccaagtggccctaccagaatggcttcaccctgaacacctggttcaggatggaccccctgaacaacatcaacgtggacaaggacaagccctacctgtactgcttccgcaccagcaaaggagtgggctacagcgcccactttgtgggcaactgcctgattgtgaccagcctgaagagcaagggcaagggcttccagcactgtgtgaagtatgacttccagcccaggaagtggtacatgatcagcatcgtgcacatctacaaccgctggaggaacagcgagatccgctgctacgtgaatggccagctggtgtcctatggagacatggcctggcacgtgaacaccaatgacagctatgacaagtgcttcctgggcagcagcgagacagcagatgccaacagagtcttctgtggccagctgggcgctgtgtatgtgttcagcgaggccctgaacccagcccagatctttgccatccaccagctgggccctggctacaagagcaccttcaagttcaagtctgagagtgacatccacctggccgagcaccacaagcaggtgctgtatgatggcaagctggccagcagcatcgccttcacctacaatgccaaggccacagatgcccagctgtgcctggagagcagccccaaggaaaatgccagcatctttgtgcacagcccccacgccctgatgctgcaggatgtgaaggccatcgtgacccacagcatccacagcgccatccacagcatcggcggcatccaggtgctcttccccctgtttgcccagctggacaaccggcagctgaatgacagccaggtggagaccaccgtgtgtgccaccctgctggccttcctggtggagctgctgaagagctctgtggccatgcaggagcagatgctgggcggcaagggcttcctggtgattggctacctgctggagaagagcagccgggtgcacatcaccagggctgtgctggagcagttcctgagctttgccaagtacctggatggcctgagccacggggcccccctgctgaagcagctgtgtgaccacatcctcttcaacccagccatctggatccacaccccagccaaggtgcagctgagcctgtacacctacctgtctgctgagttcatcggcacagccaccatctacaccaccatcagaagagtgggcaccgtgctgcagctgatgcacaccctgaagtactactactgggtgatcaacccagctgacagcagcggcatcacccccaagggcctggatggcccccggcccagccagaaggagatcatcagcctgcgggccttcatgctgctcttcctgaagcagctgatcctgaaggacagaggagtgaaggaggatgagctgcagagcatcctgaactacctgctgaccatgcatgaagatgagaacatccatgatgtgctgcagctgctggtggccctgatgtctgagcacccagcctccatgatcccagcctttgaccagagaaatggcatccgggtcatctacaagctgctggccagcaagtctgagagcatctgggtgcaggccctgaaggtgctgggctacttcctgaagcacctgggccacaagaggaaggtggagatcatgcacacccacagcctcttcaccctgctgggggagcggctgatgctgcacaccaacacagtgacagtgaccacctacaacaccctgtatgagatcctgacagagcaggtgtgcacccaggtggtgcacaagccccaccctgagccagacagcacagtgaagatccagaaccccatgatcctgaaggtggtggccaccctgctgaagaacagcacccccagcgctgagctgatggaggtgagaagactcttcctgagtgacatgatcaagctgttcagcaacagcagagaaaatcgccgctgcctgctgcagtgcagcgtgtggcaggactggatgttcagcctgggctacatcaaccccaagaacagcgaggagcagaagatcacagagatggtgtacaacatcttccgcatcctgctgtaccacgccatcaagtatgagtggggcggctggagggtgtgggtggacaccctgagcatcgcccacagcaaggtgacctatgaggcccacaaggagtacctggccaagatgtatgaggagtaccagaggcaggaggaggagaacatcaagaagggcaagaagggaaatgtgtccaccatcagcggcctgagcagccagaccaccggggccaagggcggcatggagatccgggagattgaggacctgagccagagccagagccctgagagcgagacagactaccctgtgtccacagacacccgggacctgctgatgagcaccaaggtgtctgatgacatcctgggcaacagcgaccggcccggcagcggcgtgcacgtggaggtgcatgacctgctggtggacatcaaggccgagaaggtggaggccacagaggtgaagctggatgacatggacctgagccctgagaccctggtgggcggagaaaatggagccctggtggaggtggagagcctgctggacaacgtgtacagcgctgctgtggagaagctgcagaacaacgtgcacggctctgtgggcatcatcaagaagaatgaggagaaggacaatggccccctcatcaccctggctgatgagaaggaggacctgcccaacagcagcaccagcttcctgtttgacaagatccccaagcaggaggagaagctgctgcctgagctgagcagcaaccacatcatccccaacatccaggacacccaggtgcacctgggcgtgtctgatgacctgggcctgctggcccacatgactggatctgtggacctgacctgcaccagcagcatcatcgaggagaaggagttcaagatccacaccaccagtgatggcatgagcagcatcagcgagcgggacctggccagcagcaccaagggcctggagtatgcagagatgacagccaccaccctggagacagagagcagcagcagcaagatcgtgcccaacattgatgctggcagcatcatcagtgacacagagaggagtgatgatggcaaggagagcggcaaggagatcaggaagatccagaccaccaccaccacccaggccgtgcagggccgcagcatcacccagcaggaccgggacctgcgggtggacctgggcttccggggcatgcccatgacagaggagcagaggcggcagttcagccctggccccaggaccaccatgttccgcatccctgagttcaagtggagccccatgcaccagaggctgctgacagacctgctgtttgccctggagacagatgtgcacgtgtggaggagccacagcaccaagtctgtgatggactttgtgaacagcaatgaaaacatcatctttgtgcacaacaccatccacctgatcagccagatggtggacaacatcatcatcgcctgtggcggcatcctgcccctgctgtctgctgccaccagccccaccgtgtccaagacagagctggagaacatcgaggtgacccagggcatgtctgctgagacagctgtgaccttcctgagccggctgatggccatggtggatgtgctggtgtttgccagcagcctgaacttcagcgagattgaggccgagaagaacatgagcagcggcggcctgatgaggcagtgcctgcggctggtgtgctgcgtggccgtgaggaactgcctggagtgccggcagaggcagagggaccggggcaacaagagcagccacggcagcagcaagccccaggaggtgccccagagcgtgacagccacagctgccagcaagacccccctggagaatgtgcccggcaacctgagccccatcaaggaccctgaccggctgctgcaggatgtggacatcaaccggctgcgggctgtggtgttcagagatgtggatgacagcaagcaggcccagttcctggccctggccgtggtgtacttcatctctgtgctgatggtgtccaagtacagagacatcctggagccccagcgggagaccaccaggacaggcagccagcccggcaggaacatccggcaggagatcaacagccccaccagcacagtggtggtgatccccagcatcccccaccccagcctgaaccacggcttcctggccaagctgatccctgagcagagctttggccacagcttctacaaggagaccccagctgccttcccagacaccatcaaggagaaggagacccccaccccaggagaggacatccaggtggagagcagcatcccccacacagattctggaattggagaggagcaggtggccagcatcctgaatggagctgagctggagaccagcactggaccagatgccatgtctgagctgctgagcaccctgagcagcgaggtgaagaagagccaggagagcctgacagagaaccccagcgagaccctgaagccagccaccagcatcagcagcatcagccagaccaagggcatcaacgtgaaggagatcctgaagagcctggtggccgcccctgtggagattgctgaatgtggccctgagcccatcccctacccagaccctgccctgaagcgggagacccaggccatcctgcccatgcagttccacagctttgacagatctgtggtggtgcctgtgaagaagcccccacctggcagcctggccgtgaccaccgtgggcgccaccacagctggcagcggcctgcccaccggcagcaccagcaacatctttgctgccactggagccacccccaagtccatgatcaacaccaccggggctgtggacagcggcagcagcagcagcagcagcagcagcagctttgtgaatggagccaccagcaagaacctgcctgctgtgcagacagtggcccccatgcctgaggacagcgctgagaacatgagcatcacagccaagctggagcgggccctggagaaggtggcccccctgctgcgggagatctttgtggactttgcccccttcctgagcaggaccctgctgggcagccacggccaggagctgctgattgagggcctggtgtgcatgaagagcagcacctctgtggtggagctggtgatgctgctgtgcagccaggagtggcagaacagcatccagaagaatgccggcctggccttcatcgagctgatcaatgaaggccgcctgctgtgccacgccatgaaggaccacatcgtgcgggtggccaatgaagctgagttcatcctgaaccggcagagagcagaagatgtgcacaagcatgctgagtttgagagccagtgtgcccagtatgctgctgaccggcgggaggaggagaagatgtgtgaccacctgatctctgctgccaagcaccgggaccacgtgacagccaaccagctgaagcagaagatcctgaacatcctgaccaacaagcatggagcctggggcgctgtgagccacagccagctgcatgacttctggaggctggactactgggaggatgacctgcggaggagaagaagatttgtgagaaatgccttcggcagcacccatgctgaggccctgctgaaggccgccattgaatatggaacagaagaagatgtggtgaagagcaagaagaccttccgcagccaggccatcgtgaaccagaatgctgagacagagctgatgctggagggagatgatgatgctgtgtccctgctgcaggagaaggagattgacaacctggccggccctgtggtgctgagcaccccagcccagctgattgcccctgtggtggtggccaagggcaccctgagcatcaccaccacagagatctactttgaggtggatgaagatgattctgccttcaagaagattgacaccaaggtgctggcctacacagagggcctgcacggcaagtggatgttcagcgagatccgggctgtgttcagccgccgctacctgctgcagaacacagccctggaggtgttcatggccaacagaacatctgtgatgttcaacttcccagaccaggccaccgtgaagaaggtggtgtacagcctgccccgggtgggcgtgggcaccagctatggcctgccccaggcccggcgcatcagcctggccaccccccggcagctgtacaagagcagcaacatgacccagcgctggcagaggcgggagatcagcaactttgagtacctgatgttcctgaacaccatcgccggccgcacctacaatgacctgaaccagtaccctgtgttcccctgggtgctgaccaactatgaaagtgaggagctggacctgaccctgcccggcaacttccgggacctgagcaagcccatcggggccctgaaccccaagagagctgtgttctatgcagagagatatgagacctgggaggatgaccagagccccccctaccactacaacacccactacagcacagccaccagcaccctgtcctggctggtgcgcatcgagcccttcaccaccttcttcctgaatgccaatgatggcaagtttgaccacccagacaggaccttcagctctgtggcccgctcctggaggaccagccagagggacaccagtgatgtgaaggagctgatccctgagttctactacctgcctgagatgtttgtgaacagcaatggctacaacctgggcgtgagagaagatgaggtggtggtgaatgatgtggacctgcccccctgggccaagaagccagaagattttgtgcgcatcaacaggatggccctggagagcgagtttgtgtcctgccagctgcaccagtggattgacctgatcttcggctacaagcagaggggccctgaggccgtgcgggccctgaatgtgttccactacctgacctatgagggctctgtgaacctggacagcatcacagatcctgtgctgcgggaggccatggaggcccagatccagaactttggccagacccccagccagctgctgattgagccccaccccccaagaagcagcgccatgcacctgtgcttcctgccccagagccccctgatgttcaaggaccagatgcagcaggacgtcatcatggtgctgaagttccccagcaacagccctgtgacccacgtggccgccaacaccctgccccacctgaccatcccagctgtggtgacagtgacctgcagccggctgtttgctgtgaaccgctggcacaacacagtgggcctgcggggggcccctggctacagcctggaccaggcccaccacctgcccatcgagatggaccccctgattgccaacaacagcggcgtgaacaagaggcagatcacagacctggtggaccagagcatccagatcaatgcccactgctttgtggtgacagctgacaaccgctacatcctgatctgtggcttctgggacaagagcttccgggtgtacagcacagaaacaggcaagctgacccagatcgtgtttggccactgggatgtggtgacctgcctggcccggtctgagagctacatcggcggggactgctacatcgtgtctggcagcagagatgccaccctgctgctgtggtactggagcggccgccaccacatcatcggggacaaccccaacagcagtgactacccagcccccagggctgtgctgactggacatgaccacgaggtggtgtgtgtgtctgtgtgtgccgagctgggcctggtgatcagcggggccaaggagggcccctgcctggtgcacaccatcaccggggacctgctgcgggccctggagggccctgagaactgcctcttccccaggctcatctctgtgtcctctgagggccactgcatcatctactatgagcggggccgcttcagcaacttcagcatcaacgggaagctgctggcccagatggagatcaatgacagcacccgggccatcctgctgagcagtgatggccagaacctggtgactggaggagacaatggagtggtggaggtgtggcaggcctgtgacttcaagcagctgtacatctacccaggctgtgatgctggcatccgggccatggacctgagccatgaccagaggaccctcatcaccggcatggccagcggcagcatcgtggccttcaacatcgacttcaaccgctggcactatgagcaccagaaccgctactag

SEQ ID NO: 187762 - DNA, 8841 bp, Artificial Sequence
  derived and/or modified sequence
atggccagcgagaagccaggccctggccctggcctggagccccagcctgtgggcctgattgctgtgggcgctgctgggggcggcggcggcggcagcggcggcggcggcactggaggcagcggcatgggagagctgcggggggccagcggcagcggctctgtgatgctgcctgctggcatgatcaaccccagcgtgcccatccggaacatccgcatgaagtttgctgtgctgattggcctcatccaggtgggggaggtgagcaacagagacatcgtggagaccgtgctgaacctgctggtgggcggggagtttgacctggagatgaacttcatcatccaggatgctgagagcatcacctgcatgacagagctgctggagcactgtgatgtgacctgccaggccgagatctggagcatgttcaccgccatcctgaggaagtctgtgaggaacctgcagaccagcacagaggtgggcctcatcgagcaggtgctgctgaagatgtctgctgtggatgacatgattgctgacctgctggtggacatgctgggcgtgctggccagctacagcatcaccgtgaaggagctgaagctgctcttctccatgctgcggggggagagcggcatctggcccaggcatgctgtgaagctgctgtctgtgctgaaccagatgccccagagacatggccctgacaccttcttcaacttccctggctgcagcgctgctgccatcgccctgccccccatcgccaagtggccctaccagaatggcttcaccctgaacacctggttcaggatggaccccctgaacaacatcaacgtggacaaggacaagccctacctgtactgcttccgcaccagcaaaggagtgggctacagcgcccactttgtgggcaactgcctgattgtgaccagcctgaagagcaagggcaagggcttccagcactgtgtgaagtatgacttccagcccaggaagtggtacatgatcagcatcgtgcacatctacaaccgctggaggaacagcgagatccgctgctacgtgaatggccagctggtgtcctatggagacatggcctggcacgtgaacaccaatgacagctatgacaagtgcttcctgggcagcagcgagacagcagatgccaacagagtcttctgtggccagctgggcgctgtgtatgtgttcagcgaggccctgaacccagcccagatctttgccatccaccagctgggccctggctacaagagcaccttcaagttcaagtctgagagtgacatccacctggccgagcaccacaagcaggtgctgtatgatggcaagctggccagcagcatcgccttcacctacaatgccaaggccacagatgcccagctgtgcctggagagcagccccaaggaaaatgccagcatctttgtgcacagcccccacgccctgatgctgcaggatgtgaaggccatcgtgacccacagcatccacagcgccatccacagcatcggcggcatccaggtgctcttccccctgtttgcccagctggacaaccggcagctgaatgacagccaggtggagaccaccgtgtgtgccaccctgctggccttcctggtggagctgctgaagagctctgtggccatgcaggagcagatgctgggcggcaagggcttcctggtgattggctacctgctggagaagagcagccgggtgcacatcaccagggctgtgctggagcagttcctgagctttgccaagtacctggatggcctgagccacggggcccccctgctgaagcagctgtgtgaccacatcctcttcaacccagccatctggatccacaccccagccaaggtgcagctgagcctgtacacctacctgtctgctgagttcatcggcacagccaccatctacaccaccatcagaagagtgggcaccgtgctgcagctgatgcacaccctgaagtactactactgggtgatcaacccagctgacagcagcggcatcacccccaagggcctggatggcccccggcccagccagaaggagatcatcagcctgcgggccttcatgctgctcttcctgaagcagctgatcctgaaggacagaggagtgaaggaggatgagctgcagagcatcctgaactacctgctgaccatgcatgaagatgagaacatccatgatgtgctgcagctgctggtggccctgatgtctgagcacccagcctccatgatcccagcctttgaccagagaaatggcatccgggtcatctacaagctgctggccagcaagtctgagagcatctgggtgcaggccctgaaggtgctgggctacttcctgaagcacctgggccacaagaggaaggtggagatcatgcacacccacagcctcttcaccctgctgggggagcggctgatgctgcacaccaacacagtgacagtgaccacctacaacaccctgtatgagatcctgacagagcaggtgtgcacccaggtggtgcacaagccccaccctgagccagacagcacagtgaagatccagaaccccatgatcctgaaggtggtggccaccctgctgaagaacagcacccccagcgctgagctgatggaggtgagaagactcttcctgagtgacatgatcaagctgttcagcaacagcagagaaaatcgccgctgcctgctgcagtgcagcgtgtggcaggactggatgttcagcctgggctacatcaaccccaagaacagcgaggagcagaagatcacagagatggtgtacaacatcttccgcatcctgctgtaccacgccatcaagtatgagtggggcggctggagggtgtgggtggacaccctgagcatcgcccacagcaaggtgacctatgaggcccacaaggagtacctggccaagatgtatgaggagtaccagaggcaggaggaggagaacatcaagaagggcaagaagggaaatgtgtccaccatcagcggcctgagcagccagaccaccggggccaagggcggcatggagatccgggagattgaggacctgagccagagccagagccctgagagcgagacagactaccctgtgtccacagacacccgggacctgctgatgagcaccaaggtgtctgatgacatcctgggcaacagcgaccggcccggcagcggcgtgcacgtggaggtgcatgacctgctggtggacatcaaggccgagaaggtggaggccacagaggtgaagctggatgacatggacctgagccctgagaccctggtgggcggagaaaatggagccctggtggaggtggagagcctgctggacaacgtgtacagcgctgctgtggagaagctgcagaacaacgtgcacggctctgtgggcatcatcaagaagaatgaggagaaggacaatggccccctcatcaccctggctgatgagaaggaggacctgcccaacagcagcaccagcttcctgtttgacaagatccccaagcaggaggagaagctgctgcctgagctgagcagcaaccacatcatccccaacatccaggacacccaggtgcacctgggcgtgtctgatgacctgggcctgctggcccacatgactggatctgtggacctgacctgcaccagcagcatcatcgaggagaaggagttcaagatccacaccaccagtgatggcatgagcagcatcagcgagcgggacctggccagcagcaccaagggcctggagtatgcagagatgacagccaccaccctggagacagagagcagcagcagcaagatcgtgcccaacattgatgctggcagcatcatcagtgacacagagaggagtgatgatggcaaggagagcggcaaggagatcaggaagatccagaccaccaccaccacccaggccgtgcagggccgcagcatcacccagcaggaccgggacctgcgggtggacctgggcttccggggcatgcccatgacagaggagcagaggcggcagttcagccctggccccaggaccaccatgttccgcatccctgagttcaagtggagccccatgcaccagaggctgctgacagacctgctgtttgccctggagacagatgtgcacgtgtggaggagccacagcaccaagtctgtgatggactttgtgaacagcaatgaaaacatcatctttgtgcacaacaccatccacctgatcagccagatggtggacaacatcatcatcgcctgtggcggcatcctgcccctgctgtctgctgccaccagccccaccggcagcaagacagagctggagaacatcgaggtgacccagggcatgtctgctgagacagctgtgaccttcctgagccggctgatggccatggtggatgtgctggtgtttgccagcagcctgaacttcagcgagattgaggccgagaagaacatgagcagcggcggcctgatgaggcagtgcctgcggctggtgtgctgcgtggccgtgaggaactgcctggagtgccggcagaggcagagggaccggggcaacaagagcagccacggcagcagcaagccccaggaggtgccccagagcgtgacagccacagctgccagcaagacccccctggagaatgtgcccggcaacctgagccccatcaaggaccctgaccggctgctgcaggatgtggacatcaaccggctgcgggctgtggtgttcagagatgtggatgacagcaagcaggcccagttcctggccctggccgtggtgtacttcatctctgtgctgatggtgtccaagtacagagacatcctggagccccagcgggagaccaccaggacaggcagccagcccggcaggaacatccggcaggagatcaacagccccaccagcacagtggtggtgatccccagcatcccccaccccagcctgaaccacggcttcctggccaagctgatccctgagcagagctttggccacagcttctacaaggagaccccagctgccttcccagacaccatcaaggagaaggagacccccaccccaggagaggacatccaggtggagagcagcatcccccacacagattctggaattggagaggagcaggtggccagcatcctgaatggagctgagctggagaccagcactggaccagatgccatgtctgagctgctgagcaccctgagcagcgaggtgaagaagagccaggagagcctgacagagaaccccagcgagaccctgaagccagccaccagcatcagcagcatcagccagaccaagggcatcaacgtgaaggagatcctgaagagcctggtggccgcccctgtggagattgctgaatgtggccctgagcccatcccctacccagaccctgccctgaagcgggagacccaggccatcctgcccatgcagttccacagctttgacagatctgtggtggtgcctgtgaagaagcccccacctggcagcctggccgtgaccaccgtgggcgccaccacagctggcagcggcctgcccaccggcagcaccagcaacatctttgctgccactggagccacccccaagtccatgatcaacaccaccggggctgtggacagcggcagcagcagcagcagcagcagcagcagctttgtgaatggagccaccagcaagaacctgcctgctgtgcagacagtggcccccatgcctgaggacagcgctgagaacatgagcatcacagccaagctggagcgggccctggagaaggtggcccccctgctgcgggagatctttgtggactttgcccccttcctgagcaggaccctgctgggcagccacggccaggagctgctgattgagggcctggtgtgcatgaagagcagcacctctgtggtggagctggtgatgctgctgtgcagccaggagtggcagaacagcatccagaagaatgccggcctggccttcatcgagctgatcaatgaaggccgcctgctgtgccacgccatgaaggaccacatcgtgcgggtggccaatgaagctgagttcatcctgaaccggcagagagcagaagatgtgcacaagcatgctgagtttgagagccagtgtgcccagtatgctgctgaccggcgggaggaggagaagatgtgtgaccacctgatctctgctgccaagcaccgggaccacgtgacagccaaccagctgaagcagaagatcctgaacatcctgaccaacaagcatggagcctggggcgctgtgagccacagccagctgcatgacttctggaggctggactactgggaggatgacctgcggaggagaagaagatttgtgagaaatgccttcggcagcacccatgctgaggccctgctgaaggccgccattgaatatggaacagaagaagatgtggtgaagagcaagaagaccttccgcagccaggccatcgtgaaccagaatgctgagacagagctgatgctggagggagatgatgatgctgtgtccctgctgcaggagaaggagattgacaacctggccggccctgtggtgctgagcaccccagcccagctgattgcccctgtggtggtggccaagggcaccctgagcatcaccaccacagagatctactttgaggtggatgaagatgattctgccttcaagaagattgacaccaaggtgctggcctacacagagggcctgcacggcaagtggatgttcagcgagatccgggctgtgttcagccgccgctacctgctgcagaacacagccctggaggtgttcatggccaacagaacatctgtgatgttcaacttcccagaccaggccaccgtgaagaaggtggtgtacagcctgccccgggtgggcgtgggcaccagctatggcctgccccaggcccggcgcatcagcctggccaccccccggcagctgtacaagagcagcaacatgacccagcgctggcagaggcgggagatcagcaactttgagtacctgatgttcctgaacaccatcgccggccgcacctacaatgacctgaaccagtaccctgtgttcccctgggtgctgaccaactatgaaagtgaggagctggacctgaccctgcccggcaacttccgggacctgagcaagcccatcggggccctgaaccccaagagagctgtgttctatgcagagagatatgagacctgggaggatgaccagagccccccctaccactacaacacccactacagcacagccaccagcaccctgtcctggctggtgcgcatcgagcccttcaccaccttcttcctgaatgccaatgatggcaagtttgaccacccagacaggaccttcagctctgtggcccgctcctggaggaccagccagagggacaccagtgatgtgaaggagctgatccctgagttctactacctgcctgagatgtttgtgaacagcaatggctacaacctgggcgtgagagaagatgaggtggtggtgaatgatgtggacctgcccccctgggccaagaagccagaagattttgtgcgcatcaacaggatggccctggagagcgagtttgtgtcctgccagctgcaccagtggattgacctgatcttcggctacaagcagaggggccctgaggccgtgcgggccctgaatgtgttccactacctgacctatgagggctctgtgaacctggacagcatcacagatcctgtgctgcgggaggccatggaggcccagatccagaactttggccagacccccagccagctgctgattgagccccaccccccaagaagcagcgccatgcacctgtgcttcctgccccagagccccctgatgttcaaggaccagatgcagcaggacgtcatcatggtgctgaagttccccagcaacagccctgtgacccacgtggccgccaacaccctgccccacctgaccatcccagctgtggtgacagtgacctgcagccggctgtttgctgtgaaccgctggcacaacacagtgggcctgcggggggcccctggctacagcctggaccaggcccaccacctgcccatcgagatggaccccctgattgccaacaacagcggcgtgaacaagaggcagatcacagacctggtggaccagagcatccagatcaatgcccactgctttgtggtgacagctgacaaccgctacatcctgatctgtggcttctgggacaagagcttccgggtgtacagcacagaaacaggcaagctgacccagatcgtgtttggccactgggatgtggtgacctgcctggcccggtctgagagctacatcggcggggactgctacatcgtgtctggcagcagagatgccaccctgctgctgtggtactggagcggccgccaccacatcatcggggacaaccccaacagcagtgactacccagcccccagggctgtgctgactggacatgaccacgaggtggtgtgtgtgtctgtgtgtgccgagctgggcctggtgatcagcggggccaaggagggcccctgcctggtgcacaccatcaccggggacctgctgcgggccctggagggccctgagaactgcctcttccccaggctcatctctgtgtcctctgagggccactgcatcatctactatgagcggggccgcttcagcaacttcagcatcaacgggaagctgctggcccagatggagatcaatgacagcacccgggccatcctgctgagcagtgatggccagaacctggtgactggaggagacaatggagtggtggaggtgtggcaggcctgtgacttcaagcagctgtacatctacccaggctgtgatgctggcatccgggccatggacctgagccatgaccagaggaccctcatcaccggcatggccagcggcagcatcgtggccttcaacatcgacttcaaccgctggcactatgagcaccagaaccgctactag

SEQ ID NO: 187763 - DNA, 8841 bp, Artificial Sequence
  derived and/or modified sequence
atggccagcgagaagcccggccccggccccggcctggagccccagcccgtaggcctaatcgcagtgggagcggccgggggcggaggggggggttccgggggcggcggcacaggaggctccggtatgggagagctccgcggggccagtggatctggatcagtgatgttgccagccgggatgattaacccctcggtgccaatacgtaatatccgaatgaaatttgccgttttaattgggcttattcaggttggggaggtgtcaaatcgggatatcgtggaaactgttttaaatttgctggtgggaggtgagtttgatctggagatgaacttcatcattcaggacgctgaaagcattacttgcatgaccgaactgttagaacactgcgacgtcacatgccaggcagagatctggtcaatgtttaccgccatcctccggaaaagcgtacgcaatctgcagactagcacagaggttgggttgatcgagcaggtcctgctgaagatgtctgcagtggacgatatgattgccgacctgctggttgatatgcttggagttcttgcatcctactccatcacagtgaaggagctcaagctcctattttccatgctgcgcggagaatcgggaatatggcctcgtcatgcagtcaagctgctatctgtcctcaaccagatgccccagagacacggcccagacactttcttcaactttcccggttgtagtgccgcggctattgccctccctcccattgctaaatggccctaccagaacggttttaccctgaatacatggtttcggatggacccgttaaacaacattaacgttgacaaggacaaaccctatctgtattgttttaggaccagtaaaggtgtggggtacagcgcccactttgtagggaactgtctgatcgttacctcacttaaatccaagggcaaaggctttcaacactgcgtgaagtacgattttcagcccagaaaatggtacatgatttccatcgtgcatatttataaccggtggcggaattcagagattaggtgctacgtcaacggtcagcttgtgagttatggtgatatggcctggcatgtgaacacaaatgatagttacgacaaatgttttctggggagcagtgagacggccgatgccaatcgagtgttttgcggtcagctgggcgcagtttacgttttttcggaggcgctgaatcccgctcagatttttgccatccatcagctggggcctggatataagtccacgttcaaattcaagtcagaatccgacattcatcttgcggagcaccataagcaggtgttatatgacggaaaattggcttcctctattgcattcacatacaacgccaaggctacggacgctcagctgtgtctggagagcagccctaaagaaaacgcctcaatctttgtgcactccccccatgccttgatgctgcaggacgttaaggccatcgtaacccattccatccacagtgctatccattccattggcgggatacaggtactttttcctctgttcgctcagctggacaatcgccaactgaatgacagccaagtagaaactaccgtctgtgccaccctactggcctttttagtcgagttgctgaaatcttccgtggctatgcaagaacagatgttaggcggcaaaggttttctggtgattgggtacctactagagaagtcctctagagtccacataacgagagctgtgttggagcaattcctttcattcgccaaatatctggacgggctgagccacggggcacccttactaaaacagctatgcgaccacatcttatttaatccagcaatctggattcacacacctgccaaggtgcaattatcgctatacacctacttgagcgcggaatttatcgggacggccactatctacaccactatacgtcgggtcggtaccgtactgcaactgatgcacactttgaaatattattactgggtaatcaacccagcggatagcagtggcattactcctaaaggattggacggccctaggccatctcagaaggaaatcatctctctgcgcgcttttatgttgctgtttctcaaacagcttatactgaaggacaggggcgtgaaagaagacgaattgcagtccatcctgaactacctgttaacaatgcacgaagacgaaaacatacacgatgttctccagctcctggttgctttgatgtctgaacatcctgcatctatgattccggcattcgaccagcgaaacggcataagagttatctataaactgctcgcgagtaaatctgagtccatttgggtccaagcactgaaggtacttgggtactttttaaagcatttgggccataagcgcaaagtggaaattatgcatacacactcccttttcacactcttgggtgagcgcctgatgctgcatacaaacactgtgactgtgacaacctacaatactctctacgagatattaacagaacaggtatgcacccaggtggtgcacaaacctcatcccgaacccgacagcaccgtcaagattcaaaacccaatgatcctgaaagtggtcgccaccctgctaaaaaattcaacgcccagcgcggagctcatggaggtcagaagattattcttgtccgacatgatcaaattattcagcaactcacgcgaaaaccgaagatgcctgcttcagtgcagtgtgtggcaggactggatgttttcactggggtacattaaccctaagaactctgaagaacaaaaaatcacagaaatggtgtataatatctttcggattctcctctaccacgctatcaagtacgaatggggagggtggagagtttgggtcgacacattgtcaatcgcacactcaaaggtcacgtacgaggcgcataaagagtatctggccaagatgtatgaggagtaccagcggcaagaggaggagaacattaaaaagggcaagaaagggaacgtttccacaataagcggcctgtctagtcagacaactggagcgaaggggggaatggagataagggaaatagaagatctcagtcagtcacagtctcccgagtctgagacagattatcccgtgtccacagataccagggacttactgatgtctaccaaggttagcgacgatattctgggcaatagtgacaggccaggaagcggcgtccatgtagaagtgcacgaccttctggttgacatcaaagcagagaaggtagaagcaacagaggtgaagctcgacgacatggacctgtctcctgagacactagttggcggtgagaatggcgcactcgtcgaggtggagagcttgctggataacgtctatagcgccgccgttgaaaagctccagaacaatgtacacggctccgttgggatcattaaaaagaacgaagagaaggacaacgggcccctcatcactctggcagatgaaaaggaagatttacccaattcgtccaccagctttctgttcgataaaattcccaaacaggaggagaagctcctccctgagctaagctccaatcacatcattcccaatatccaagatacccaggttcatctgggcgtgtccgatgatctgggactgctggcccatatgactggctcggttgacctgacctgcacctcaagcattatcgaagaaaaggaattcaaaattcacaccacgagtgacggaatgagcagcatctcagagagagacctggcatcctccacgaagggactagaatacgcagagatgaccgccacaaccctagagaccgaatcctcaagctccaagattgtcccaaacatcgatgctgggagcatcatttcggacactgaacgctccgacgacggtaaggagtccggaaaagaaatccgaaaaatccagaccaccacaactacgcaggcagtccaaggaaggtccattacccagcaggacagagacctccgggttgatcttggatttagagggatgccgatgaccgaagagcagcgacgacagttctcgcccggcccacggacgacgatgtttagaatccccgaattcaaatggtcccccatgcaccaacgtctgctcacggatctgcttttcgcactggagacagacgtgcacgtttggcgtagtcacagcaccaagtccgtgatggatttcgttaactctaacgagaacatcatattcgtgcataacactatccacctcatctcccagatggttgacaatataatcatcgcctgcggcggcatcctcccccttctttcagctgcaaccagtcctaccgtctcgaagaccgagttggaaaacattgaggtgacccagggtatgtctgctgagaccgccgttacctttctgtcccgactcatggccatggtggatgtgctggtgtttgctagttcgttgaatttctcggagatcgaggccgagaaaaacatgtcttccggtggcttaatgcggcaatgtctgcgacttgtgtgctgtgtggctgtaaggaattgtctggagtgccggcagaggcaacgcgaccgaggcaataaaagctcacacggcagcagcaaaccacaggaagtgcctcagtccgtgaccgcaaccgctgccagcaaaacaccactggagaatgtgcccggaaatctgagtccaattaaggaccctgaccggctacttcaggacgtagatattaaccgtctgagggcggtggtgttccgagatgtcgacgactcgaaacaggcccagtttctggcccttgcagtggtctattttatcagtgttctgatggtatccaagtaccgggatattttagaaccgcaaagggagaccactaggactggttctcagcctgggaggaacatcaggcaggaaattaatagccccacgagtactgttgtggtcattccctctattcctcatccgtcgcttaaccatgggtttctggcaaagctaattccagagcagagcttcgggcactctttctacaaagagacaccagctgctttccctgatactattaaagagaaggagactccgacgccgggagaagatatccaggtggaatccagtatcccacacacagactcaggaattggtgaagaacaagtagcctctatcctgaacggtgcagaattggagacaagcaccgggcctgatgccatgagcgaactactgtctactctgagcagtgaggtgaagaaaagccaggaaagtctgacggagaatccttcagagacgcttaaacctgctaccagcatcagttccatcagccagaccaaaggcatcaacgttaaggagatcttaaaatcgcttgtagctgcgcccgtagagatcgctgaatgtgggccggagccaataccctatccagaccccgccctgaagcgtgaaacacaagccatcctccccatgcagttccattcttttgatcggtctgttgtggtccctgtgaaaaagccccctccgggctccctggcagtgacaactgtgggggcgaccactgcaggatcaggattgcccaccggtagcacatctaacatcttcgcagctacgggggccaccccgaagtccatgattaacaccacaggagccgtggatagtggatcctcctcttcctcctcctccagtagctttgtcaatggagctacatcaaagaatttaccagcggtgcagacggtcgcgcccatgccagaggactctgctgaaaacatgtccattacagctaaactggagcgagctctcgaaaaggttgcacctttgttaagagagattttcgtcgatttcgcccctttcttgtcccggacactgctgggctctcacggccaagagctcctgatcgaaggcctcgtttgcatgaaaagttccaccagcgttgtggagttagtaatgttactgtgcagtcaagagtggcaaaactcaattcagaagaatgcggggctggcgtttatcgagttgataaatgaaggacggctcctctgtcacgccatgaaggaccatatcgttcgggtcgcgaatgaggccgaattcatcctaaatcggcagcgggccgaggacgtgcataagcatgccgaattcgaatctcagtgtgcgcagtatgccgccgataggagggaagaagagaagatgtgcgatcatctgatttcagcggctaaacaccgcgaccatgtcacagcgaatcaattaaaacaaaaaatcctcaatattctcacaaacaaacacggagcatggggcgctgtcagtcacagccagctccacgatttctggcgtttggattattgggaggacgatctcagaaggcgacggaggtttgtgcggaatgcatttggaagtacacatgcagaagccctgttgaaagctgctattgagtatggtaccgaggaagacgttgtcaaatctaaaaaaacgttccggtcacaggccattgtgaaccagaatgccgagacagaattaatgctagagggcgatgatgacgcagtgagtctgctacaggagaaggaaatcgataacctggccggaccagtcgtgctgtccactccggcacagctcatagctcccgtggtagtcgccaaaggaacactgagcattaccacaaccgagatttatttcgaggtggacgaggacgacagcgccttcaagaaaattgataccaaagtgttagcctataccgaaggactacacggaaaatggatgttcagtgagattcgagccgtttttagccggcgctatctgcttcagaatacggcactcgaggtctttatggctaaccgcacatctgtgatgttcaattttcctgatcaggccaccgtgaaaaaagtcgtttattcgttgcctcgcgtgggggtgggcactagctacgggttaccccaggccagacggatctctctagccacacctaggcaactttataagtcctctaacatgacacagcggtggcaaagacgggagatctcaaacttcgaatacctgatgtttctgaatactatcgctggccggacctacaatgacctgaaccaataccctgtgttcccatgggtgctgaccaattacgaatcagaggagctggatcttactctgccagggaacttccgcgacctctctaagcctatcggtgcactaaatccaaagagggccgtcttctacgctgaacgatacgaaacctgggaagatgatcagtcccccccatatcactacaacacccattacagtactgctacttcaaccctttcctggttagttcgcatcgagcctttcactacattttttttgaacgcaaatgacggaaaatttgaccatccagataggacattctctagtgtggccagatcttggcgcacatcccagcgggacacgagcgatgtaaaggaattgattccggaattttattatcttcccgaaatgttcgtcaactcaaatggctacaatttgggcgtgcgggaggacgaggtcgtggttaatgacgtggacctgcccccatgggcaaagaagccagaggattttgttagaatcaataggatggccctggaatctgagtttgtgtcctgtcagttgcatcaatggattgacctcatcttcgggtacaagcagagaggccccgaagctgtgcgagcgctgaatgtcttccactatctgacctatgagggcagcgttaacctggattctatcaccgatcccgtgctgcgagaggccatggaggctcagatccaaaattttgggcaaacgcccagtcagcttttgatcgaaccgcacccacctagatcctcggcaatgcacctgtgctttcttcctcagtctcccctcatgttcaaggaccagatgcagcaggatgttattatggttcttaagttcccctccaactctcccgtaacacacgtggcagccaatacgttaccacatctcacaattccagctgtagtgactgtgacttgttctagactgtttgcagtgaataggtggcacaacacggtggggctcagaggagctcctggttacagtctcgatcaggcccaccatttgccgatagaaatggaccccttaatcgccaacaatagcggtgtgaacaagcggcagattaccgaccttgtcgaccaaagtatccaaatcaatgcccactgcttcgtggtgacagccgacaatcgatatatcttgatctgcggtttttgggataaatccttccgggtgtacagtacagagaccggtaaactaacccagattgtgttcggccattgggacgtggtaacctgcctcgctcgatccgaatcgtacattggcggagactgttacatcgtgtctggcagccgggatgccactctccttctgtggtattggagcgggaggcaccacatcattggagataatcctaatagttccgactacccagcgccaagggccgttcttacgggacatgaccatgaggtagtgtgtgtgtctgtatgtgctgagctgggcctcgtgatttccggggccaaagagggaccgtgtttggtgcatacgattaccggagatctgctgagggccctcgaggggcctgagaattgtcttttcccccgtctcatttcagtgtcttcggaggggcactgtattatctattacgagagggggcggttctcaaatttttcgattaacggcaagctgctggcacagatggagatcaacgatagcacccgcgcaattctgcttagctccgacggacagaaccttgtgactgggggggataacggagttgtcgaggtgtggcaagcgtgcgattttaaacagctttacatctaccctggatgcgacgccggtattagagcgatggacctcagccacgatcaaagaactttgattaccggaatggcttccggctcaattgtggctttcaacatagacttcaaccggtggcactacgaacaccaaaaccgctattag

SEQ ID NO: 187764 - DNA, 8841 bp, Artificial Sequence
  derived and/or modified sequence
atggccagcgagaagcccggccccggccccggcctggagccccagccggtgggccttatcgctgtaggggcggcaggaggtggcggaggggggagcggaggtggtgggaccggggggagtggcatgggcgagctgagaggagcgagcgggtcaggtagtgtgatgctccccgctggcatgatcaaccccagcgtccctatccgcaatattcgcatgaagttcgcagtgctcatcggtttaattcaagtcggagaggtgtcaaaccgcgacatcgtcgagactgtgctgaacctactggttggcggcgaatttgacctggaaatgaatttcattatccaagacgctgagtctatcacttgtatgacagaactgcttgagcactgtgacgtcacttgccaggcggagatttggagcatgttcacggccatcctgcgtaaatctgtccgcaacttgcagaccagcactgaggtggggttgatagaacaggtgctgcttaagatgtctgcagtggatgatatgatcgcagacttgctggtcgatatgctgggtgtgttggcctcctactcgatcacagttaaggagctgaagctactcttctctatgctgcggggcgagagtggaatttggcctcggcacgccgtgaagcttctgtcagttctcaaccagatgcctcagaggcacgggcccgatacctttttcaattttcctgggtgcagcgctgccgccatagctcttccacccattgctaagtggccataccaaaatggctttacactgaacacatggtttagaatggacccgctgaataatatcaatgtggacaaagataaaccctacctgtactgtttccggacatccaagggtgtgggctatagcgcccactttgtcggtaactgtctaatcgtcacaagtcttaagagcaaagggaagggttttcagcattgtgtgaaatacgattttcagccccgaaagtggtacatgatttccatcgtgcatatctataatcgatggcggaactcagagatccgttgctacgtcaacgggcagcttgtgtcttatggggatatggcctggcatgttaacaccaatgactcatatgataagtgtttcctgggatctagcgaaaccgccgatgccaaccgggtcttctgcggacagctgggtgctgtctacgtcttttccgaagctcttaatccagcccaaatttttgcaatccatcagctgggtccagggtacaaatcaaccttcaagttcaagagtgagagcgatatccaccttgcggagcaccataagcaggtgctttatgacggcaaactcgctagttctatcgccttcacatataatgccaaggctactgacgcacaattatgccttgagtccagccccaaagagaacgcctccatattcgtgcatagcccgcacgctctcatgctgcaggacgtcaaggcaatcgtcacacactccatacactctgccatccactcaattggagggattcaagtgcttttcccactattcgctcagctggacaaccgacagctcaacgacagtcaggttgagacaaccgtatgcgctacgcttctggcattcttggtcgagctcctaaagtcttctgtcgccatgcaagaacagatgttgggcggaaagggcttcctggtgatcggatatctactggaaaaaagctctagagtgcacatcaccagagctgtcttggagcagtttctttcttttgcgaaatacctggatggcctatcacatggggcaccactgctgaaacagttatgcgaccatattctgttcaacccggcaatttggatccacacacccgccaaagtccagctgtccctgtatacatacctttctgccgaattcatagggacggccacaatttacaccacaatcagaagagtgggcactgtgttacagcttatgcataccttaaagtactattactgggttattaaccccgccgattcttctgggatcacccctaagggactggacggacccagacctagccagaaagagatcattagtcttagagcattcatgctactgttcctgaagcagttaattctcaaggatcgtggggtgaaagaggacgagctgcagtccatcctaaactacctcctaactatgcatgaagacgagaacatccatgacgttctccagcttctagtggctctcatgtctgaacatcctgccagtatgatccctgcatttgaccagcgtaatggaattcgggtgatatacaagcttctcgcctcaaagtcagagagcatctgggtgcaggcactgaaggtgctgggctacttcttaaaacacctaggacataaacgcaaagtagaaattatgcatactcatagtctgttcactctgcttggcgaacgcctaatgttacacacaaatactgtaactgtgacaacatacaatacgctgtacgagattctcacagaacaggtctgtacccaggtagttcacaaacctcacccagagcccgactcaacagttaagattcagaacccaatgatacttaaagtggtggccactctgctcaagaattcaaccccctccgcggagttgatggaagtacgcaggttatttctgtccgacatgatcaagttgttttctaattccagagagaaccggcggtgtctacttcaatgctctgtgtggcaggattggatgtttagcctgggctatatcaaccctaaaaactccgaggaacagaagatcaccgagatggtttacaatatttttaggatcctgctataccatgcaatcaagtatgagtggggcggttggagagtgtgggtggacactttatctattgcccattcaaaggtcacgtatgaagctcataaggaatatctcgccaaaatgtacgaggaataccagcggcaggaagaggaaaatatcaagaaaggcaagaaaggcaatgtgtcgaccatcagcggtctgtcaagccagaccaccggagctaagggcggtatggagatccgtgagatcgaagatctaagccagtcacagagcccagaaagcgaaacagactacccagtctcaaccgatacacgcgaccttcttatgagcacgaaggtctccgacgacatcctggggaactcagacaggccaggcagtggggtgcacgtggaagtgcatgacctgttagtggatattaaggcagagaaggtggaggccactgaagtgaagctcgacgatatggacctgtcaccagagactctggtaggcggagagaacggggctcttgtggaagtcgaatctctcctagacaacgtttatagtgcagccgtcgagaagctgcagaataatgtccacggctctgttggcatcatcaagaagaatgaggagaaggacaacggtccacttattaccttggctgacgagaaagaggatctgcctaatagtagtacctcctttcttttcgataaaatccctaagcaggaggagaagcttctccccgagctgtccagtaaccacatcattcccaacatccaggacacacaggtgcacctgggcgtcagcgatgatcttggtctcctcgcacacatgacgggcagcgtggacctcacttgcacctccagcattatcgaagaaaaagaattcaaaatccataccacgagtgatggaatgagctccatcagcgaaagggatctcgcatccagcactaagggcctggaatatgccgagatgactgccaccacactcgagaccgagtcatcttcatctaaaattgtcccaaacatcgacgcaggctctataatttcggatacggaacggtcagacgatggaaaggaaagtggaaaggagatacggaaaatccagactacgacaacgactcaagcagttcagggaaggtcaatcactcagcaggatagagacttgcgtgtggatctcggctttcggggcatgcccatgactgaggaacagcgcaggcagttctcccctggtccacggaccactatgttcagaatacccgaattcaagtggtcaccaatgcaccagagactgctgaccgatttactgttcgcattggaaaccgacgtccatgtctggcggagtcactcaaccaaaagcgtcatggatttcgtgaatagcaacgaaaacattatattcgtacacaacactatacacttaatctcacagatggttgacaacattattatagcgtgcggcgggattctgcccttgttatctgccgcaacgagccccactggatctaagaccgagctagagaatattgaggtgacccaaggcatgtccgccgaaaccgctgttaccttcctttctaggctgatggccatggtggacgtcctcgtctttgcatcctctctcaactttagcgagattgaagctgaaaaaaacatgagctcggggggcctgatgaggcagtgtcttcgactcgtgtgctgcgtagctgtgcgcaattgcttggagtgccgacagagacagcgcgatcgcggcaacaaatccagtcacggctcgtccaaacctcaggaggtcccccagagtgtaaccgccaccgccgcctccaaaacacctctcgaaaacgttccaggcaatctgagcccaatcaaggatccagatcgtctgttgcaggacgtagatatcaataggcttcgtgctgtcgtcttcagagatgtcgacgactccaagcaggcccagttccttgcattggccgtagtgtattttatctccgtcttaatggtatcgaagtatcgcgacatccttgaaccacagagagagaccactcgcacgggttcccagccgggaaggaacattcggcaagagatcaattctcctaccagtaccgttgtggtgatacccagtattccccatcccagcctcaaccatggctttttggccaagctcatccctgagcagtctttcggacacagtttctacaaagagaccccagccgcgttcccagacactattaaggagaaggaaacaccaaccccaggggaagacatccaggtcgagagttcaattcctcataccgactctggcataggagaagaacaagtcgcctcaattttaaatggggccgaattggagacctccaccggtccagatgctatgtccgaactgctttctacgcttagtagtgaagtgaagaagtctcaggaatcactgactgagaacccttccgaaacactcaagcccgccacttccatttcctccatatctcagaccaagggaatcaacgtcaaggaaatactgaagtcactcgtggcggccccagtggagatcgctgagtgtggcccagagcccataccttatccagatcccgcgctgaaaagggaaactcaagccattctgccgatgcaatttcattcctttgatcggtctgttgtcgtgccggtgaagaagcccccccccggttcgttagccgttaccactgtaggtgccacgaccgcggggtctggcctgcctaccggatccacttctaatattttcgcagccaccggtgccacacctaagtctatgattaacaccactggcgccgtcgacagtggctcatcatctagcagcagttcttcgtcctttgtaaacggggccactagcaagaatcttcccgccgtccagactgtggccccaatgccagaggattctgccgaaaacatgtcaattacagccaagctcgagcgggcattagaaaaagtagcgcctttactgagagaaatctttgtggactttgccccattcctctcacgaaccctgctcggctctcacggccaggagttactcatcgaaggcctggtctgcatgaaaagcagcactagcgtcgttgagcttgtcatgctgttgtgcagccaggagtggcaaaattcaatccagaagaacgctggtcttgctttcattgagctcattaatgagggacgactgctgtgccacgctatgaaggatcacatagtgcgtgttgctaatgaagctgagttcattctaaatcgccagagagcagaggacgtgcacaaacatgctgaattcgagagtcagtgtgctcagtatgccgcggacagaagagaagaggagaagatgtgcgaccacctaatcagtgcggcgaaacaccgagatcacgtaactgccaatcagcttaagcagaaaatactgaacattttaacgaataaacatggcgcgtggggcgccgtttcacattctcaactgcatgatttttggcggctggactattgggaggatgatctcaggaggagaaggcggttcgttcgtaatgcctttgggagcacacatgctgaggcactgctcaaggctgctattgagtatggaacggaggaagacgtcgtcaaaagtaagaaaacgtttagatctcaagcgattgtaaatcaaaatgctgagaccgaacttatgctggaaggtgatgatgatgcggtgagcttactacaggagaaggagattgacaatcttgcgggacccgttgtgctgagcacacccgctcagctaattgcccccgtcgttgtggcgaaagggactctaagcatcacaaccacagaaatttactttgaggtcgatgaagacgacagcgcctttaagaagatagacacaaaagtgttggcctatacggagggtctgcatggtaagtggatgttctccgaaatccgcgccgtgttcagtcgtagatatctcctacagaacacggcgcttgaggtattcatggccaaccgcacatccgtcatgtttaatttccctgaccaggctactgttaaaaaggtcgtatattctctgccacgggtgggcgtgggcacctcctatggactgcctcaagccaggcggatctccttggcgactccacgacaattgtacaaatcatccaatatgacccaacggtggcagcgccgcgaaatctcaaactttgaatacctgatgttcctgaacactattgccgggcgcacatataacgacctcaaccagtatccagtgttcccttgggttctcactaactatgagtcagaagagttggaccttacgctgccagggaacttcagagatctaagcaagccaattggcgcactgaatcccaagcgcgctgtgttttatgctgaaagatacgagacatgggaggacgaccagtcccctccatatcattacaacacccattatagcacagccacgtcgaccctgagctggctcgtcaggatcgagccatttactacattctttctgaacgccaacgatgggaaatttgatcaccccgataggacgtttagctccgtggcccggtcctggcgtacctctcagagggatacttctgatgtaaaggaactgattcctgaattctactatcttccggagatgttcgttaattctaacggctataatttgggggtgcgggaagacgaggtggttgtcaacgatgtggatcttccgccctgggctaaaaagcccgaggacttcgtgagaataaataggatggccctcgaatctgaatttgtgtcatgtcagttacatcaatggattgatctgatcttcggatataagcagagaggaccggaagccgttcgggctctcaatgtttttcattatctgacatatgagggcagtgtgaatctcgattccatcacagacccagtcctccgtgaggctatggaggctcagatccagaactttggacaaaccccctctcagttattaatagagcctcatccccctaggtcttccgcaatgcatctctgctttctgccacagagccccttaatgttcaaggatcagatgcaacaagacgtgatcatggttttgaagttcccatccaacagtcctgtgacccacgtggccgcgaataccctgcctcacctgacgattccagccgttgtcaccgtgacatgttcccgactgttcgcggtgaataggtggcacaacaccgtggggttaagaggagcaccgggctacagcttggatcaggcccaccacctccccatcgagatggaccccttaatcgcgaacaattcaggcgtgaacaagaggcaaatcacagatcttgttgatcagagtatccagatcaatgcccactgctttgtggttacagccgacaacagatacatcctgatctgcggattttgggacaagtcgttccgagtttacagtactgaaaccgggaaactaactcagatcgtatttggtcactgggatgtcgtgacctgcttagcccggtctgaatcctacataggcggcgattgctacattgtttccgggagcagagatgcaacccttcttttgtggtactggtctggccggcaccacatcatcggtgacaatccaaactccagcgactatccagcaccgcgcgctgtgctcacggggcatgaccatgaggtggtatgtgtatctgtgtgtgctgaactcggactggttatctccggtgctaaagaggggccatgcctagtgcacaccatcacgggagacttgctacgcgctctagaaggtccagagaattgtctgttcccaaggctgataagtgtgtcatccgagggacattgtataatatattatgaaagaggccgcttcagtaacttcagcattaatggtaagctcttagctcagatggaaatcaacgacagtacccgtgccatcctcctgagttcagatggtcagaacctcgtcacaggcggcgataatggagtggttgaggtgtggcaagcatgtgactttaagcagctttatatctatccaggctgtgacgcaggcatcagggccatggatctttctcacgatcagcgcaccctgatcactggtatggcaagtggctcaatagtggcttttaatatcgacttcaatcggtggcactacgaacatcagaaccgctactag

SEQ ID NO: 187765 - DNA, 8841 bp, Artificial Sequence
  derived and/or modified sequence
atggccagcgagaagcccggccccggccccggcctggagccccagcccgtgggcctcattgccgtgggcgctgccggcggcggtggagggggttcaggaggagggggtacaggaggatcaggaatgggcgaactgcggggagcaagcgggagtggcagtgttatgcttcctgctggaatgatcaaccccagcgtgcccatccgcaatatcagaatgaagttcgctgttctcatcggcctcatccaggtgggagaggtgagtaacagagatattgtggagacagtgctgaatttgctcgtcggcggcgaattcgatcttgagatgaactttatcatccaggacgctgaatctatcacttgcatgaccgaactactggagcattgcgatgtgacctgccaggccgagatctggtccatgtttacagctattctcagaaagtccgtcaggaatctgcagacctccaccgaagttggcctgattgagcaagtcctgctgaagatgtccgccgtagacgatatgattgcggacctgctggtggatatgctgggggtccttgcctcctattctatcactgtcaaggaactaaaattgctgttctccatgctcagaggagaaagtggaatttggccacgccacgcagtgaagcttctgagcgtgctgaaccagatgccccagcggcatgggccggataccttctttaactttccaggatgttctgctgcggccatcgcgttgcctcctatagcaaaatggccgtatcagaacgggttcacactgaatacctggtttcggatggatccgctaaataacattaatgtggacaaggataaaccatacctgtactgctttcgaacgagtaagggcgttggatactccgctcactttgtcggtaactgtctgatcgtgacttctctaaaatctaaaggaaaaggctttcagcattgcgtcaaatatgactttcagcctcggaagtggtacatgatttctatcgtgcatatttacaacagatggaggaatagcgagataaggtgctatgtgaacgggcagctggtgtcctacggtgacatggcctggcacgtaaataccaatgactcttacgacaagtgtttcctgggtagcagtgaaacggctgacgccaatcgcgtgttttgcggacagttgggcgccgtatatgtgtttagcgaagctttaaatcctgctcaaattttcgcgatccatcagctgggccccggttacaagagcactttcaagtttaagagtgagagcgacatccacctcgcagaacaccacaagcaagttctgtatgacggtaagctagcttccagcattgcatttacgtacaatgccaaagccacagacgcacagctctgtctggaatcatctcccaaagagaacgcctccatctttgtgcacagcccacacgccttaatgttgcaggacgtcaaagctatcgttacacattctattcactctgctatccacagtatcggggggattcaggtgctgtttcccttattcgctcagctggataacagacagctcaacgacagtcaggtggaaactacagtttgcgccacactgcttgcctttctggtcgagctgctcaaaagctccgtggccatgcaagaacagatgctcggtgggaagggttttctagttatcggatacttactggagaagagctcacgggttcacattacaagagccgttctcgaacagtttctcagctttgccaagtacctagacggactcagccatggagctccgctgcttaaacagctgtgtgaccacatcctcttcaatcccgcaatttggatacatacaccagcaaaagtccagctaagcctgtacacctatctgtcagcggagttcatcggcaccgcgaccatctacacgactatcagaagggtaggaactgtgcttcagcttatgcacaccttgaaatattattattgggtgattaatcccgcagattcttcaggcatcaccccgaaggggctggacggaccacggccttctcagaaggagatcatttcactgcgtgcttttatgctgttatttctcaaacagctgatcctgaaagatagaggcgtgaaagaagacgagttgcagagcattctgaattacctcttaaccatgcacgaagatgaaaatatccacgacgttctccagctgttggtggccttgatgagcgagcacccagcgtcaatgattcccgctttcgaccagcgcaatggaattagagtaatttacaaattactggcttcaaagagcgagtccatttgggtgcaggccctcaaggtactcggttactttctcaaacaccttggacacaagcggaaggtcgagatcatgcatacccactctctattcactctgctgggtgagcgcctgatgctgcatacaaacactgtgactgtcactacttacaatactctgtacgagatactgactgaacaggtgtgtacgcaggtggttcacaagccccaccccgagccggactccacagtgaaaatccagaacccgatgatcctgaaagttgtggccaccttgctcaagaactccacaccgtccgccgagttaatggaggtgcgacggctgttcctaagtgacatgatcaaactcttctctaactcacgcgaaaaccggcggtgtcttctgcagtgctctgtgtggcaagactggatgttctccttaggatatattaacccgaagaacagtgaagagcagaaaattacagagatggtctacaatatctttagaattcttctttatcatgcaatcaagtatgagtggggaggctggcgggtctgggtcgataccctatctatcgcccactctaaagtcacctacgaagctcacaaggaatatctagcaaaaatgtacgaggagtatcagcggcaggaggaagaaaacattaaaaaggggaagaagggcaatgtttccaccatttctggactttcttctcagacgacaggggccaaaggcgggatggagattcgagagatagaggatctgtcccagagccagagtcccgagagtgaaaccgattatccggtgagcaccgacacaagggacctgctgatgagtaccaaagttagcgacgacatcctgggaaatagtgaccgcccgggaagcggagtgcatgtggaagtgcacgacttactagttgacatcaaagcagaaaaggtggaagcgacagaggtcaagctggatgacatggatctgagccctgagactcttgttggcggcgagaacggtgccctggtggaggtggagtcactgctggataatgtgtatagtgccgctgtggagaaactgcagaataatgtgcacgggtccgtcgggatcatcaagaagaacgaggagaaagacaatggaccactgatcaccttagcagatgagaaagaagatttacctaattcttctaccagtttcctcttcgataagattccaaagcaggaagaaaagctgcttcccgagcttagtagcaatcacataatccctaatattcaggacacgcaagtacacctgggagtaagcgacgacctcggcctgctcgctcacatgacagggagtgtggacctgacatgtacaagcagcattatcgaggagaaagaattcaagatacatacaacttcagacggcatgtcttcaatttccgaacgtgacttggccagctccacgaagggtttagagtacgccgaaatgacagcaaccacgctggagactgaatctagcagcagcaagatagtgcctaacattgacgccggaagtataatttcagatacagagaggagtgatgatgggaaggaaagtggaaaagaaatcagaaagattcagactaccactactacccaggcggtacaaggaaggtccataacccaacaagacagagatcttcgggtggatctgggatttaggggaatgccaatgaccgaggagcaaagaaggcagttttctccagggccacgcacaacaatgttcaggatccccgaattcaagtggagtcctatgcaccagcgacttttgactgatctgctgtttgccttagagacagatgtgcacgtgtggaggagccattctacgaaatctgttatggacttcgttaactccaacgagaatataatctttgtgcataatactatccacctgatctcccagatggtagacaatattatcatcgcctgtggggggattctccccttgttgtctgcagctaccagtcccaccgtcagcaagacggagctcgaaaatattgaagtgacacagggcatgagtgcagagacagctgtgacctttctgagcagactgatggcaatggtggacgttctggtgttcgcatcatcactcaattttagcgagatagaagccgagaaaaatatgagcagtggcggcctgatgcggcagtgtcttagactggtctgttgtgtggctgtaagaaactgcctggagtgtcgtcagcggcagcgggatcgaggaaataagtcctcacacggttcgagcaagccccaagaggtgccccagtctgtaacggcgacagcggccagtaaaacacccctggaaaacgtacctggaaacctctcacctattaaggatcccgacagactgttgcaggacgtggatatcaatcgtctgagggccgttgtattccgagatgtggacgactcaaagcaggcccagttcctggctctcgctgttgtatacttcatttccgtgttgatggtgagtaagtatcgcgatatcctggagccccagcgcgaaactacgagaacagggtcacagcccggaaggaatatccggcaggagattaatagccctacttccaccgtagtggtgatcccttcaattccacacccatccctcaaccacggcttcctggctaaactaattcctgagcaatctttcggacactcattttataaagaaacacccgccgccttcccggatacaattaaagagaaagagacaccaacgcctggtgaagacattcaagtggagtcatccattccacacaccgacagcgggatcggcgaggagcaggtcgcaagcatcctgaatggcgctgagcttgagactagcaccgggccagacgctatgtccgagctgctgtccacactgtcttctgaagtgaaaaaatctcaggagtcactcacggagaatccatcggaaactctgaagccggcaacctctatctccagcatctcacaaaccaaagggattaacgttaaggaaatcctgaagagcctcgtggctgccccagtggagattgcagagtgtggtccagagccgatcccttaccccgatcccgccttaaagcgggaaacgcaagcgattctacccatgcaatttcatagcttcgaccggtctgtagtagtccctgtgaagaaaccgccacctggtagtctagccgtcactacggtgggcgctaccacagctgggagcgggctgccaaccgggtcgaccagcaacattttcgctgcgactggggcaaccccaaagtccatgatcaacacaacgggggccgttgatagcggatcgagctcctccagttcaagctcctccttcgtgaacggcgccacctcaaagaatttgccagccgtgcagactgtcgcccctatgcccgaagactctgccgagaatatgagcatcacagcaaaactggagagagccctggaaaaggtggccccactgttgagagaaatattcgtggattttgcccctttcctctctaggactcttttaggaagccacggacaagagctcctgatcgaaggtttggtctgcatgaaatcttcaacctcagtcgttgaattagtcatgcttttgtgttcccaggagtggcagaattccatccagaaaaacgccgggcttgccttcatagaactgatcaacgagggacgcctgctgtgccacgcgatgaaagatcacatagttcgggtcgcaaatgaggccgagttcatacttaacaggcagagagctgaagacgtgcataagcatgcagaattcgagagccagtgtgcccagtatgctgcagaccgccgcgaggaggagaaaatgtgtgaccaccttattagcgcggcgaaacaccgggaccatgtaaccgcaaaccagttgaaacaaaaaatattaaatatccttaccaacaagcacggcgcatggggcgcagtgagccactcacagcttcacgacttctggaggctggattattgggaagatgacttacgacgccgccggcgattcgtacgcaatgccttcggatcaacacacgcagaagccctgcttaaagccgcaatcgagtacggaacagaagaggatgtcgtgaagagcaagaaaacattccggtctcaagcaatcgtaaatcagaacgctgagaccgaactcatgctcgagggggacgacgacgcggtgagtctgctgcaggagaaagaaattgataaccttgccggcccagtggttctgtccaccccagcgcagctaattgcgcctgtcgtggtcgccaaaggtaccctcagcattactactacagaaatctactttgaggtggacgaggacgacagcgctttcaagaagatagacactaaggtgctcgcatatactgagggccttcacggaaagtggatgttttccgaaattcgagccgtcttttctcgccggtatttactacagaacaccgcactagaagttttcatggccaaccggacttcagttatgttcaatttcccagaccaggctaccgttaagaaagtggtgtatagcttacctcgagtcggtgtggggaccagctatgggttgccacaagcaaggcggatttcactggctaccccacgtcagctgtataaatcttccaatatgacgcagcgctggcagcgaagggagatttcaaacttcgagtatttgatgtttctgaacaccattgcgggtagaacctataacgacctcaatcagtaccctgtattcccatgggtgctgacaaattacgagtccgaagagctggatctcaccttacccggaaacttcagagacctgtcaaaacccatcggcgcccttaacccaaagagggctgtcttttacgcagagcgatacgagacatgggaggatgatcagagtccaccataccactacaacacgcattattcgacagccacctcgaccctgagctggctagtaaggatcgagccatttacaacctttttcttgaatgccaacgatgggaagttcgaccaccccgatcgaacattttcctccgtggcgaggtcctggcgcacaagccaacgagatacctctgatgtgaaggaactcattccagagttttactatcttccggaaatgttcgtgaactcaaacgggtacaacctgggagtgcgggaagatgaagtggtcgtgaacgatgtagatctgcctccatgggctaaaaaacccgaagacttcgtccggattaataggatggcgttagaaagcgaattcgtgtcatgccaactacatcaatggatagatctgatttttggctataaacaacgtggcccggaagcagtacgcgctttgaacgtgttccactatctgacctacgaagggtcagtcaacttggactcaataactgaccccgtcctgagagaagctatggaagcacagatccaaaatttcggtcagactccatcacaactcctcattgaacctcacccaccacgtagttctgccatgcatttatgcttcttaccacagagtcccctcatgtttaaggaccagatgcaacaagacgttattatggtgcttaagtttccatccaattctccagtgacacacgtggcagcaaacaccctgccccatctgactatccccgctgtcgtcacagtcacatgcagccggttgttcgccgtgaataggtggcacaacacagtaggactccggggggcccctggttattcgctagatcaggctcatcaccttcccatcgagatggatcctcttattgccaacaatagtggagtgaataaaaggcagattactgacctggtggatcaaagcatccagattaatgcccattgctttgtcgtgaccgccgacaatcgctacattctaatctgcggattttgggacaagtcctttcgtgtgtatagtacagagacaggcaagctgacacagatcgtctttggacattgggacgttgtgacgtgcctggctcggagcgagagctacatcggcggggattgttacattgtgagcggcagccgcgatgcaacacttctgctgtggtactggagcgggagacatcacatcattggggacaatccgaattccagcgattacccggcaccccgtgctgttcttactggacacgaccatgaagtagtgtgcgtgagcgtttgcgctgaattgggactagtgatcagcggagccaaagagggtccttgtcttgtgcataccataacaggagacctgctgcgggccctggaggggcctgaaaattgcctctttcctcgcctcatttccgtgagctcagaaggacactgcatcatttattacgaaaggggtagattctccaacttttccatcaatgggaagttgttggctcagatggaaatcaatgactccacacgagctattctactgagctcagatggacagaatctcgtgacaggcggggataacggtgttgtagaggtgtggcaggcatgcgatttcaagcaactttatatctatcccggatgcgacgccggcattagagccatggacctaagccatgatcaaaggactctgatcacaggcatggcgagcggtagcatcgttgcatttaacatcgactttaatagatggcattacgagcatcaaaacaggtattag

SEQ ID NO: 187766 - DNA, 10791 bp, Artificial Sequence
  derived and/or modified sequence
gcggcgtcggggcttcacaacaacagtggtggccgtagcagcggccgggccgggctgaggcgcaggcggggagcgggcccggcgccgcggcgctggtggatgctggggctccgaggcgacggccggggggcgggggccgaggcaggtataacggtaccggcggcggcagcgccgctgctcttcccttctcctcaggaggggggccaatggctagcgagaagccgggcccgggcccggggctcgagcctcagcccgtggggctcattgccgtcggggccgctggcggaggcggcgggggcagcggtggtggcggcaccgggggcagcgggatgggggagctaaggggggcgtccggctccggctcggtgatgctccccgcggggatgattaacccttcggtgccgatccgcaacatccggatgaaattcgcagtgttgattggactcatacaggtcggagaggtcagcaacagggacatcgtggagacggtgctcaacctgctggttggtggagaatttgacttggagatgaactttattatccaggatgctgagagtataacatgtatgacagagcttttggagcactgtgatgtaacatgtcaagcagaaatatggagcatgtttacagccattctacgaaaaagtgttcggaatttacagactagcacagaagttgggctaattgaacaagtattgctgaaaatgagtgctgtagatgacatgatagcagatcttctagttgatatgttgggggttcttgccagctacagcatcactgtcaaggagttgaagcttttgttcagcatgcttcgaggagaaagtggaatctggccaagacatgcagtaaaattattatcagttcttaatcagatgccacagagacacggtcctgatacttttttcaatttccctggttgtagcgctgcggcaattgccttgcctcctattgcaaagtggccttatcagaatggcttcaccttaaacacttggtttcgtatggatccattaaataatattaatgttgataaggataaaccttatctttattgttttcgtactagcaaaggagttggttactctgctcattttgttggcaactgtttaatagtcacatcattgaagtccaaaggaaaaggttttcagcattgtgtgaaatatgattttcaaccacgcaagtggtacatgatcagcattgtccacatttacaatcgatggaggaacagtgaaattcggtgttatgttaatggacaactggtatcttatggtgatatggcttggcatgttaacacaaatgatagctatgacaagtgctttcttggatcatcagaaactgctgatgcaaatagggtattctgtggtcaacttggtgccgtgtatgtgttcagtgaagcactcaacccagcacagatatttgcaattcatcagttaggacctggatataagagtaccttcaagtttaaatctgagagtgatattcatttggcagaacatcataaacaggtgttatatgatgggaaacttgcaagtagcattgcctttacatataatgctaaggccactgatgctcagctctgcctggaatcatcaccaaaagagaatgcatcaatttttgtgcattccccacatgctctaatgcttcaggatgtgaaagcgatagtaacacattcaattcatagtgcaattcattcaattggagggattcaagtgctttttccactttttgcccaattggataataggcagctcaatgacagtcaagtggaaacaactgtctgtgctactctgttggcattcctggttgaactacttaaaagttcagtagccatgcaagaacagatgctgggtggaaaaggctttttagtcattggctacttacttgaaaagtcatcaagagttcatataactagagctgtcctggagcaatttttatcttttgcaaaataccttgatggtttatctcatggagcacctttgctgaagcagctttgtgatcacattttatttaacccagccatctggatacatacacctgcaaaggttcagctttccctatacacatatttgtctgctgaatttattggaactgctaccatctacaccaccatacgcagagtaggaacagtattacagctaatgcacaccttaaaatattactactgggttattaatcctgctgacagtagtggcattacacctaaaggattagatggtccccggccatcacaaaaagaaattatatcactgagggcatttatgctactttttctgaaacagctgatactaaaggatcgaggggtcaaggaagatgaacttcagagtatattaaattacctacttacgatgcatgaggatgaaaatattcatgatgtgctacagttactggtggctttaatgtcggaacacccagcctcaatgataccagcatttgatcaaagaaatggaataagggtgatctacaaattattggcttctaaaagtgaaagtatttgggttcaagctttgaaggttctgggatactttctgaagcatttaggtcacaagagaaaagttgaaattatgcacacccatagtcttttcactcttcttggagaaaggctgatgttgcatacaaacactgtgactgtcaccacatacaacacactttatgagatcttgacagaacaagtatgtactcaggtcgtacacaaaccacatccagagccagattctacagtgaaaattcagaatccaatgattcttaaagtggtggcaactttgttaaaaaactctacaccaagtgcagagctgatggaagttcgtcgtttatttttatctgatatgataaaacttttcagtaacagccgtgaaaatagaagatgcttattgcagtgttcagtgtggcaggattggatgttttctcttggctatatcaatcctaaaaattctgaggaacagaagattaccgaaatggtctacaatatcttccggattcttttgtatcatgcaataaaatatgaatggggaggctggagagtctgggtggataccctctcaatagcccattccaaggtcacttatgaagctcataaggaatacctagccaaaatgtatgaggaatatcaaagacaagaggaggaaaacattaaaaagggaaagaaagggaatgtgagcaccatctctggtctttcatcacagacaacaggagcaaaaggtggaatggaaattcgagagatagaagatctttcacaaagccagagcccagaaagtgagaccgattaccctgtcagcacagatactcgagacttactcatgtcaacaaaagtgtcagatgatattcttggaaattcagatagaccaggaagtggtgtacatgtggaagtacatgatcttttagtagatataaaagcagagaaagtggaagcaacagaagtaaagctcgatgatatggatttatcaccggagactttagtaggtggagagaatggtgcccttgtggaggttgaatctctgttggataatgtatatagtgctgctgttgagaaactccagaacaatgtacatggaagtgttggtatcattaaaaaaaatgaagaaaaggataatggtccattgataacattagcagatgagaaagaagaccttcccaatagtagtacatcatttctctttgataaaatacccaaacaggaggaaaaactacttcctgaactttctagcaatcacattattccaaatattcaggacacacaagtacatcttggtgttagtgatgatcttggattgcttgctcacatgaccggtagcgtagacttaacttgtacatccagtataatagaagaaaaagaattcaaaatccatacaacttcagatggaatgagcagtatttctgaaagagacttagcgtcatcaactaaggggctggagtatgctgaaatgactgctacaactctggaaactgagtcttctagtagcaaaattgtaccaaatattgatgcaggaagtataatttcagatactgaaaggtctgacgatggcaaagaatcaggaaaagaaatccgaaaaatccaaacaactactacgacacaagctgtgcagggtcggtctatcacccaacaagaccgagatctccgagttgatttaggatttcgaggaatgccaatgactgaggaacagcgacgccagtttagcccaggtccacggactacaatgtttcgtattcctgagtttaaatggtctccaatgcaccagcggcttctcactgatttactatttgcattagaaactgatgtacatgtttggaggagccattctacaaagtctgtaatggattttgtcaatagcaatgaaaatattatttttgtacataacacaattcacctcatttcccaaatggtagacaacatcatcattgcttgtggaggaattttacctttgctctctgctgctacatcaccaactgtaagtaaaacggaattggaaaatattgaagtgacacaaggcatgtcagctgagacagcagtaactttcctcagccggctgatggctatggttgatgtacttgtgtttgcaagctctctaaattttagtgagattgaagctgagaaaaacatgtcttctggaggtttaatgcgacagtgcctaagattagtttgttgtgttgctgtgagaaactgtttagaatgtcggcaaagacagagagacaggggaaataaatcttcccatggaagcagtaaacctcaggaagttcctcaaagtgtgactgctacagcagcttcgaagactccattggaaaatgttccaggtaacctttctcctattaaggatccggatagacttcttcaggatgttgatatcaatcgccttcgtgctgttgtctttcgggatgtggatgatagcaaacaagcacagttcttagctctggctgttgtttacttcatttcggttctgatggtttccaagtatcgtgacatattagaaccccagagagagactacaagaactggaagccaaccaggtagaaacatcaggcaagaaataaattcaccaacaagtacagttgtggtcataccatctatccctcatccaagtttgaaccatggattccttgccaagttaattcctgagcagagctttggccactcattttacaaagaaacacctgctgcatttccagacaccataaaagaaaaagaaacaccaactcctggtgaagatattcaggtagaaagttcaattccccatacagattcaggaattggagaggagcaagtggctagcatcctgaatggggcagaattagaaacaagtacaggccctgatgccatgagtgaactcttatccactttgtcatccgaagtgaagaaatcacaagagagcttaactgaaaatcctagtgaaacgttgaagcctgcaacatccatatctagcattagtcaaaccaaaggcatcaatgtgaaggaaatactgaaaagtcttgtggctgctccagttgaaatagcagaatgtggccctgaacctatcccatacccagatccagcattgaagagagaaacacaagctattcttcctatgcagtttcattcctttgacaggagtgttgtggtgcctgtaaagaaaccacctccaggtagtttagctgtaaccactgtgggagccactactgctggaagtgggctgccaacaggcagtacctctaatatatttgctgctactggagctacaccaaaaagtatgattaatacaacaggtgccgtggattcagggtcctcctcctcttcctcctcttctagttttgtgaatggtgctactagcaaaaaccttccagctgtacaaactgttgctccaatgccagaagattcagctgaaaatatgagcatcactgcaaaacttgaaagagcgttagaaaaagttgctcctcttcttcgtgaaatttttgtagactttgccccattcctatctcgtacacttcttggcagtcatggacaagagctattgatagaaggccttgtttgtatgaagtccagcacatctgtggttgagcttgttatgctgctttgttctcaggaatggcaaaactctattcagaagaatgcaggacttgcatttattgagctcatcaatgaaggaagattactgtgccatgctatgaaggaccatatagtccgtgttgcaaatgaagctgagtttattttgaacagacaaagagccgaggatgtacataaacatgcagagtttgagtcacagtgtgcccaatatgctgctgatagaagagaggaagaaaagatgtgtgaccatcttatcagtgctgctaaacatcgagatcatgtaacagcaaatcagctgaaacagaagattctcaatattctcacaaataaacatggtgcttggggagcagtttctcatagccaattgcatgatttctggcgtttggattactgggaagatgatcttcgtcgaaggagacgatttgttcgcaatgcatttggctccactcatgctgaagcattgctgaaagctgcaatagaatatggcacggaagaagatgtagtaaagtcaaagaaaacattcagaagtcaagcaatagtgaaccaaaatgcagagacagaacttatgctggaaggagacgatgatgcagtcagtctgctacaggagaaagaaattgacaaccttgcaggcccagtggttctcagcacccctgcccagctcatcgctcccgtggtggtggccaaggggactctctccatcaccacgacagaaatctacttcgaggtagatgaggatgattctgccttcaagaagatcgacacgaaagttcttgcatacactgagggacttcacggaaaatggatgttcagcgagatacgagctgtattttcaagacgttaccttctacaaaacactgctttggaagtatttatggcaaaccgaacctcagttatgtttaatttccctgatcaagcaacagtaaaaaaagttgtctatagcttgcctcgggttggagtagggaccagctatggtctgccacaagccaggaggatatcattggccactcctcgacagctttataaatcttccaatatgactcagcgctggcaaagaagggaaatttcaaacttcgaatatttgatgttccttaatactattgcaggacggacatataatgatctgaaccaatatccagtgtttccgtgggtgttaaccaactatgaatcagaagagttggacctgactcttccaggaaacttcagggatctatcaaagccaattggtgctttgaaccccaagagagctgtgttttatgcagagcgttatgagacatgggaagatgatcaaagcccaccctaccattataatacccattattcaacagcaacatctactttatcctggcttgttcgaattgaacctttcacaaccttcttcctcaatgcaaatgatggaaaatttgatcatccagatcgaaccttctcatccgttgcaaggtcttggagaactagtcagagagatacttctgatgtaaaggaactaattccagagttctactacctaccagagatgtttgtcaacagtaatggatataatcttggagtcagagaagatgaagtagtggtaaatgatgttgatcttcccccttgggcaaaaaaacctgaagactttgtgcggatcaacaggatggccctagaaagtgaatttgtttcttgccaacttcatcagtggatcgaccttatatttggctataagcagcgaggaccagaagcagttcgtgctctgaatgtttttcactacttgacttatgaaggctctgtgaacctggatagtatcactgatcctgtgctcagggaggccatggaggcacagatacagaactttggacagacgccatctcagttgcttattgagccacatccgcctcggagctctgccatgcacctgtgtttccttccacagagtccgctcatgtttaaagatcagatgcaacaggatgtgataatggtgctgaagtttccttcaaattctccagtaacccatgtggcagccaacactctgccccacttgaccatccccgcagtggtgacagtgacttgcagccgactctttgcagtgaatagatggcacaacacagtaggcctcagaggagctccaggatactccttggatcaagcccaccatcttcccattgaaatggatccattaatagccaataattcaggtgtaaacaaacggcagatcacagacctcgttgaccagagtatacaaatcaatgcacattgttttgtggtaacagcagataatcgctatattcttatctgtggattctgggataagagcttcagagtttattctacagaaacagggaaattgactcagattgtatttggccattgggatgtggtcacttgcttggccaggtccgagtcatacattggtggggactgctacatcgtgtccggatctcgagatgccaccctgctgctctggtactggagtgggcggcaccatatcataggagacaaccctaacagcagtgactatccggcaccaagagccgtcctcacaggccatgaccatgaagttgtctgtgtttctgtctgtgcagaacttgggcttgttatcagtggtgctaaagagggcccttgccttgtccacaccatcactggagatttgctgagagcccttgaaggaccagaaaactgcttattcccacgcttgatatctgtctccagcgaaggccactgtatcatatactatgaacgagggcgattcagtaatttcagcattaatgggaaacttttggctcaaatggagatcaatgattcaacacgggccattctcctgagcagtgacggccagaacctggtcaccggaggggacaatggggtagtagaggtctggcaggcctgtgacttcaagcaactgtacatttaccctggatgtgatgctggcattagagcaatggacttgtcccatgaccagaggactctgatcactggcatggcttctggtagcattgtagcttttaatatagattttaatcggtggcattatgagcatcagaacagatactgaagataaaggaagaaccaaaagccaagttaaagctgagagcacaagtgctgcatggaaaggcaatatctctggtggaaaaaactcgtctacatcgacctccgtttgtacattccatcacacccagcaatagctgtacattgtagtcagcaaccattttactttgtgtgttttttcacgactgaacaccagctgctatcaagcaagcttatatcatgtaaattatatgaattaggagatgttttggtaattatttcatatattgttgtttattgagaaaaggttgtaggatgtgtcacaagagacttttgacaattctgaggaaccttgtgtccagttgttacaaagtttaagctttgaacctaacctgcatcccatttccagcctcttttcaagctgagaaaaaaaaaaaaaaacacgtttgatactttgtacatcagatgcatcttatttaaaagggatacttttgtaaaagtaaaaccttgtataaagaacaaaatgtttcttaattttattgtggagttacaacttgcatgttccttactcctgttggcttgatggaacaggtgcattcacactatgaaacagaaagatctgtccaaggacacagcttgtatgaaagggttgaatttgggctccatcagtaatttttgacattttcaccaaaatatagtttgcactttttaatctaaagtcatcccttctgagtgaaatttgctcataaagcatttggatactaagccattatttgccattttgggtactttatacaaagaaaattcagccctaccctgcataatttgaagacacagcagaaagggggcttagggatgaggtcctggtttttcttgtataaataggagtcatgggcgttagttctgtagtaataacttcccagcacctggacatctcttccagagttatcccactggcttggtgtgtatacattaggggaggataatctgatgctaactttttttttctctttggttcttgaatagcttagtttctttaataacaagtcaaactttattacaacaataactgaagttattcttttaggttctcgtgaaattctcactgaaagccacattcttagcctaaggcatttcatcttttatgatataaaatgatggctatcaaatgattttccatacattgtactgatcaagttatacacccaggggtatatacactttcttcatgtttcttctttgtatatttggtgactgtatcgtcatagatgtacatattgtgtcggtagggctatgaggcatgttacaggaatgtaattttctcagaatttacactcactcgcagtcatttatttaaaaagataaaacaagataatgggttctttgtattggcactttgcaccagaaacatatcattatttattgatgtgattacttatttgttatccaccttgtactagtaagttttagcactgaattccttcttcactgttgtttgtatttatgaaattctgaaattatggggaatcagcgtaatgattaagttattcatcaccaggctgtaagcaatatcttgagtttgtagcttagaattgggaggatacttaacatctggaagacaagttcatttcatcttgagatcatggtgaaatattttggatatataaattccttaagctattgtaaccatgttttattgcaaagatgtaaaatatgccagatgtgtgtgagttggaaatcaaaaaaagaaaaataaaatatgcaaagaattc

SEQ ID NO: 187767 - DNA, 11119 bp, Artificial Sequence
  derived and/or modified sequence
aggcagggggcggcaacatggcggagtgagcggcggcgtcggggcttcacaacaacagtggtggccgtagcagcggcggcagcagcgtcaatagcatcggccacagcctgagcttcagcaccggccagcgtcgtggccagctgctcgcgtcctcgggcttctcggagcggctgcagcatctccgcggggggcgggccgggccggacagaccgggagagggagagagcagaggcagcggcggcggcagcggcagcggcagcggcacacctgctgggcgggcacagccgcttgcccggcagcggttagcggtaccgccaccgccgagaataagcctgcggatcccccgccgcctccgcgggggagagcgccggagcgggccgggctgaggcgcaggcggggagcgggcccggcgccgcggcgctggtggatgctggggctccgaggcgacggccggggggcgggggccgaggcaggtataacggtaccggcggcggcagcgccgctgctcttcccttctcctcaggaggggggccaatggctagcgagaagccgggcccgggcccggggctcgagcctcagcccgtggggctcattgccgtcggggccgctggcggaggcggcgggggcagcggtggtggcggcaccgggggcagcgggatgggggagctaaggggggcgtccggctccggctcggtgatgctccccgcggggatgattaacccttcggtgccgatccgcaacatccggatgaaattcgcagtgttgattggactcatacaggtcggagaggtcagcaacagggacatcgtggagacggtgctcaacctgctggttggtggagaatttgacttggagatgaactttattatccaggatgctgagagtataacatgtatgacagagcttttggagcactgtgatgtaacatgtcaagcagaaatatggagcatgtttacagccattctacgaaaaagtgttcggaatttacagactagcacagaagttgggctaattgaacaagtattgctgaaaatgagtgctgtagatgacatgatagcagatcttctagttgatatgttgggggttcttgccagctacagcatcactgtcaaggagttgaagcttttgttcagcatgcttcgaggagaaagtggaatctggccaagacatgcagtaaaattattatcagttcttaatcagatgccacagagacacggtcctgatacttttttcaatttccctggttgtagcgctgcggcaattgccttgcctcctattgcaaagtggccttatcagaatggcttcaccttaaacacttggtttcgtatggatccattaaataatattaatgttgataaggataaaccttatctttattgttttcgtactagcaaaggagttggttactctgctcattttgttggcaactgtttaatagtcacatcattgaagtccaaaggaaaaggttttcagcattgtgtgaaatatgattttcaaccacgcaagtggtacatgatcagcattgtccacatttacaatcgatggaggaacagtgaaattcggtgttatgttaatggacaactggtatcttatggtgatatggcttggcatgttaacacaaatgatagctatgacaagtgctttcttggatcatcagaaactgctgatgcaaatagggtattctgtggtcaacttggtgccgtgtatgtgttcagtgaagcactcaacccagcacagatatttgcaattcatcagttaggacctggatataagagtaccttcaagtttaaatctgagagtgatattcatttggcagaacatcataaacaggtgttatatgatgggaaacttgcaagtagcattgcctttacatataatgctaaggccactgatgctcagctctgcctggaatcatcaccaaaagagaatgcatcaatttttgtgcattccccacatgctctaatgcttcaggatgtgaaagcgatagtaacacattcaattcatagtgcaattcattcaattggagggattcaagtgctttttccactttttgcccaattggataataggcagctcaatgacagtcaagtggaaacaactgtctgtgctactctgttggcattcctggttgaactacttaaaagttcagtagccatgcaagaacagatgctgggtggaaaaggctttttagtcattggctacttacttgaaaagtcatcaagagttcatataactagagctgtcctggagcaatttttatcttttgcaaaataccttgatggtttatctcatggagcacctttgctgaagcagctttgtgatcacattttatttaacccagccatctggatacatacacctgcaaaggttcagctttccctatacacatatttgtctgctgaatttattggaactgctaccatctacaccaccatacgcagagtaggaacagtattacagctaatgcacaccttaaaatattactactgggttattaatcctgctgacagtagtggcattacacctaaaggattagatggtccccggccatcacaaaaagaaattatatcactgagggcatttatgctactttttctgaaacagctgatactaaaggatcgaggggtcaaggaagatgaacttcagagtatattaaattacctacttacgatgcatgaggatgaaaatattcatgatgtgctacagttactggtggctttaatgtcggaacacccagcctcaatgataccagcatttgatcaaagaaatggaataagggtgatctacaaattattggcttctaaaagtgaaagtatttgggttcaagctttgaaggttctgggatactttctgaagcatttaggtcacaagagaaaagttgaaattatgcacacccatagtcttttcactcttcttggagaaaggctgatgttgcatacaaacactgtgactgtcaccacatacaacacactttatgagatcttgacagaacaagtatgtactcaggtcgtacacaaaccacatccagagccagattctacagtgaaaattcagaatccaatgattcttaaagtggtggcaactttgttaaaaaactctacaccaagtgcagagctgatggaagttcgtcgtttatttttatctgatatgataaaacttttcagtaacagccgtgaaaatagaagatgcttattgcagtgttcagtgtggcaggattggatgttttctcttggctatatcaatcctaaaaattctgaggaacagaagattaccgaaatggtctacaatatcttccggattcttttgtatcatgcaataaaatatgaatggggaggctggagagtctgggtggataccctctcaatagcccattccaaggtcacttatgaagctcataaggaatacctagccaaaatgtatgaggaatatcaaagacaagaggaggaaaacattaaaaagggaaagaaagggaatgtgagcaccatctctggtctttcatcacagacaacaggagcaaaaggtggaatggaaattcgagagatagaagatctttcacaaagccagagcccagaaagtgagaccgattaccctgtcagcacagatactcgagacttactcatgtcaacaaaagtgtcagatgatattcttggaaattcagatagaccaggaagtggtgtacatgtggaagtacatgatcttttagtagatataaaagcagagaaagtggaagcaacagaagtaaagctcgatgatatggatttatcaccggagactttagtaggtggagagaatggtgcccttgtggaggttgaatctctgttggataatgtatatagtgctgctgttgagaaactccagaacaatgtacatggaagtgttggtatcattaaaaaaaatgaagaaaaggataatggtccattgataacattagcagatgagaaagaagaccttcccaatagtagtacatcatttctctttgataaaatacccaaacaggaggaaaaactacttcctgaactttctagcaatcacattattccaaatattcaggacacacaagtacatcttggtgttagtgatgatcttggattgcttgctcacatgaccggtagcgtagacttaacttgtacatccagtataatagaagaaaaagaattcaaaatccatacaacttcagatggaatgagcagtatttctgaaagagacttagcgtcatcaactaaggggctggagtatgctgaaatgactgctacaactctggaaactgagtcttctagtagcaaaattgtaccaaatattgatgcaggaagtataatttcagatactgaaaggtctgacgatggcaaagaatcaggaaaagaaatccgaaaaatccaaacaactactacgacacaagctgtgcagggtcggtctatcacccaacaagaccgagatctccgagttgatttaggatttcgaggaatgccaatgactgaggaacagcgacgccagtttagcccaggtccacggactacaatgtttcgtattcctgagtttaaatggtctccaatgcaccagcggcttctcactgatttactatttgcattagaaactgatgtacatgtttggaggagccattctacaaagtctgtaatggattttgtcaatagcaatgaaaatattatttttgtacataacacaattcacctcatttcccaaatggtagacaacatcatcattgcttgtggaggaattttacctttgctctctgctgctacatcaccaactggttctaagacggaattggaaaatattgaagtgacacaaggcatgtcagctgagacagcagtaactttcctcagccggctgatggctatggttgatgtacttgtgtttgcaagctctctaaattttagtgagattgaagctgagaaaaacatgtcttctggaggtttaatgcgacagtgcctaagattagtttgttgtgttgctgtgagaaactgtttagaatgtcggcaaagacagagagacaggggaaataaatcttcccatggaagcagtaaacctcaggaagttcctcaaagtgtgactgctacagcagcttcgaagactccattggaaaatgttccaggtaacctttctcctattaaggatccggatagacttcttcaggatgttgatatcaatcgccttcgtgctgttgtctttcgggatgtggatgatagcaaacaagcacagttcttagctctggctgttgtttacttcatttcggttctgatggtttccaagtatcgtgacatattagaaccccagagagagactacaagaactggaagccaaccaggtagaaacatcaggcaagaaataaattcaccaacaagtacagttgtggtcataccatctatccctcatccaagtttgaaccatggattccttgccaagttaattcctgagcagagctttggccactcattttacaaagaaacacctgctgcatttccagacaccataaaagaaaaagaaacaccaactcctggtgaagatattcaggtagaaagttcaattccccatacagattcaggaattggagaggagcaagtggctagcatcctgaatggggcagaattagaaacaagtacaggccctgatgccatgagtgaactcttatccactttgtcatccgaagtgaagaaatcacaagagagcttaactgaaaatcctagtgaaacgttgaagcctgcaacatccatatctagcattagtcaaaccaaaggcatcaatgtgaaggaaatactgaaaagtcttgtggctgctccagttgaaatagcagaatgtggccctgaacctatcccatacccagatccagcattgaagagagaaacacaagctattcttcctatgcagtttcattcctttgacaggagtgttgtggtgcctgtaaagaaaccacctccaggtagtttagctgtaaccactgtgggagccactactgctggaagtgggctgccaacaggcagtacctctaatatatttgctgctactggagctacaccaaaaagtatgattaatacaacaggtgccgtggattcagggtcctcctcctcttcctcctcttctagttttgtgaatggtgctactagcaaaaaccttccagctgtacaaactgttgctccaatgccagaagattcagctgaaaatatgagcatcactgcaaaacttgaaagagcgttagaaaaagttgctcctcttcttcgtgaaatttttgtagactttgccccattcctatctcgtacacttcttggcagtcatggacaagagctattgatagaaggccttgtttgtatgaagtccagcacatctgtggttgagcttgttatgctgctttgttctcaggaatggcaaaactctattcagaagaatgcaggacttgcatttattgagctcatcaatgaaggaagattactgtgccatgctatgaaggaccatatagtccgtgttgcaaatgaagctgagtttattttgaacagacaaagagccgaggatgtacataaacatgcagagtttgagtcacagtgtgcccaatatgctgctgatagaagagaggaagaaaagatgtgtgaccatcttatcagtgctgctaaacatcgagatcatgtaacagcaaatcagctgaaacagaagattctcaatattctcacaaataaacatggtgcttggggagcagtttctcatagccaattgcatgatttctggcgtttggattactgggaagatgatcttcgtcgaaggagacgatttgttcgcaatgcatttggctccactcatgctgaagcattgctgaaagctgcaatagaatatggcacggaagaagatgtagtaaagtcaaagaaaacattcagaagtcaagcaatagtgaaccaaaatgcagagacagaacttatgctggaaggagacgatgatgcagtcagtctgctacaggagaaagaaattgacaaccttgcaggcccagtggttctcagcacccctgcccagctcatcgctcccgtggtggtggccaaggggactctctccatcaccacgacagaaatctacttcgaggtagatgaggatgattctgccttcaagaagatcgacacgaaagttcttgcatacactgagggacttcacggaaaatggatgttcagcgagatacgagctgtattttcaagacgttaccttctacaaaacactgctttggaagtatttatggcaaaccgaacctcagttatgtttaatttccctgatcaagcaacagtaaaaaaagttgtctatagcttgcctcgggttggagtagggaccagctatggtctgccacaagccaggaggatatcattggccactcctcgacagctttataaatcttccaatatgactcagcgctggcaaagaagggaaatttcaaacttcgaatatttgatgttccttaatactattgcaggacggacatataatgatctgaaccaatatccagtgtttccgtgggtgttaaccaactatgaatcagaagagttggacctgactcttccaggaaacttcagggatctatcaaagccaattggtgctttgaaccccaagagagctgtgttttatgcagagcgttatgagacatgggaagatgatcaaagcccaccctaccattataatacccattattcaacagcaacatctactttatcctggcttgttcgaattgaacctttcacaaccttcttcctcaatgcaaatgatggaaaatttgatcatccagatcgaaccttctcatccgttgcaaggtcttggagaactagtcagagagatacttctgatgtaaaggaactaattccagagttctactacctaccagagatgtttgtcaacagtaatggatataatcttggagtcagagaagatgaagtagtggtaaatgatgttgatcttcccccttgggcaaaaaaacctgaagactttgtgcggatcaacaggatggccctagaaagtgaatttgtttcttgccaacttcatcagtggatcgaccttatatttggctataagcagcgaggaccagaagcagttcgtgctctgaatgtttttcactacttgacttatgaaggctctgtgaacctggatagtatcactgatcctgtgctcagggaggccatggaggcacagatacagaactttggacagacgccatctcagttgcttattgagccacatccgcctcggagctctgccatgcacctgtgtttccttccacagagtccgctcatgtttaaagatcagatgcaacaggatgtgataatggtgctgaagtttccttcaaattctccagtaacccatgtggcagccaacactctgccccacttgaccatccccgcagtggtgacagtgacttgcagccgactctttgcagtgaatagatggcacaacacagtaggcctcagaggagctccaggatactccttggatcaagcccaccatcttcccattgaaatggatccattaatagccaataattcaggtgtaaacaaacggcagatcacagacctcgttgaccagagtatacaaatcaatgcacattgttttgtggtaacagcagataatcgctatattcttatctgtggattctgggataagagcttcagagtttattctacagaaacagggaaattgactcagattgtatttggccattgggatgtggtcacttgcttggccaggtccgagtcatacattggtggggactgctacatcgtgtccggatctcgagatgccaccctgctgctctggtactggagtgggcggcaccatatcataggagacaaccctaacagcagtgactatccggcaccaagagccgtcctcacaggccatgaccatgaagttgtctgtgtttctgtctgtgcagaacttgggcttgttatcagtggtgctaaagagggcccttgccttgtccacaccatcactggagatttgctgagagcccttgaaggaccagaaaactgcttattcccacgcttgatatctgtctccagcgaaggccactgtatcatatactatgaacgagggcgattcagtaatttcagcattaatgggaaacttttggctcaaatggagatcaatgattcaacacgggccattctcctgagcagtgacggccagaacctggtcaccggaggggacaatggggtagtagaggtctggcaggcctgtgacttcaagcaactgtacatttaccctggatgtgatgctggcattagagcaatggacttgtcccatgaccagaggactctgatcactggcatggcttctggtagcattgtagcttttaatatagattttaatcggtggcattatgagcatcagaacagatactgaagataaaggaagaaccaaaagccaagttaaagctgagagcacaagtgctgcatggaaaggcaatatctctggtggaaaaaactcgtctacatcgacctccgtttgtacattccatcacacccagcaatagctgtacattgtagtcagcaaccattttactttgtgtgttttttcacgactgaacaccagctgctatcaagcaagcttatatcatgtaaattatatgaattaggagatgttttggtaattatttcatatattgttgtttattgagaaaaggttgtaggatgtgtcacaagagacttttgacaattctgaggaaccttgtgtccagttgttacaaagtttaagctttgaacctaacctgcatcccatttccagcctcttttcaagctgagaaaaaaaaaaaaaaacacgtttgatactttgtacatcagatgcatcttatttaaaagggatacttttgtaaaagtaaaaccttgtataaagaacaaaatgtttcttaattttattgtggagttacaacttgcatgttccttactcctgttggcttgatggaacaggtgcattcacactatgaaacagaaagatctgtccaaggacacagcttgtatgaaagggttgaatttgggctccatcagtaatttttgacattttcaccaaaatatagtttgcactttttaatctaaagtcatcccttctgagtgaaatttgctcataaagcatttggatactaagccattatttgccattttgggtactttatacaaagaaaattcagccctaccctgcataatttgaagacacagcagaaagggggcttagggatgaggtcctggtttttcttgtataaataggagtcatgggcgttagttctgtagtaataacttcccagcacctggacatctcttccagagttatcccactggcttggtgtgtatacattaggggaggataatctgatgctaactttttttttctctttggttcttgaatagcttagtttctttaataacaagtcaaactttattacaacaataactgaagttattcttttaggttctcgtgaaattctcactgaaagccacattcttagcctaaggcatttcatcttttatgatataaaatgatggctatcaaatgattttccatacattgtactgatcaagttatacacccaggggtatatacactttcttcatgtttcttctttgtatatttggtgactgtatcgtcatagatgtacatattgtgtcggtagggctatgaggcatgttacaggaatgtaattttctcagaatttacactcactcgcagtcatttatttaaaaagataaaacaagataatgggttctttgtattggcactttgcaccagaaacatatcattatttattgatgtgattacttatttgttatccaccttgtactagtaagttttagcactgaattccttcttcactgttgtttgtatttatgaaattctgaaattatggggaatcagcgtaatgattaagttattcatcaccaggctgtaagcaatatcttgagtttgtagcttagaattgggaggatacttaacatctggaagacaagttcatttcatcttgagatcatggtgaaatattttggatatataaattccttaagctattgtaaccatgttttattgcaaagatgtaaaatatgccagatgtgtgtgagttggaaatcaaaaaaagaaaaataaaatatgcaaagaattc

SEQ ID NO: 187768 - DNA, 11119 bp, Artificial Sequence
  derived and/or modified sequence
aggcagggggcggcaacatggcggagtgagcggcggcgtcggggcttcacaacaacagtggtggccgtagcagcggcggcagcagcgtcaatagcatcggccacagcctgagcttcagcaccggccagcgtcgtggccagctgctcgcgtcctcgggcttctcggagcggctgcagcatctccgcggggggcgggccgggccggacagaccgggagagggagagagcagaggcagcggcggcggcagcggcagcggcagcggcacacctgctgggcgggcacagccgcttgcccggcagcggttagcggtaccgccaccgccgagaataagcctgcggatcccccgccgcctccgcgggggagagcgccggagcgggccgggctgaggcgcaggcggggagcgggcccggcgccgcggcgctggtggatgctggggctccgaggcgacggccggggggcgggggccgaggcaggtataacggtaccggcggcggcagcgccgctgctcttcccttctcctcaggaggggggccaatggctagcgagaagccgggcccgggcccggggctcgagcctcagcccgtggggctcattgccgtcggggccgctggcggaggcggcgggggcagcggtggtggcggcaccgggggcagcgggatgggggagctaaggggggcgtccggctccggctcggtgatgctccccgcggggatgattaacccttcggtgccgatccgcaacatccggatgaaattcgcagtgttgattggactcatacaggtcggagaggtcagcaacagggacatcgtggagacggtgctcaacctgctggttggtggagaatttgacttggagatgaactttattatccaggatgctgagagtataacatgtatgacagagcttttggagcactgtgatgtaacatgtcaagcagaaatatggagcatgtttacagccattctacgaaaaagtgttcggaatttacagactagcacagaagttgggctaattgaacaagtattgctgaaaatgagtgctgtagatgacatgatagcagatcttctagttgatatgttgggggttcttgccagctacagcatcactgtcaaggagttgaagcttttgttcagcatgcttcgaggagaaagtggaatctggccaagacatgcagtaaaattattatcagttcttaatcagatgccacagagacacggtcctgatacttttttcaatttccctggttgtagcgctgcggcaattgccttgcctcctattgcaaagtggccttatcagaatggcttcaccttaaacacttggtttcgtatggatccattaaataatattaatgttgataaggataaaccttatctttattgttttcgtactagcaaaggagttggttactctgctcattttgttggcaactgtttaatagtcacatcattgaagtccaaaggaaaaggttttcagcattgtgtgaaatatgattttcaaccacgcaagtggtacatgatcagcattgtccacatttacaatcgatggaggaacagtgaaattcggtgttatgttaatggacaactggtatcttatggtgatatggcttggcatgttaacacaaatgatagctatgacaagtgctttcttggatcatcagaaactgctgatgcaaatagggtattctgtggtcaacttggtgccgtgtatgtgttcagtgaagcactcaacccagcacagatatttgcaattcatcagttaggacctggatataagagtaccttcaagtttaaatctgagagtgatattcatttggcagaacatcataaacaggtgttatatgatgggaaacttgcaagtagcattgcctttacatataatgctaaggccactgatgctcagctctgcctggaatcatcaccaaaagagaatgcatcaatttttgtgcattccccacatgctctaatgcttcaggatgtgaaagcgatagtaacacattcaattcatagtgcaattcattcaattggagggattcaagtgctttttccactttttgcccaattggataataggcagctcaatgacagtcaagtggaaacaactgtctgtgctactctgttggcattcctggttgaactacttaaaagttcagtagccatgcaagaacagatgctgggtggaaaaggctttttagtcattggctacttacttgaaaagtcatcaagagttcatataactagagctgtcctggagcaatttttatcttttgcaaaataccttgatggtttatctcatggagcacctttgctgaagcagctttgtgatcacattttatttaacccagccatctggatacatacacctgcaaaggttcagctttccctatacacatatttgtctgctgaatttattggaactgctaccatctacaccaccatacgcagagtaggaacagtattacagctaatgcacaccttaaaatattactactgggttattaatcctgctgacagtagtggcattacacctaaaggattagatggtccccggccatcacaaaaagaaattatatcactgagggcatttatgctactttttctgaaacagctgatactaaaggatcgaggggtcaaggaagatgaacttcagagtatattaaattacctacttacgatgcatgaggatgaaaatattcatgatgtgctacagttactggtggctttaatgtcggaacacccagcctcaatgataccagcatttgatcaaagaaatggaataagggtgatctacaaattattggcttctaaaagtgaaagtatttgggttcaagctttgaaggttctgggatactttctgaagcatttaggtcacaagagaaaagttgaaattatgcacacccatagtcttttcactcttcttggagaaaggctgatgttgcatacaaacactgtgactgtcaccacatacaacacactttatgagatcttgacagaacaagtatgtactcaggtcgtacacaaaccacatccagagccagattctacagtgaaaattcagaatccaatgattcttaaagtggtggcaactttgttaaaaaactctacaccaagtgcagagctgatggaagttcgtcgtttatttttatctgatatgataaaacttttcagtaacagccgtgaaaatagaagatgcttattgcagtgttcagtgtggcaggattggatgttttctcttggctatatcaatcctaaaaattctgaggaacagaagattaccgaaatggtctacaatatcttccggattcttttgtatcatgcaataaaatatgaatggggaggctggagagtctgggtggataccctctcaatagcccattccaaggtcacttatgaagctcataaggaatacctagccaaaatgtatgaggaatatcaaagacaagaggaggaaaacattaaaaagggaaagaaagggaatgtgagcaccatctctggtctttcatcacagacaacaggagcaaaaggtggaatggaaattcgagagatagaagatctttcacaaagccagagcccagaaagtgagaccgattaccctgtcagcacagatactcgagacttactcatgtcaacaaaagtgtcagatgatattcttggaaattcagatagaccaggaagtggtgtacatgtggaagtacatgatcttttagtagatataaaagcagagaaagtggaagcaacagaagtaaagctcgatgatatggatttatcaccggagactttagtaggtggagagaatggtgcccttgtggaggttgaatctctgttggataatgtatatagtgctgctgttgagaaactccagaacaatgtacatggaagtgttggtatcattaaaaaaaatgaagaaaaggataatggtccattgataacattagcagatgagaaagaagaccttcccaatagtagtacatcatttctctttgataaaatacccaaacaggaggaaaaactacttcctgaactttctagcaatcacattattccaaatattcaggacacacaagtacatcttggtgttagtgatgatcttggattgcttgctcacatgaccggtagcgtagacttaacttgtacatccagtataatagaagaaaaagaattcaaaatccatacaacttcagatggaatgagcagtatttctgaaagagacttagcgtcatcaactaaggggctggagtatgctgaaatgactgctacaactctggaaactgagtcttctagtagcaaaattgtaccaaatattgatgcaggaagtataatttcagatactgaaaggtctgacgatggcaaagaatcaggaaaagaaatccgaaaaatccaaacaactactacgacacaagctgtgcagggtcggtctatcacccaacaagaccgagatctccgagttgatttaggatttcgaggaatgccaatgactgaggaacagcgacgccagtttagcccaggtccacggactacaatgtttcgtattcctgagtttaaatggtctccaatgcaccagcggcttctcactgatttactatttgcattagaaactgatgtacatgtttggaggagccattctacaaagtctgtaatggattttgtcaatagcaatgaaaatattatttttgtacataacacaattcacctcatttcccaaatggtagacaacatcatcattgcttgtggaggaattttacctttgctctctgctgctacatcaccaactgtaagtaaaacggaattggaaaatattgaagtgacacaaggcatgtcagctgagacagcagtaactttcctcagccggctgatggctatggttgatgtacttgtgtttgcaagctctctaaattttagtgagattgaagctgagaaaaacatgtcttctggaggtttaatgcgacagtgcctaagattagtttgttgtgttgctgtgagaaactgtttagaatgtcggcaaagacagagagacaggggaaataaatcttcccatggaagcagtaaacctcaggaagttcctcaaagtgtgactgctacagcagcttcgaagactccattggaaaatgttccaggtaacctttctcctattaaggatccggatagacttcttcaggatgttgatatcaatcgccttcgtgctgttgtctttcgggatgtggatgatagcaaacaagcacagttcttagctctggctgttgtttacttcatttcggttctgatggtttccaagtatcgtgacatattagaaccccagagagagactacaagaactggaagccaaccaggtagaaacatcaggcaagaaataaattcaccaacaagtacagttgtggtcataccatctatccctcatccaagtttgaaccatggattccttgccaagttaattcctgagcagagctttggccactcattttacaaagaaacacctgctgcatttccagacaccataaaagaaaaagaaacaccaactcctggtgaagatattcaggtagaaagttcaattccccatacagattcaggaattggagaggagcaagtggctagcatcctgaatggggcagaattagaaacaagtacaggccctgatgccatgagtgaactcttatccactttgtcatccgaagtgaagaaatcacaagagagcttaactgaaaatcctagtgaaacgttgaagcctgcaacatccatatctagcattagtcaaaccaaaggcatcaatgtgaaggaaatactgaaaagtcttgtggctgctccagttgaaatagcagaatgtggccctgaacctatcccatacccagatccagcattgaagagagaaacacaagctattcttcctatgcagtttcattcctttgacaggagtgttgtggtgcctgtaaagaaaccacctccaggtagtttagctgtaaccactgtgggagccactactgctggaagtgggctgccaacaggcagtacctctaatatatttgctgctactggagctacaccaaaaagtatgattaatacaacaggtgccgtggattcagggtcctcctcctcttcctcctcttctagttttgtgaatggtgctactagcaaaaaccttccagctgtacaaactgttgctccaatgccagaagattcagctgaaaatatgagcatcactgcaaaacttgaaagagcgttagaaaaagttgctcctcttcttcgtgaaatttttgtagactttgccccattcctatctcgtacacttcttggcagtcatggacaagagctattgatagaaggccttgtttgtatgaagtccagcacatctgtggttgagcttgttatgctgctttgttctcaggaatggcaaaactctattcagaagaatgcaggacttgcatttattgagctcatcaatgaaggaagattactgtgccatgctatgaaggaccatatagtccgtgttgcaaatgaagctgagtttattttgaacagacaaagagccgaggatgtacataaacatgcagagtttgagtcacagtgtgcccaatatgctgctgatagaagagaggaagaaaagatgtgtgaccatcttatcagtgctgctaaacatcgagatcatgtaacagcaaatcagctgaaacagaagattctcaatattctcacaaataaacatggtgcttggggagcagtttctcatagccaattgcatgatttctggcgtttggattactgggaagatgatcttcgtcgaaggagacgatttgttcgcaatgcatttggctccactcatgctgaagcattgctgaaagctgcaatagaatatggcacggaagaagatgtagtaaagtcaaagaaaacattcagaagtcaagcaatagtgaaccaaaatgcagagacagaacttatgctggaaggagacgatgatgcagtcagtctgctacaggagaaagaaattgacaaccttgcaggcccagtggttctcagcacccctgcccagctcatcgctcccgtggtggtggccaaggggactctctccatcaccacgacagaaatctacttcgaggtagatgaggatgattctgccttcaagaagatcgacacgaaagttcttgcatacactgagggacttcacggaaaatggatgttcagcgagatacgagctgtattttcaagacgttaccttctacaaaacactgctttggaagtatttatggcaaaccgaacctcagttatgtttaatttccctgatcaagcaacagtaaaaaaagttgtctatagcttgcctcgggttggagtagggaccagctatggtctgccacaagccaggaggatatcattggccactcctcgacagctttataaatcttccaatatgactcagcgctggcaaagaagggaaatttcaaacttcgaatatttgatgttccttaatactattgcaggacggacatataatgatctgaaccaatatccagtgtttccgtgggtgttaaccaactatgaatcagaagagttggacctgactcttccaggaaacttcagggatctatcaaagccaattggtgctttgaaccccaagagagctgtgttttatgcagagcgttatgagacatgggaagatgatcaaagcccaccctaccattataatacccattattcaacagcaacatctactttatcctggcttgttcgaattgaacctttcacaaccttcttcctcaatgcaaatgatggaaaatttgatcatccagatcgaaccttctcatccgttgcaaggtcttggagaactagtcagagagatacttctgatgtaaaggaactaattccagagttctactacctaccagagatgtttgtcaacagtaatggatataatcttggagtcagagaagatgaagtagtggtaaatgatgttgatcttcccccttgggcaaaaaaacctgaagactttgtgcggatcaacaggatggccctagaaagtgaatttgtttcttgccaacttcatcagtggatcgaccttatatttggctataagcagcgaggaccagaagcagttcgtgctctgaatgtttttcactacttgacttatgaaggctctgtgaacctggatagtatcactgatcctgtgctcagggaggccatggaggcacagatacagaactttggacagacgccatctcagttgcttattgagccacatccgcctcggagctctgccatgcacctgtgtttccttccacagagtccgctcatgtttaaagatcagatgcaacaggatgtgataatggtgctgaagtttccttcaaattctccagtaacccatgtggcagccaacactctgccccacttgaccatccccgcagtggtgacagtgacttgcagccgactctttgcagtgaatagatggcacaacacagtaggcctcagaggagctccaggatactccttggatcaagcccaccatcttcccattgaaatggatccattaatagccaataattcaggtgtaaacaaacggcagatcacagacctcgttgaccagagtatacaaatcaatgcacattgttttgtggtaacagcagataatcgctatattcttatctgtggattctgggataagagcttcagagtttattctacagaaacagggaaattgactcagattgtatttggccattgggatgtggtcacttgcttggccaggtccgagtcatacattggtggggactgctacatcgtgtccggatctcgagatgccaccctgctgctctggtactggagtgggcggcaccatatcataggagacaaccctaacagcagtgactatccggcaccaagagccgtcctcacaggccatgaccatgaagttgtctgtgtttctgtctgtgcagaacttgggcttgttatcagtggtgctaaagagggcccttgccttgtccacaccatcactggagatttgctgagagcccttgaaggaccagaaaactgcttattcccacgcttgatatctgtctccagcgaaggccactgtatcatatactatgaacgagggcgattcagtaatttcagcattaatgggaaacttttggctcaaatggagatcaatgattcaacacgggccattctcctgagcagtgacggccagaacctggtcaccggaggggacaatggggtagtagaggtctggcaggcctgtgacttcaagcaactgtacatttaccctggatgtgatgctggcattagagcaatggacttgtcccatgaccagaggactctgatcactggcatggcttctggtagcattgtagcttttaatatagattttaatcggtggcattatgagcatcagaacagatactgaagataaaggaagaaccaaaagccaagttaaagctgagagcacaagtgctgcatggaaaggcaatatctctggtggaaaaaactcgtctacatcgacctccgtttgtacattccatcacacccagcaatagctgtacattgtagtcagcaaccattttactttgtgtgttttttcacgactgaacaccagctgctatcaagcaagcttatatcatgtaaattatatgaattaggagatgttttggtaattatttcatatattgttgtttattgagaaaaggttgtaggatgtgtcacaagagacttttgacaattctgaggaaccttgtgtccagttgttacaaagtttaagctttgaacctaacctgcatcccatttccagcctcttttcaagctgagaaaaaaaaaaaaaaacacgtttgatactttgtacatcagatgcatcttatttaaaagggatacttttgtaaaagtaaaaccttgtataaagaacaaaatgtttcttaattttattgtggagttacaacttgcatgttccttactcctgttggcttgatggaacaggtgcattcacactatgaaacagaaagatctgtccaaggacacagcttgtatgaaagggttgaatttgggctccatcagtaatttttgacattttcaccaaaatatagtttgcactttttaatctaaagtcatcccttctgagtgaaatttgctcataaagcatttggatactaagccattatttgccattttgggtactttatacaaagaaaattcagccctaccctgcataatttgaagacacagcagaaagggggcttagggatgaggtcctggtttttcttgtataaataggagtcatgggcgttagttctgtagtaataacttcccagcacctggacatctcttccagagttatcccactggcttggtgtgtatacattaggggaggataatctgatgctaactttttttttctctttggttcttgaatagcttagtttctttaataacaagtcaaactttattacaacaataactgaagttattcttttaggttctcgtgaaattctcactgaaagccacattcttagcctaaggcatttcatcttttatgatataaaatgatggctatcaaatgattttccatacattgtactgatcaagttatacacccaggggtatatacactttcttcatgtttcttctttgtatatttggtgactgtatcgtcatagatgtacatattgtgtcggtagggctatgaggcatgttacaggaatgtaattttctcagaatttacactcactcgcagtcatttatttaaaaagataaaacaagataatgggttctttgtattggcactttgcaccagaaacatatcattatttattgatgtgattacttatttgttatccaccttgtactagtaagttttagcactgaattccttcttcactgttgtttgtatttatgaaattctgaaattatggggaatcagcgtaatgattaagttattcatcaccaggctgtaagcaatatcttgagtttgtagcttagaattgggaggatacttaacatctggaagacaagttcatttcatcttgagatcatggtgaaatattttggatatataaattccttaagctattgtaaccatgttttattgcaaagatgtaaaatatgccagatgtgtgtgagttggaaatcaaaaaaagaaaaataaaatatgcaaagaattc

SEQ ID NO: 187769 - DNA, 1560 bp, Artificial Sequence
  derived and/or modified sequence
aggattgcgaagaatggctccctttggggagactttacagaaaacatttaggcccagtggttctcagcacccctgcccagctcatcgctcccgtggtggtggccaaggggactctctccatcaccacgacagaaatctacttcgaggtagatgaggatgattctgccttcaagaagatcgacacgaaagttcttgcatacactgagggacttcacggaaaatggatgttcagcgagatacgagctgtattttcaagacgttaccttctacaaaacactgctttggaagtatttatggcaaaccgaacctcagttatgtttaatttccctgatcaagcaacagtaaaaaaagttgtctatagcttgcctcgggttggagtagggaccagctatggtctgccacaagccaggaggatatcattggccactcctcgacagctttataaatcttccaatatgactcagcgctggcaaagaagggaaatttcaaacttcgaatatttgatgttccttaatactattgcaggacggacatataatgatctgaaccaatatccagtgtttccgtgggtgttaaccaactatgaatcagaagagttggacctgactcttccaggaaacttcagggatctatcaaagccaattggtgctttgaaccccaagagagctgtgttttatgcagagcgttatgagacatgggaagatgatcaaagcccaccctaccattataatacccattattcaacagcaacatctactttatcctggcttgttcgaattgaacctttcacaaccttcttcctcaatgcaaatgatggaaaatttgatcatccagatcgaaccttctcatccgttgcaaggtcttggagaactagtcagagagatacttctgatgtaaaggaactaattccagagttctactacctaccagagatgtttgtcaacagtaatggatataatcttggagtcagagaagatgaagtagtggtaaatgatgttgatcttcccccttgggcaaaaaacctgaagactttgtgcggatcaacaggatggccctagaaagtgaatttgtttcttgccaacttcatcagtggatcgaccttatatttggctataagcagcgaggaccagaagcagttcgtgctctgaatgtttttcactacttgacttatgaaggctctgtgaacctggatagtatcactgatcctgtgctcagggaggccatggaggcacagatacagaactttggacagacgccatctcagttgcttattgagccacatccgcctcggagctctgccatgcacctgtgtttccttccacagagtccgctcatgtttaaagatcagatgcaacaggatgtgataatggtgctgaagtttccttcaaattctccagtaacccatgtggcagccaacactctgccccacttgaccatccccgcagtggtgacagtgacttgcagccgactctttgcagtgaatagatggcacaacacagtaggcctcagaggagctccaggatactccttggatcaagcccaccatcttcccattgaaat

SEQ ID NO: 187770 - DNA, 8840 bp, Artificial Sequence
  derived and/or modified sequence
atggctagtgagaagcctgggcctggcccaggtctggagcctcagcccgtgggactgatcgccgtgggggcagccggtggcggaggagggggttccggagggggtggaactggaggttctggaatgggcgagttacgcggagccagcgggtccggcagtgtaatgcttcccgcagggatgataaacccttctgtacctatcagaaatattcggatgaaattcgctgtgctaattggtctgatccaggtcggcgaggtcagcaaccgcgacatcgtggaaaccgtgcttaatttgctagtaggcggagaattcgatttggaaatgaattttatcatccaggacgctgaatcaatcacatgtatgacagagctcctagagcattgcgacgttacttgccaggctgaaatctggagtatgttcactgctattttgcggaagtccgtgcggaatctccagactagcactgaggttgggctcatagaacaggttttgctgaaaatgagcgccgttgatgatatgatcgcagatctcttagtcgatatgctgggggtactggcgtcctattccattaccgttaaagagcttaagctcctcttctctatgcttcgaggagaaagtggaatatggcctaggcacgctgtgaagctcctgagtgttctgaatcagatgcctcagaggcatggcccagacactttcttcaacttcccaggctgttcagccgctgcaatcgccctgcctcctatcgccaagtggccttaccagaacggtttcacactgaatacatggttccgcatggaccctctcaataacataaacgtggataaggacaaaccctatctgtattgcttcaggacttccaagggggtcgggtacagcgcacatttcgtggggaactgtcttattgtcacctccctgaagagcaaaggcaagggcttccagcactgcgtgaaatatgacttccaaccccgaaagtggtacatgattagcatcgtccatatctataataggtggcgcaacagcgaaatacggtgttacgtgaatggacagctcgtaagttatggagacatggcctggcatgtcaacactaacgactcgtacgataagtgctttctgggttccagcgagactgccgacgcaaatcgcgtcttctgcggccagctgggggctgtttacgtgttttccgaggcgctgaatccagctcagattttcgccatccatcagctcgggcctgggtataaaagcacatttaagtttaagtcagaaagtgacatccacttggccgaacaccataaacaggttctctacgatggaaagctggcctcatctatcgcctttacctacaatgccaaagcaaccgacgcccagctctgcctagagagttcgcccaaagagaacgcttccatatttgtacactcaccccacgctctgatgctgcaggacgtgaaagctatcgtgacacacagtatccactccgctatccactctatcggtgggatccaggtcttgttcccacttttcgcacagctcgacaaccgtcaactcaacgactcgcaagtggagaccaccgtgtgtgcaacccttttggcgttcttggtggaactcttgaagtcctctgtggctatgcaggagcagatgttgggaggaaaggggtttttggtgatcgggtacctgctggaaaagtcctctcgtgtgcacatcaccagagccgtgctggaacagttcctgtcatttgcaaagtatctggacggcctcagtcacggtgccccattacttaagcaactgtgcgatcacattctgtttaatcccgctatttggattcacacccctgcaaaagtgcagctatctctgtatacctacttatctgccgagtttatcgggacagccaccatctacacaactatcagacgtgtcggtactgtgctgcagctgatgcacaccctgaaatattattactgggtgataaaccccgctgactcttcgggcataacccctaagggcctcgacggcccaaggccctcgcagaaggaaattattagtctaagagcatttatgttgttattcctgaaacagttgattctgaaggatcgtggggtcaaggaagacgagctccagagtatcctgaattatctgctgaccatgcacgaggatgaaaacatacatgacgtcctgcagctgctggtcgcactcatgtcagagcatcccgcatctatgatccccgcatttgaccaacgaaacgggatcagagtgatttacaaactcctcgcctctaaatctgagtccatttgggtacaggctctgaaggtcctgggttatttcctgaaacacctgggccataagcggaaagtagagataatgcatactcacagcctgtttacgctgcttggcgaacggctgatgctgcataccaacacagtgactgttacaacttataacacgctgtacgagatcttaaccgaacaggtgtgcactcaggtggtgcacaaacctcatcccgagcccgacagcactgtcaagatccaaaacccaatgatcctcaaggtcgttgccacacttctaaagaatagcacaccctccgctgagctgatggaagtacgtcgcctatttttatctgatatgattaagttattcagtaacagccgcgagaatagacgctgtttgttgcagtgtagtgtgtggcaggattggatgttctcactgggatacattaaccctaaaaattccgaagagcagaagattacagaaatggtttacaatattttcaggattttattgtaccacgccattaagtacgaatgggggggttggcgcgtgtgggttgacaccctaagcatcgcccacagtaaagttacatatgaggctcataaagagtatttagccaaaatgtatgaagaataccagcggcaagaagaagagaatataaaaaagggaaagaaaggcaatgtttctactatatccggtctctcctctcagacgactggggctaaggggggaatggagataagagagatcgaagacctgtctcaaagccaaagccccgagagcgaaacagactatccggtatcaaccgatacacgggacctcctcatgtcaaccaaggtctctgacgatatactgggaaactctgatcggccaggaagcggagtgcacgttgaagttcacgacctcttggtggacataaaggcagaaaaagtggaggctactgaggtgaagctggacgacatggatctgagtccagaaacactggttggcggagaaaacggcgctttagtggaagtcgaaagcttgctggacaacgtatattccgccgcagtggagaagctacaaaataacgtacacggcagtgtagggataatcaaaaagaatgaggaaaaggataatgggcctctgattacactggctgacgagaaagaagatcttccaaactcctccacctcgtttctctttgataagatccctaagcaggaggagaaacttctgccagaactgagttcaaaccatatcattcctaacatacaggatactcaggtgcacctgggggtgtcagacgacctcggcctactggcccatatgaccggtagtgtggatctgacatgtacgagtagcataatagaggagaaagagttcaagatacacactacctccgatgggatgtcaagcattagcgaaagggacctggcctcgtctactaagggcctggagtatgccgagatgactgcaacaacactggagacagaaagtagctcctcaaagatcgttcccaacattgatgcgggatccatcattagcgatactgagagaagcgacgatgggaaagagtccggcaaggaaatcagaaaaatccaaactaccacaacgacacaagccgtgcaggggagatccatcacccagcaggaccgggatctcagggtcgacctgggattccgaggtatgccaatgactgaggagcaacggagacagttcagccctggaccacgcacgactatgttccgcatccccgagtttaaatggtctcctatgcaccagagacttctcaccgatctcctattcgccctggagacagatgttcacgtctggagaagccactccacgaagtctgtcatggactttgtgaactccaatgagaacataatttttgtacacaacaccatacacctgatctcccaaatggtggacaacatcatcattgcctgtgggggtatcttacccctgctcagcgccgcaacgtcgccgaccgtgagtaaaacggagttagaaaacattgaagtgacacaaggaatgtctgcagagaccgccgtcacctttctgtccaggctcatggctatggttgacgtgctggtgttcgccagcagcttgaatttttcagagattgaagcagagaaaaatatgtctagtgggggactgatgcgccagtgtctgcgcttagtgtgttgcgtagctgtcagaaactgcctggagtgcaggcagcggcagcgggaccgcggaaataaaagctctcacgggagctccaagcctcaggaagtgccccagagcgtgacggccaccgccgcatccaagacgccccttgagaacgtgcctgggaacttgtcaccaatcaaagaccccgaccgcttgttacaggatgtggacatcaatcgattgcgggcagtggtgtttcgggatgtcgatgatagcaaacaggcccagttcctggcactcgctgtcgtctattttatcagtgtgcttatggtgtccaagtacagggacatactggaaccccagagagagaccacaaggactggcagtcagccagggcgtaacatccgtcaggagatcaactcaccgacgtcaaccgtcgtggtgattccatccattccccaccctagtctgaatcatggttttctggccaagctgatacctgagcagagttttggccacagtttctacaaagagacccctgccgcattccctgatacgattaaagagaaagagacccccacccccggagaagatattcaggtcgaatcaagcattcctcatactgatagcgggatcggagaggagcaggtcgcgtcaatactgaacggagccgaacttgagacctccaccgggccagacgcaatgtctgaactcctgtcgacgctgagcagtgaggtaaaaaaatctcaagagtccctaactgagaacccgagtgagactttaaaaccagcgacctcaatctcatctatctcacagaccaagggtattaacgtgaaggagattcttaaatccttggtagctgctcccgtcgagattgctgagtgcgggcctgaaccaatcccgtatcccgaccccgctctcaaacgtgaaactcaggcaattttgcctatgcagtttcatagcttcgatcgttcagtagtggtcccagtcaaaaaacccccacccggaagtctggccgttacaactgtgggggctaccacagcgggatcaggtctgccgaccgggtcgacgtccaacatttttgcagcaaccggtgccacacccaagtctatgataaacaccactggtgctgtggacagcgggagttcttcgtcatcttcaagcagctcttttgttaatggggctacctctaaaaacttgcctgcagtccaaacagtagccccaatgcctgaagacagtgcagaaaatatgagtattacagctaagttagaacgcgcattggagaaagtggccccactgttgcgtgaaatcttcgtggatttcgcccctttcctgtcgcggacactgctgggcagccacggtcaggagctgctgattgagggtctggtctgtatgaaatctagcacctctgttgtggaattagtgatgctgttatgttcacaagagtggcagaatagtatccaaaagaacgccggactcgccttcattgagttaatcaacgagggacgactgctctgtcacgcgatgaaggatcatatcgtgagagtggctaatgaagcagagtttattttgaatcgccagagagctgaggatgtgcacaaacacgcggagtttgaatctcagtgcgcccagtatgccgcagaccgaagagaggaagaaaagatgtgcgaccacctgatctctgctgctaagcacagggaccacgtcacggcaaatcaattaaagcagaagatcttgaatatcctgactaataaacatggagcgtggggtgctgtcagccatagccaactgcacgatttttggcgcctggactattgggaagacgacctgcggaggcgcaggaggtttgtccgaaacgcctttggctctactcacgcagaagcgctgctgaaggccgctattgagtacgggaccgaggaggacgtggtgaagagcaaaaaaaccttcagatcccaggccatagtgaatcagaacgctgaaactgaacttatgctggaaggtgatgatgatgcagtgtctctgctgcaggagaaagagattgataatctcgcgggacccgtcgtcctcagtacacctgcacagctgatagcccctgtggtagttgcaaaggggactttatccatcacaaccaccgaaatctattttgaggtcgacgaggatgactcagctttcaagaagattgatacgaaagtgctcgcctacacagaaggcctgcacggtaagtggatgttctctgagattagggccgtgttctcacgtcggtatttactacagaacacggctctggaggtcttcatggctaaccgcacctcagtcatgtttaacttccccgaccaagccactgtaaaaaaagtggtttacagtctcccaagagtcggtgtcgggaccagttacggattaccacaggcaagacgcatttccctggcaaccccgaggcagttgtacaaatcatcaaatatgacccagcggtggcagcgcagagagatctccaacttcgagtacctgatgttcttaaacacgatagctggaagaacctacaatgacttgaaccagtacccggtcttcccatgggtactgacgaattatgagtctgaggagctcgacctcacgctcccaggcaatttccgcgacctgtctaagcccattggcgctctcaaccccaaacgggctgtcttttacgctgagagatacgagacatgggaagacgatcagtctcctccgtaccactataatacccactattcaaccgccacctcgaccctgtcctggctcgttaggattgagccttttactacattctttctgaacgccaacgatggtaagtttgatcacccagatagaacttttagctccgttgctcggtcctggagaactagccaaagggatacatccgacgtgaaggaactcatacccgaattctattatttgcccgagatgttcgtgaatagcaatgggtataatctcggcgtacgggaggatgaagttgtcgtgaatgacgtggatctgcctccgtgggccaaaaagcccgaagactttgtcaggattaatagaatggctctggagtccgaattcgtatcatgtcagctgcaccagtggatagatcttatcttcgggtacaagcaacgcggaccagaggctgtacgtgcacttaacgtgtttcattacctcacctacgagggctcagtaaacctggactcgattacggatccagtgctgcgcgaggccatggaagcccaaatccagaattttggacagactccaagtcagctcctcatagaacctcatcccccacgctcatctgccatgcacctttgtttcctgccacagagcccccttatgttcaaggaccaaatgcaacaagacgtgatcatggtactgaagttcccttccaatagtcccgtgacacacgtcgccgcaaacacactcccccacctgaccatccccgcagtcgttacagttacctgcagtcgtctgtttgctgtgaacaggtggcacaatacagttggattgagaggtgctccgggatacagcctagaccaggctcaccatttgcccatagaaatggaccctttgatcgctaataacagtggcgttaacaagcgccagattaccgatctggttgatcagagtatccagattaatgcccattgttttgtggtcactgccgataatcgctatatcctaatctgcggcttctgggacaagtcctttagggtatactccactgagaccggaaagcttacccaaatcgtcttcggtcactgggatgtggtgacctgtctggcaaggtctgaatcctacatcggtggggactgctacatcgtttccgggtcacgcgacgccactctgcttctttggtattggagcggcaggcatcatattataggagataacccaaatagcagcgactatccagcgcctagggctgtgttaactggtcacgaccatgaggtcgtctgcgtcagcgtgtgtgcggagctgggacttgtaattagcggcgctaaagagggtccctgcctcgtgcataccatcactggtgacctcctccgtgccctggaggggccagagaattgcttattcccacgcctgataagcgtgagctcagaaggccattgcataatatactatgaacggggaagatttagtaacttttctatcaacggtaagctactggcccagatggagatcaatgactctacaagagctatattgttatcttccgacgggcagaatctggtgaccgggggagataatggcgtcgtcgaggtatggcaggcctgcgattttaaacagctctatatttatcccggttgtgatgcagggatccgagcaatggacttgagccacgatcagcgcacccttatcaccgggatggccagcggctcgatcgttgcctttaacattgatttcaacaggtggcactacgagcatcagaataggtacta

SEQ ID NO: 187771 - DNA, 8840 bp, Artificial Sequence
  derived and/or modified sequence
atggcgtctgagaagccaggcccaggtccaggccttgagccacagccagtaggcctgatagccgttggtgccgctggcggtggaggaggcggaagcggtggaggcggtaccggtggatctggaatgggagagctcaggggcgcaagcggctccggctctgtaatgcttcccgcagggatgatcaatccgagtgtaccaattagaaatattcgcatgaagttcgcagtcctgatcggcctgatccaagtcggagaggtctctaatagagacatcgtggaaaccgtgttaaacctcctggtgggaggggaatttgaccttgagatgaactttatcatccaggatgccgaatctatcacctgtatgactgagctgctggagcattgcgacgttacgtgtcaggctgagatctggtcgatgtttaccgccattctccgtaagagcgtccggaacctccagacatctaccgaggtcgggctgatcgaacaggtgctgctaaaaatgagtgctgtggatgatatgatcgctgacctgctcgtggatatgctgggagttcttgcttcctatagtattacggtcaaggaactgaaactgctattctctatgctgagaggcgagtccgggatctggccaaggcatgccgtgaaactgctgtctgtgctcaaccagatgccacagaggcatggccctgacacattcttcaattttccaggctgtagcgctgctgcaatcgcactacccccaatagcaaaatggccataccagaatggattcacattaaatacatggttccgtatggaccctctgaacaatatcaatgtcgacaaagacaagccctacctgtactgctttagaacgagcaaaggtgtgggctactccgcccacttcgttggcaactgcttgatcgtgacatccctcaagtctaaagggaagggattccagcattgcgtgaaatacgattttcaaccaaggaagtggtatatgatttctatagtccatatttacaaccggtggaggaattctgagatccggtgttacgtaaatggacaacttgtgtcgtatggggacatggcctggcacgtaaatacaaacgactcttacgacaagtgcttcctgggctcttctgagaccgccgacgccaacagagttttttgtgggcaactgggagccgtgtatgtgttctcagaagcccttaatccggctcagatctttgccatccatcagctgggcccaggttataaatccactttcaagttcaaatccgagagcgatatccacctagctgagcatcacaagcaagtgctttacgatggtaagttagccagtagcattgccttcacatacaatgctaaggccacagacgcccagttgtgcctggaatcttctcctaaagagaatgcaagcatttttgtgcactctccacacgccttgatgctccaggacgtgaaagccatcgtgacccattcaatccattccgcaatacactctattggcggtattcaggtcctttttcctctattcgcccagttggataacagacaacttaatgactcgcaagtggagaccacggtgtgcgccacattgcttgcttttcttgtggagctgttaaagagttctgtcgccatgcaagaacagatgctaggcggaaaggggttcctggtaattggctaccttctggaaaagtcaagccgtgtgcacatcactcgagccgtcctcgagcagtttctgagtttcgccaagtatttagatgggttgtcccacggcgcacctctcctcaagcagctttgcgatcatatactgttcaatcccgctatctggatccacaccccagccaaggtgcagctttctctgtatacctatctgtccgcagagttcattggaacagccacgatctacaccacaatccggagagtgggaacagtacttcagctgatgcatactcttaaatattactactgggtcataaaccccgctgacagctccggcatcacgccgaaaggactggatggcccacgaccttcgcagaaggagataattagtttgcgagccttcatgttgttgttcctgaagcaactgattctgaaggatcgcggtgtgaaggaggatgagctacagtcaattctcaactacctgctcacaatgcacgaggatgagaacatccacgacgtattacagttactggttgctctgatgtccgaacatccagcgagcatgatcccagcttttgaccagagaaatggaattagagtgatatacaaattgctggcttcaaagagcgagtcaatctgggtgcaagccctgaaggttcttggctattttctgaaacatctcggacacaagagaaaagttgaaatcatgcacactcacagtctctttaccttgctaggggaacgcctaatgctccacacaaataccgtcactgtcaccacatacaataccctctatgaaatcctgaccgagcaggtgtgtacccaagtagtccataagcctcatcctgaacctgattccactgtcaaaatccagaaccctatgatcctgaaagtggtggccaccctgctgaagaattctactcccagcgccgagctgatggaagttagacggctcttcctttctgatatgatcaaattattcagcaattccagggaaaatcgtcgatgcctcttacagtgctctgtatggcaggactggatgttttcacttggctacattaatcctaagaactcagaggaacagaaaatcactgaaatggtgtataacatttttcggattctgctttaccacgccattaaatacgagtggggaggctggcgggtctgggtggacactctttcaattgcccactccaaagtcacatacgaagcccacaaggagtacctcgcaaaaatgtatgaggagtatcagcgacaggaggaggaaaacatcaagaagggcaaaaaggggaatgtgtccacaatcagcgggctgtcttctcagacgacgggcgcaaagggcggaatggagattagggagatcgaggatctttcccagagccaaagtccggagtctgagactgactaccctgtttcaaccgacacacgagatctcctcatgagcaccaaagtcagcgatgatatcctcgggaatagtgatcggcctggctctggggtgcatgttgaagtacatgatttacttgtcgatattaaggccgaaaaggtggaagctaccgaagtgaaactggacgacatggacctcagtcccgaaaccctggtgggcggtgagaatggggctctggtggaagtcgagtcactgctcgacaacgtgtattctgcagctgtggaaaagttgcagaacaacgtgcacgggtctgtgggaatcatcaaaaaaaatgaggagaaagataacggccctcttattactctggccgacgagaaagaggacttgccaaacagctctacctctttcttattcgataaaatccccaagcaggaggagaaactgctgccagaactttcgagtaaccacattattcccaacatacaggacacacaagttcacttgggggtgtcagacgacctagggttactggcccatatgaccggcagcgtggatttaacttgcacatcttccatcattgaggagaaagagttcaaaattcatactacaagcgacggtatgtctagcatctccgaaagggatctagcctccagcacaaagggccttgagtatgccgaaatgaccgcaactactcttgaaaccgaaagttcctctagcaaaatcgtgccaaatatagatgccggaagtattatctccgatacagaacgctcagacgacggaaaagaatccggaaaggaaattcgcaagatccagaccaccaccacgactcaagctgtccaggggcgatccattacacagcaggaccgcgacctgcgtgtcgatctgggctttcggggaatgccaatgacggaagagcaaaggcggcagtttagtcctggcccacggaccacaatgttcaggatcccagagtttaaatggagtcctatgcaccagcgtttactcactgatctgctgttcgctctagagaccgatgtgcacgtgtggcgtagtcatagcactaaatcagtaatggatttcgtcaattccaacgaaaacattatctttgtacataatacaattcaccttatttcacagatggtggacaatataatcatcgcatgtggtggtattctgccgctactcagcgctgccacctctcctaccggctctaagactgaactggaaaatatcgaggtcacccagggtatgtcagcggaaaccgcagttacttttctttcccgtctcatggctatggtcgacgtcctcgtgtttgcctccagcctaaatttcagcgagattgaggcagaaaagaatatgtcttctggtggactgatgagacaatgtctgaggctagtctgttgcgtggccgtaaggaactgccttgagtgtcgccagagacagcgagaccgtggaaataaatcctctcacggtagcagcaagccccaagaggtgccccaaagtgttactgccacagccgcttctaaaacacctttagaaaacgtgcccggtaatcttagtcccatcaaagacccagatcgactgctgcaggacgtagacataaatcgcctccgcgctgttgtctttagggacgttgacgactctaaacaggcgcaatttctggcccttgccgtggtttattttattagtgtgctgatggtgagtaagtacagagatatcctggagccccagcgagagacaactcgtactggtagccaacctggacgtaacattcgacaggagataaacagccctacaagcacagtggtcgttattcccagtatacctcacccttctctcaatcatggatttttggcaaagctgatccccgagcaaagtttcggtcactctttttataaggaaacaccagctgctttccccgatactattaaagagaaggagacccctacccctggcgaagatatccaggtggagtcttcaatcccccatactgacagcggcataggtgaggaacaggtggcctctatccttaacggggctgagttggagactagtaccgggcctgacgccatgagcgagctgctgagcactctgtcgagcgaagtcaagaaaagccaggaaagtttgactgaaaatccttccgagacactgaaaccagctacctctatttcctccatcagtcagaccaaaggcattaatgtcaaagaaatcctaaagtccctcgttgccgctccagtggagattgcagagtgtgggcctgaacctataccttatccggacccagccctgaaacgcgagacacaggctattctgcctatgcagttccattcttttgatcggtctgtggtggttcctgttaagaagcccccaccgggaagcctagcagtcaccacagtgggggctaccacagctggaagtgggctgcctaccggttccacatctaatatattcgccgctactggcgcaacaccaaagtcaatgattaacactacaggggctgttgactccggctcatcatcatcatcctcatccagctctttcgtaaatggagcaacttccaagaacctgccggcagtgcagactgtggcgcctatgcctgaagattcagccgaaaacatgtccatcactgctaaactcgagcgtgcccttgaaaaagtggcgcctcttttgcgggaaatctttgtcgatttcgcccctttcctgagcagaaccctgctgggctctcatgggcaggagctcctgattgagggcctcgtgtgtatgaaatcttccacttcagtagtggagctggtaatgttgctgtgttctcaggagtggcagaacagtatccagaaaaacgccggtctggccttcattgagctgatcaacgagggtcggctgctttgtcacgccatgaaggaccatatcgttagagtggccaatgaagctgagttcatcctgaacaggcaacgagcagaggacgtgcacaagcacgcagagtttgagtcccaatgcgcccagtatgctgcagaccgaagagaagaagagaagatgtgtgaccacttaataagtgcagcaaagcaccgggaccatgtgactgccaaccagctgaagcagaaaattctgaatattttgacaaacaagcatggagcatggggtgcagtcagccatagccagctgcatgacttctggcgcttggactattgggaagacgatctcaggcggagacggagattcgtcaggaatgcattcggttcaacccatgctgaagccctcctaaaggctgccattgaatacggaaccgaagaggatgtagtcaaaagtaaaaagacattcaggagtcaagccatcgtcaaccagaatgccgagacagagcttatgctcgagggggacgacgatgccgtgtccctgttacaagaaaaggagatcgacaacctcgccggacccgtggtgctctccacccccgcacagcttatagccccagtggtggtggccaaaggtaccctctccattaccaccaccgagatttatttcgaagtggatgaagacgattccgcctttaaaaaaatagacaccaaagtcttggcatacacagaggggctgcacggcaagtggatgttttctgagattagagctgtgttctctcgccgatacttgctgcagaataccgctttggaggtttttatggcaaatcggactagtgtgatgttcaactttcccgaccaggcgactgtaaagaaagtggtctactctttacccagagtcggagtgggaaccagttacggactacctcaggcaagacgcatttccctcgccacccccagacagctgtacaagtctagcaatatgacacagcgatggcaacggagagagatttctaacttcgaatatttgatgttcttgaacaccatcgcagggcgtacgtacaacgatctgaatcaatatccggtgttcccttgggtcctcacgaactacgagtccgaggaactggaccttacattgccaggaaatttcagggacctttcgaagcccatcggcgcactgaaccccaaaagagcggtgttttacgcagaaagatatgagacctgggaggatgaccaatctccaccctatcattacaacactcactactccaccgctaccagtaccctttcttggctggtccgaatcgagccttttacgacattctttctcaacgcaaatgacgggaagttcgatcatccggatcggactttctccagcgtggctcgctcttggcggacaagtcagcgggatacctccgatgttaaagaactaataccagaattctattatctgcccgaaatgtttgtgaactcaaatggatataacctgggtgtaagagaggatgaggtagtggtgaacgacgtggatctgccaccttgggctaagaaacccgaagactttgttagaattaatagaatggcactggaatcagagttcgttagctgccagctccaccagtggattgacctcatctttggttataaacagcgaggcccagaagccgtaagggccttaaatgtgttccactaccttacttacgagggctctgtgaacctcgactccattaccgatccggtgctaagagaagccatggaggcccagattcagaatttcggccagaccccctctcagctgctgatcgaaccccaccctccacggagctccgcaatgcacctgtgttttcttccacagtcacctctaatgttcaaggatcaaatgcaacaggacgtgataatggtcctaaaatttccctctaattcaccagtaacccatgtggccgcaaatactctcccccaccttacgatcccggctgtcgtgactgtcacctgctcccggctcttcgccgttaacaggtggcacaacactgtgggattacgcggagctcccggatacagcttagaccaggcgcatcacctgccaattgagatggatccgctaatcgctaataattccggagtaaataagaggcagatcacagatctggtcgaccaatcaattcaaatcaacgcgcattgctttgtggtgaccgcagacaacaggtacattctcatctgcggcttctgggacaagtctttccgggtgtatagcaccgaaactggcaagctgacacagattgtgttcggccactgggacgtcgtcacctgcctagccagaagtgagtcttacattggaggggactgctatattgtttcaggttccagggatgcaacgctgttattatggtactggagtgggaggcaccacattataggagacaatcccaactcctctgattatcccgctcccagagcagtcctcaccgggcatgaccacgaggtggtctgtgtgtcagtttgcgctgagttaggcctggtcatctccggagccaaagaaggcccatgtttagtgcacactataactggcgacctgctgcgcgctctggaagggccagaaaactgtctgtttcccaggttgatatctgtctcttccgaagggcactgcattatatattatgagcggggtagattcagcaacttctccattaatggtaaactcctggctcagatggaaattaatgattcgacacgagccattttactctcgagcgacggccagaatctcgtgactgggggtgataacggggtggtcgaagtttggcaggcgtgtgacttcaagcaactctacatctatcctggttgtgacgccggaattagagcaatggacctgtcacatgaccagcggaccctgatcacggggatggcttcaggcagcatcgtagcattcaatatcgacttcaatagatggcattacgagcaccagaacagatacta

SEQ ID NO: 187772 - DNA, 8840 bp, Artificial Sequence
  derived and/or modified sequence
atggcctctgagaaacccggacccggacccggactggagcctcagccagttggcctgattgccgtcggagctgcaggtggcggtggcggtggcagtgggggaggtgggacgggcggttctggaatgggagaacttcgcggtgcctctggatctgggtccgtaatgctccccgcaggcatgatcaacccaagtgtgcccatccggaatatccgcatgaaattcgctgtgctgatcggtctgatccaggtcggggaagtgtccaacagggacattgttgaaacagtgctgaacctgctcgtggggggagaatttgacctggaaatgaattttatcatccaagacgcggagtccataacgtgcatgactgagttgttggagcactgtgatgtaacgtgccaggcggaaatttggagcatgtttacagccatcctgcgcaaatctgtgaggaacctccaaacctcaacagaggtgggcctcattgaacaagtccttctgaagatgtcagcggtagacgatatgattgcagacctcttagtagacatgttgggggtactggcaagctactctatcacagtgaaagaactgaagttgctgtttagcatgctgcgcggtgaatccgggatatggcctcgtcacgctgtaaagctcctgagcgtactgaatcagatgccccagcggcacgggcctgacactttctttaattttcccggttgcagtgccgcagctatagctctccccccaatagccaaatggccctatcaaaacggtttcactctcaatacctggttcagaatggaccctttaaacaacataaacgtagacaaggacaaaccctatttatactgttttaggacttctaagggggttggatacagcgcccatttcgtcggtaactgtttaatcgtaacatctctcaaaagtaagggtaagggattccagcattgtgtgaaatacgactttcagcctcgcaagtggtacatgatctccatcgtacacatctacaatcggtggcgcaattctgaaatcaggtgctacgtgaacggacaactggtgtcatacggcgacatggcctggcacgttaacaccaatgatagctatgacaaatgtttcctggggtctagcgagacggcagatgccaatcgcgtcttttgcggacagctcggtgcggtatacgtgtttagcgaggctttgaaccccgctcagatcttcgctatccaccagctggggccaggctacaagtccactttcaagttcaaaagtgaatccgacatccatctggccgagcatcacaagcaggtcttatacgacggcaagctggcatcaagtatcgcttttacgtacaacgcaaaggcgacagatgcccagctgtgcctggagagcagcccaaaggaaaacgcatctatcttcgtgcactctccccatgcactcatgctccaggacgtgaaagctattgtaactcatagtatccattctgccattcactcaatcgggggaattcaggtgctgtttccactgtttgcccagttagacaaccgacagctgaacgattcacaggtggagacgacagtgtgcgccactctcttggctttcctggtcgaactcctgaagagtagcgtggcaatgcaagaacaaatgctcgggggtaaaggctttctggtcattggataccttctggagaagtctagtagagtacacattactcgcgctgtgctggaacagttcctgtccttcgctaagtatttggacggtctaagccatggtgcacctctcttgaaacagctttgtgaccacatcctctttaacccagccatttggatccatacccccgcaaaggtgcagttatccctgtatacatacctgtccgccgaatttatcggcacagccactatctatacaactatccgaagagtggggacagtgctacagctgatgcatacgttgaagtattactactgggtgattaaccctgccgactcctccgggattaccccaaagggcctcgatggccctcgtcctagccaaaaagagattatttctctgcgggcattcatgctgctttttctgaaacagctgatcctgaaggatcggggagtgaaagaggacgagctgcagtctattttaaattatctgcttacgatgcacgaggacgagaatatccacgatgtattgcagttgctcgtggctttaatgagcgaacacccagcttctatgatacctgccttcgaccagcgcaatggcatccgagtgatctacaaactgcttgccagcaaaagcgagtcaatctgggttcaggccctgaaggtgctaggttatttcctcaaacatttgggacataagagaaaggttgagatcatgcacacccactctctgttcaccctgcttggcgagcggctgatgttgcatacaaacactgtaacagttaccacatacaacaccttgtatgaaatcctgactgagcaggtatgcacacaggttgtccacaagccacaccccgagccagactccactgtgaagatccagaatccaatgatcctcaaggtagtagcaacactgctcaagaactccactccctccgctgaactaatggaagtgcggagactgttcttatcagatatgattaagttgttctcaaatagccgggaaaataggcgctgtctgctccagtgcagcgtgtggcaggattggatgttctccctcggctacatcaatcccaagaacagtgaagagcaaaaaattactgagatggtctacaatatctttcgaatcctgttatatcatgctatcaagtacgagtggggaggctggcgggtgtgggtggacaccttaagcatcgcgcattcgaaagtcacatacgaggctcataaggaatacctggcgaaaatgtacgaggaataccagcgtcaggaagaagaaaatatcaagaaaggaaaaaaagggaatgtaagcacaatcagcgggctgtcttcccagacaaccggggcaaaagggggaatggaaatcagggaaatcgaagatttgagccaatcgcagagccctgagtccgagacggattaccctgttagcactgacaccagagacctgcttatgtctacgaaagtcagcgacgatatccttggaaattccgaccgtccaggctccggagtccacgtggaagtgcacgatctgcttgtggatattaaggcagaaaaagttgaggccactgaggtcaaactggacgacatggatcttagtccagagaccttggtcggcggtgaaaatggcgctctggtggaggtggagtccctgcttgacaatgtttactctgccgctgtggagaagctgcagaacaatgtccacggatctgtgggcataataaagaaaaatgaagaaaaagacaacgggccactcattacactagcggacgagaaagaggacctgccgaactcctccacctctttcctgttcgacaagattcctaagcaggaggagaaactgctgccagagctctcctcgaatcacataatcccaaacatacaggatacgcaggtgcatctgggtgtttcagacgatctagggcttctggcccacatgactggcagcgttgacctgacgtgtactagctcaattattgaagaaaaagagttcaaaattcataccactagcgacggcatgagtagtatttccgagcgggatctggcctcaagcacaaagggactggagtatgcagaaatgaccgcaaccactttagagacagaaagctcctcatccaagatcgtgcctaacattgatgccggtagcattatatctgacactgagcgtagtgacgacggaaaggaatctgggaaggagattcggaaaatccagaccaccactactacccaggcagtgcaggggagatccatcacccagcaggaccgcgacctgagggtggatcttgggttccggggaatgcccatgaccgaggagcagaggcgccagttctcgcccggtcccaggacgacaatgtttcgtatccccgagttcaaatggtccccaatgcaccagaggcttctcacagacttactgttcgctttagaaacagatgtgcacgtgtggagaagccattcaaccaagagtgttatggacttcgtgaattccaacgagaacattatctttgtgcataacactattcacctaatttctcagatggtggataacataataattgcctgcggagggatcctacccctcctttccgctgccacaagccctacagtgagtaagacggaattggaaaacatcgaggtcacacaaggaatgagcgcagaaaccgcggtcacgttcctctctaggctaatggccatggtagatgttctagtctttgctagctctcttaacttcagtgaaatcgaagccgaaaagaatatgtcgagcggcggactgatgcgccagtgcctgcggttagtgtgctgcgtggccgtccgcaattgtttagagtgtcgccagcggcagcgtgatcggggaaataagtcaagtcatggatcctctaaaccacaggaggttccgcagagcgttaccgcaaccgctgcctccaaaactccactggaaaacgttcccggtaatctgtctcccatcaaagatccggacaggcttttgcaggacgtggacattaaccggctgcgggcagtcgtctttcgcgacgttgacgacagtaagcaggctcagttcctagctttggccgtggtctacttcatctcagtactgatggtaagcaagtaccgagacatcctggagccacagagagaaactacccgtacaggtagccagcccggaagaaatattagacaggaaatcaactctccaacgagcactgtggttgtgataccctccatacctcacccttctcttaatcatggattcctggcaaaactgatccccgagcagtcttttggccattccttctataaggaaacccctgcagccttcccagacaccattaaggaaaaagaaaccccaacccctggggaggacattcaagttgagtcttccattccgcacactgattccggaatcggtgaagaacaagtggcgagtatactcaacggcgctgaattggagaccagcaccggacctgatgcaatgagtgaattgctgtctactctgtctagtgaagtgaaaaaatctcaggagtcgctgacagaaaacccgtccgaaactcttaaaccagccacttccatatccagtatttctcagacaaagggaattaatgtgaaggaaatcctgaaatcattggtcgcggcaccagtggaaattgccgagtgcgggcctgaaccaattccttacccagaccctgctctgaagcgcgagacccaggctattctcccaatgcaattccacagcttcgatagaagtgtcgtcgtgcccgtcaaaaaaccccctccaggctcactagcagtgaccactgtgggtgcaacgacagccggatctgggctgcccaccgggtccacctccaatatcttcgccgcaaccggggcaactcctaaatcaatgatcaacacaaccggagcagtggattccggctcgtcatctagttcatcatcatcctcatttgttaacggcgcaaccagcaaaaaccttcccgctgtgcagactgtggcccctatgccagaagacagcgcggagaatatgagtatcacagccaaactagagagggccctggagaaggtggctcccctgctcagggagatatttgttgattttgccccattcctcagtaggaccctcctgggcagccatggacaagaactactgattgaggggttagtgtgcatgaagagttccacatcagtcgtggaactggttatgctcttgtgtagccaggagtggcagaatagcatccaaaaaaatgcaggcctggcttttatcgagctcattaacgaaggcaggcttctgtgccacgccatgaaggaccatattgtgcgcgtggccaacgaggcagagtttatactgaaccgacagagagccgaggacgtccataagcacgccgaattcgagtctcagtgtgcacagtatgccgctgacagacgggaagaggagaaaatgtgcgaccatctgatcagcgccgcaaagcatcgcgaccacgtcacagctaaccagctgaaacagaaaattctaaacattcttacaaacaaacacggggcatggggggctgtgtcacactcacagctgcatgacttctggcgtttagactactgggaggatgatcttcggaggaggcgaagattcgttcgaaacgccttcggatcaacacatgctgaggctcttttaaaggccgcaatcgagtatggcacagaagaggatgtggttaagagtaaaaagacttttaggtctcaggccattgtgaatcaaaacgcagagaccgaattaatgctggaaggtgacgacgatgcagtcagcctcctccaggagaaggagatcgacaatcttgccggtccagtggtgttaagcaccccagcccagcttattgctccagttgtggtagccaagggaactctcagcattactaccacagagatttattttgaagtggatgaggatgactccgcattcaaaaaaatcgacactaaagtgctcgcatacactgagggactccatggcaaatggatgttcagcgaaatacgtgcggtattcagcagaaggtacctgctgcaaaacacagccctggaggtgtttatggcaaatcgcaccagtgtcatgtttaattttccagaccaggccacagtgaaaaaggtcgtctatagcttgccgagagtgggagtgggaacctcgtatggactccctcaggccaggcgaatttctttggcgaccccgaggcagctctataaatcaagcaatatgacccagcggtggcagaggcgcgaaatatcaaactttgaatacctgatgttcctcaatacgatcgccggacgcacatataacgatctgaatcagtacccagtattcccttgggtcctgacaaactatgagtctgaggaactggatctcacactgccaggcaactttagggatttgtctaagccaatcggtgcattgaatcccaaacgtgccgtgttctatgcagagagatatgaaacttgggaggatgaccaaagcccaccatatcattacaatactcactactccaccgccacgagcacactatcctggctcgtcaggatcgaaccattcactacattcttcctgaacgccaacgacggtaagtttgaccatcccgatcggacattctccagcgtcgcacgatcttggcgtacttcacagcgcgatacatctgatgtaaaagagcttattcccgagttctactatctgcccgagatgttcgtcaatagtaatggatacaaccttggagtgagggaagacgaggtggtagtgaatgacgtggatctccccccttgggcgaaaaaacctgaggatttcgtgcgcataaacagaatggccctggagtccgaatttgtgagctgccagctgcaccagtggattgacctgattttcggttataaacagagagggcctgaggcagttagagccttgaacgtttttcattacctgacctatgaaggctccgtcaacctcgactctatcaccgatccagtgctgcgcgaagctatggaggctcagattcagaatttcggccagactccatcccaattgctcattgagccccatccccctcggtcctcggccatgcacctgtgcttcctgcctcagagtcctctcatgttcaaggatcagatgcagcaagacgtgattatggtcctcaagttcccgtcaaattctccagtcacacacgtggcggctaacaccctgccccatctaaccatccctgccgtcgtgacagtgacttgcagcagacttttcgccgtcaatcggtggcacaatacggtggggctgcgcggtgcaccagggtactctctcgatcaagcccatcatctgccaatcgaaatggatcccctaatcgcaaacaactcaggtgtgaacaagcggcagattactgatctcgtggatcagagtattcagataaacgcccactgctttgtggtcacagcagacaatcgctacattctcatttgtggtttttgggacaagtcatttcgagtgtacagtactgaaacgggcaagctgacccaaattgttttcggtcattgggatgtagtgacctgcctcgccagaagtgagagctacatcggcggagattgttacattgtgtcaggcagcagggacgctacactgcttctttggtactggtcgggaagacatcatataataggcgacaaccccaacagctccgattatccggcacccagagcggttcttaccggacacgatcacgaggtggtctgcgtgtctgtatgtgcagagctcggcctggtgataagtggtgctaaagagggcccatgtttggttcataccattacaggggatctcttgcgggctttggaagggccagagaactgcctatttcccagattgatatcagtgtccagcgaaggccactgcatcatttattatgagaggggccgtttcagtaactttagcatcaacgggaaacttttggcccagatggaaattaacgattctactagggccatcttactatctagtgacggtcagaacctcgtcacaggcggagataacggcgtagtggaggtctggcaggcttgtgacttcaagcaactgtatatctaccctggctgcgatgctgggattcgcgctatggatctgtcccatgatcagcgcacactgatcaccggcatggcaagtggcagcatcgtggcgttcaatatcgatttcaacaggtggcattacgagcatcaaaatagatacta

SEQ ID NO: 187773 - DNA, 8841 bp, Artificial Sequence
  derived and/or modified sequence
atggccagcgagaagcccggccccggccccggcctggagccccagcccgtgggcctgatcgccgtgggcgccgccggcggcggcggcggcggcagcggcggcggcggcaccggcggcagcggcatgggcgagctgagaggcgccagcggcagcggcagcgtgatgctgcccgccggcatgatcaaccccagcgtgcccatcagaaacatcagaatgaagttcgccgtgctgatcggcctgatccaggtgggcgaggtgagcaacagagacatcgtggagaccgtgctgaacctgctggtgggcggcgagttcgacctggagatgaacttcatcatccaggacgccgagagcatcacctgcatgaccgagctgctggagcactgcgacgtgacctgccaggccgagatctggagcatgttcaccgccatcctgagaaagagcgtgagaaacctgcagaccagcaccgaggtgggcctgatcgagcaggtgctgctgaagatgagcgccgtggacgacatgatcgccgacctgctggtggacatgctgggcgtgctggccagctacagcatcaccgtgaaggagctgaagctgctgttcagcatgctgagaggcgagagcggcatctggcccagacacgccgtgaagctgctgagcgtgctgaaccagatgccccagagacacggccccgacaccttcttcaacttccccggctgcagcgccgccgccatcgccctgccccccatcgccaagtggccctaccagaacggcttcaccctgaacacctggttcagaatggaccccctgaacaacatcaacgtggacaaggacaagccctacctgtactgcttcagaaccagcaagggcgtgggctacagcgcccacttcgtgggcaactgcctgatcgtgaccagcctgaagagcaagggcaagggcttccagcactgcgtgaagtacgacttccagcccagaaagtggtacatgatcagcatcgtgcacatctacaacagatggagaaacagcgagatcagatgctacgtgaacggccagctggtgagctacggcgacatggcctggcacgtgaacaccaacgacagctacgacaagtgcttcctgggcagcagcgagaccgccgacgccaacagagtgttctgcggccagctgggcgccgtgtacgtgttcagcgaggccctgaaccccgcccagatcttcgccatccaccagctgggccccggctacaagagcaccttcaagttcaagagcgagagcgacatccacctggccgagcaccacaagcaggtgctgtacgacggcaagctggccagcagcatcgccttcacctacaacgccaaggccaccgacgcccagctgtgcctggagagcagccccaaggagaacgccagcatcttcgtgcacagcccccacgccctgatgctgcaggacgtgaaggccatcgtgacccacagcatccacagcgccatccacagcatcggcggcatccaggtgctgttccccctgttcgcccagctggacaacagacagctgaacgacagccaggtggagaccaccgtgtgcgccaccctgctggccttcctggtggagctgctgaagagcagcgtggccatgcaggagcagatgctgggcggcaagggcttcctggtgatcggctacctgctggagaagagcagcagagtgcacatcaccagagccgtgctggagcagttcctgagcttcgccaagtacctggacggcctgagccacggcgcccccctgctgaagcagctgtgcgaccacatcctgttcaaccccgccatctggatccacacccccgccaaggtgcagctgagcctgtacacctacctgagcgccgagttcatcggcaccgccaccatctacaccaccatcagaagagtgggcaccgtgctgcagctgatgcacaccctgaagtactactactgggtgatcaaccccgccgacagcagcggcatcacccccaagggcctggacggccccagacccagccagaaggagatcatcagcctgagagccttcatgctgctgttcctgaagcagctgatcctgaaggacagaggcgtgaaggaggacgagctgcagagcatcctgaactacctgctgaccatgcacgaggacgagaacatccacgacgtgctgcagctgctggtggccctgatgagcgagcaccccgccagcatgatccccgccttcgaccagagaaacggcatcagagtgatctacaagctgctggccagcaagagcgagagcatctgggtgcaggccctgaaggtgctgggctacttcctgaagcacctgggccacaagagaaaggtggagatcatgcacacccacagcctgttcaccctgctgggcgagagactgatgctgcacaccaacaccgtgaccgtgaccacctacaacaccctgtacgagatcctgaccgagcaggtgtgcacccaggtggtgcacaagccccaccccgagcccgacagcaccgtgaagatccagaaccccatgatcctgaaggtggtggccaccctgctgaagaacagcacccccagcgccgagctgatggaggtgagaagactgttcctgagcgacatgatcaagctgttcagcaacagcagagagaacagaagatgcctgctgcagtgcagcgtgtggcaggactggatgttcagcctgggctacatcaaccccaagaacagcgaggagcagaagatcaccgagatggtgtacaacatcttcagaatcctgctgtaccacgccatcaagtacgagtggggcggctggagagtgtgggtggacaccctgagcatcgcccacagcaaggtgacctacgaggcccacaaggagtacctggccaagatgtacgaggagtaccagagacaggaggaggagaacatcaagaagggcaagaagggcaacgtgagcaccatcagcggcctgagcagccagaccaccggcgccaagggcggcatggagatcagagagatcgaggacctgagccagagccagagccccgagagcgagaccgactaccccgtgagcaccgacaccagagacctgctgatgagcaccaaggtgagcgacgacatcctgggcaacagcgacagacccggcagcggcgtgcacgtggaggtgcacgacctgctggtggacatcaaggccgagaaggtggaggccaccgaggtgaagctggacgacatggacctgagccccgagaccctggtgggcggcgagaacggcgccctggtggaggtggagagcctgctggacaacgtgtacagcgccgccgtggagaagctgcagaacaacgtgcacggcagcgtgggcatcatcaagaagaacgaggagaaggacaacggccccctgatcaccctggccgacgagaaggaggacctgcccaacagcagcaccagcttcctgttcgacaagatccccaagcaggaggagaagctgctgcccgagctgagcagcaaccacatcatccccaacatccaggacacccaggtgcacctgggcgtgagcgacgacctgggcctgctggcccacatgaccggcagcgtggacctgacctgcaccagcagcatcatcgaggagaaggagttcaagatccacaccaccagcgacggcatgagcagcatcagcgagagagacctggccagcagcaccaagggcctggagtacgccgagatgaccgccaccaccctggagaccgagagcagcagcagcaagatcgtgcccaacatcgacgccggcagcatcatcagcgacaccgagagaagcgacgacggcaaggagagcggcaaggagatcagaaagatccagaccaccaccaccacccaggccgtgcagggcagaagcatcacccagcaggacagagacctgagagtggacctgggcttcagaggcatgcccatgaccgaggagcagagaagacagttcagccccggccccagaaccaccatgttcagaatccccgagttcaagtggagccccatgcaccagagactgctgaccgacctgctgttcgccctggagaccgacgtgcacgtgtggagaagccacagcaccaagagcgtgatggacttcgtgaacagcaacgagaacatcatcttcgtgcacaacaccatccacctgatcagccagatggtggacaacatcatcatcgcctgcggcggcatcctgcccctgctgagcgccgccaccagccccaccgtgagcaagaccgagctggagaacatcgaggtgacccagggcatgagcgccgagaccgccgtgaccttcctgagcagactgatggccatggtggacgtgctggtgttcgccagcagcctgaacttcagcgagatcgaggccgagaagaacatgagcagcggcggcctgatgagacagtgcctgagactggtgtgctgcgtggccgtgagaaactgcctggagtgcagacagagacagagagacagaggcaacaagagcagccacggcagcagcaagccccaggaggtgccccagagcgtgaccgccaccgccgccagcaagacccccctggagaacgtgcccggcaacctgagccccatcaaggaccccgacagactgctgcaggacgtggacatcaacagactgagagccgtggtgttcagagacgtggacgacagcaagcaggcccagttcctggccctggccgtggtgtacttcatcagcgtgctgatggtgagcaagtacagagacatcctggagccccagagagagaccaccagaaccggcagccagcccggcagaaacatcagacaggagatcaacagccccaccagcaccgtggtggtgatccccagcatcccccaccccagcctgaaccacggcttcctggccaagctgatccccgagcagagcttcggccacagcttctacaaggagacccccgccgccttccccgacaccatcaaggagaaggagacccccacccccggcgaggacatccaggtggagagcagcatcccccacaccgacagcggcatcggcgaggagcaggtggccagcatcctgaacggcgccgagctggagaccagcaccggccccgacgccatgagcgagctgctgagcaccctgagcagcgaggtgaagaagagccaggagagcctgaccgagaaccccagcgagaccctgaagcccgccaccagcatcagcagcatcagccagaccaagggcatcaacgtgaaggagatcctgaagagcctggtggccgcccccgtggagatcgccgagtgcggccccgagcccatcccctaccccgaccccgccctgaagagagagacccaggccatcctgcccatgcagttccacagcttcgacagaagcgtggtggtgcccgtgaagaagcccccccccggcagcctggccgtgaccaccgtgggcgccaccaccgccggcagcggcctgcccaccggcagcaccagcaacatcttcgccgccaccggcgccacccccaagagcatgatcaacaccaccggcgccgtggacagcggcagcagcagcagcagcagcagcagcagcttcgtgaacggcgccaccagcaagaacctgcccgccgtgcagaccgtggcccccatgcccgaggacagcgccgagaacatgagcatcaccgccaagctggagagagccctggagaaggtggcccccctgctgagagagatcttcgtggacttcgcccccttcctgagcagaaccctgctgggcagccacggccaggagctgctgatcgagggcctggtgtgcatgaagagcagcaccagcgtggtggagctggtgatgctgctgtgcagccaggagtggcagaacagcatccagaagaacgccggcctggccttcatcgagctgatcaacgagggcagactgctgtgccacgccatgaaggaccacatcgtgagagtggccaacgaggccgagttcatcctgaacagacagagagccgaggacgtgcacaagcacgccgagttcgagagccagtgcgcccagtacgccgccgacagaagagaggaggagaagatgtgcgaccacctgatcagcgccgccaagcacagagaccacgtgaccgccaaccagctgaagcagaagatcctgaacatcctgaccaacaagcacggcgcctggggcgccgtgagccacagccagctgcacgacttctggagactggactactgggaggacgacctgagaagaagaagaagattcgtgagaaacgccttcggcagcacccacgccgaggccctgctgaaggccgccatcgagtacggcaccgaggaggacgtggtgaagagcaagaagaccttcagaagccaggccatcgtgaaccagaacgccgagaccgagctgatgctggagggcgacgacgacgccgtgagcctgctgcaggagaaggagatcgacaacctggccggccccgtggtgctgagcacccccgcccagctgatcgcccccgtggtggtggccaagggcaccctgagcatcaccaccaccgagatctacttcgaggtggacgaggacgacagcgccttcaagaagatcgacaccaaggtgctggcctacaccgagggcctgcacggcaagtggatgttcagcgagatcagagccgtgttcagcagaagatacctgctgcagaacaccgccctggaggtgttcatggccaacagaaccagcgtgatgttcaacttccccgaccaggccaccgtgaagaaggtggtgtacagcctgcccagagtgggcgtgggcaccagctacggcctgccccaggccagaagaatcagcctggccacccccagacagctgtacaagagcagcaacatgacccagagatggcagagaagagagatcagcaacttcgagtacctgatgttcctgaacaccatcgccggcagaacctacaacgacctgaaccagtaccccgtgttcccctgggtgctgaccaactacgagagcgaggagctggacctgaccctgcccggcaacttcagagacctgagcaagcccatcggcgccctgaaccccaagagagccgtgttctacgccgagagatacgagacctgggaggacgaccagagccccccctaccactacaacacccactacagcaccgccaccagcaccctgagctggctggtgagaatcgagcccttcaccaccttcttcctgaacgccaacgacggcaagttcgaccaccccgacagaaccttcagcagcgtggccagaagctggagaaccagccagagagacaccagcgacgtgaaggagctgatccccgagttctactacctgcccgagatgttcgtgaacagcaacggctacaacctgggcgtgagagaggacgaggtggtggtgaacgacgtggacctgcccccctgggccaagaagcccgaggacttcgtgagaatcaacagaatggccctggagagcgagttcgtgagctgccagctgcaccagtggatcgacctgatcttcggctacaagcagagaggccccgaggccgtgagagccctgaacgtgttccactacctgacctacgagggcagcgtgaacctggacagcatcaccgaccccgtgctgagagaggccatggaggcccagatccagaacttcggccagacccccagccagctgctgatcgagccccacccccccagaagcagcgccatgcacctgtgcttcctgccccagagccccctgatgttcaaggaccagatgcagcaggacgtgatcatggtgctgaagttccccagcaacagccccgtgacccacgtggccgccaacaccctgccccacctgaccatccccgccgtggtgaccgtgacctgcagcagactgttcgccgtgaacagatggcacaacaccgtgggcctgagaggcgcccccggctacagcctggaccaggcccaccacctgcccatcgagatggaccccctgatcgccaacaacagcggcgtgaacaagagacagatcaccgacctggtggaccagagcatccagatcaacgcccactgcttcgtggtgaccgccgacaacagatacatcctgatctgcggcttctgggacaagagcttcagagtgtacagcaccgagaccggcaagctgacccagatcgtgttcggccactgggacgtggtgacctgcctggccagaagcgagagctacatcggcggcgactgctacatcgtgagcggcagcagagacgccaccctgctgctgtggtactggagcggcagacaccacatcatcggcgacaaccccaacagcagcgactaccccgcccccagagccgtgctgaccggccacgaccacgaggtggtgtgcgtgagcgtgtgcgccgagctgggcctggtgatcagcggcgccaaggagggcccctgcctggtgcacaccatcaccggcgacctgctgagagccctggagggccccgagaactgcctgttccccagactgatcagcgtgagcagcgagggccactgcatcatctactacgagagaggcagattcagcaacttcagcatcaacggcaagctgctggcccagatggagatcaacgacagcaccagagccatcctgctgagcagcgacggccagaacctggtgaccggcggcgacaacggcgtggtggaggtgtggcaggcctgcgacttcaagcagctgtacatctaccccggctgcgacgccggcatcagagccatggacctgagccacgaccagagaaccctgatcaccggcatggccagcggcagcatcgtggccttcaacatcgacttcaacagatggcactacgagcaccagaacagatactag

SEQ ID NO: 187774 - DNA, 8841 bp, Artificial Sequence
  derived and/or modified sequence
atggccagcgagaagcccggccccggccccggcctggagccccagcccgtgggcctgatcgccgtgggcgccgccggcggcggcggcggcggcagcggcggcggcggcaccggcggcagcggcatgggcgagctgagaggcgccagcggcagcggcagcgtgatgctgcccgccggcatgatcaaccccagcgtgcccatcagaaacatcagaatgaagttcgccgtgctgatcggcctgatccaggtgggcgaggtgagcaacagagacatcgtggagaccgtgctgaacctgctggtgggcggcgagttcgacctggagatgaacttcatcatccaggacgccgagagcatcacctgcatgaccgagctgctggagcactgcgacgtgacctgccaggccgagatctggagcatgttcaccgccatcctgagaaagagcgtgagaaacctgcagaccagcaccgaggtgggcctgatcgagcaggtgctgctgaagatgagcgccgtggacgacatgatcgccgacctgctggtggacatgctgggcgtgctggccagctacagcatcaccgtgaaggagctgaagctgctgttcagcatgctgagaggcgagagcggcatctggcccagacacgccgtgaagctgctgagcgtgctgaaccagatgccccagagacacggccccgacaccttcttcaacttccccggctgcagcgccgccgccatcgccctgccccccatcgccaagtggccctaccagaacggcttcaccctgaacacctggttcagaatggaccccctgaacaacatcaacgtggacaaggacaagccctacctgtactgcttcagaaccagcaagggcgtgggctacagcgcccacttcgtgggcaactgcctgatcgtgaccagcctgaagagcaagggcaagggcttccagcactgcgtgaagtacgacttccagcccagaaagtggtacatgatcagcatcgtgcacatctacaacagatggagaaacagcgagatcagatgctacgtgaacggccagctggtgagctacggcgacatggcctggcacgtgaacaccaacgacagctacgacaagtgcttcctgggcagcagcgagaccgccgacgccaacagagtgttctgcggccagctgggcgccgtgtacgtgttcagcgaggccctgaaccccgcccagatcttcgccatccaccagctgggccccggctacaagagcaccttcaagttcaagagcgagagcgacatccacctggccgagcaccacaagcaggtgctgtacgacggcaagctggccagcagcatcgccttcacctacaacgccaaggccaccgacgcccagctgtgcctggagagcagccccaaggagaacgccagcatcttcgtgcacagcccccacgccctgatgctgcaggacgtgaaggccatcgtgacccacagcatccacagcgccatccacagcatcggcggcatccaggtgctgttccccctgttcgcccagctggacaacagacagctgaacgacagccaggtggagaccaccgtgtgcgccaccctgctggccttcctggtggagctgctgaagagcagcgtggccatgcaggagcagatgctgggcggcaagggcttcctggtgatcggctacctgctggagaagagcagcagagtgcacatcaccagagccgtgctggagcagttcctgagcttcgccaagtacctggacggcctgagccacggcgcccccctgctgaagcagctgtgcgaccacatcctgttcaaccccgccatctggatccacacccccgccaaggtgcagctgagcctgtacacctacctgagcgccgagttcatcggcaccgccaccatctacaccaccatcagaagagtgggcaccgtgctgcagctgatgcacaccctgaagtactactactgggtgatcaaccccgccgacagcagcggcatcacccccaagggcctggacggccccagacccagccagaaggagatcatcagcctgagagccttcatgctgctgttcctgaagcagctgatcctgaaggacagaggcgtgaaggaggacgagctgcagagcatcctgaactacctgctgaccatgcacgaggacgagaacatccacgacgtgctgcagctgctggtggccctgatgagcgagcaccccgccagcatgatccccgccttcgaccagagaaacggcatcagagtgatctacaagctgctggccagcaagagcgagagcatctgggtgcaggccctgaaggtgctgggctacttcctgaagcacctgggccacaagagaaaggtggagatcatgcacacccacagcctgttcaccctgctgggcgagagactgatgctgcacaccaacaccgtgaccgtgaccacctacaacaccctgtacgagatcctgaccgagcaggtgtgcacccaggtggtgcacaagccccaccccgagcccgacagcaccgtgaagatccagaaccccatgatcctgaaggtggtggccaccctgctgaagaacagcacccccagcgccgagctgatggaggtgagaagactgttcctgagcgacatgatcaagctgttcagcaacagcagagagaacagaagatgcctgctgcagtgcagcgtgtggcaggactggatgttcagcctgggctacatcaaccccaagaacagcgaggagcagaagatcaccgagatggtgtacaacatcttcagaatcctgctgtaccacgccatcaagtacgagtggggcggctggagagtgtgggtggacaccctgagcatcgcccacagcaaggtgacctacgaggcccacaaggagtacctggccaagatgtacgaggagtaccagagacaggaggaggagaacatcaagaagggcaagaagggcaacgtgagcaccatcagcggcctgagcagccagaccaccggcgccaagggcggcatggagatcagagagatcgaggacctgagccagagccagagccccgagagcgagaccgactaccccgtgagcaccgacaccagagacctgctgatgagcaccaaggtgagcgacgacatcctgggcaacagcgacagacccggcagcggcgtgcacgtggaggtgcacgacctgctggtggacatcaaggccgagaaggtggaggccaccgaggtgaagctggacgacatggacctgagccccgagaccctggtgggcggcgagaacggcgccctggtggaggtggagagcctgctggacaacgtgtacagcgccgccgtggagaagctgcagaacaacgtgcacggcagcgtgggcatcatcaagaagaacgaggagaaggacaacggccccctgatcaccctggccgacgagaaggaggacctgcccaacagcagcaccagcttcctgttcgacaagatccccaagcaggaggagaagctgctgcccgagctgagcagcaaccacatcatccccaacatccaggacacccaggtgcacctgggcgtgagcgacgacctgggcctgctggcccacatgaccggcagcgtggacctgacctgcaccagcagcatcatcgaggagaaggagttcaagatccacaccaccagcgacggcatgagcagcatcagcgagagagacctggccagcagcaccaagggcctggagtacgccgagatgaccgccaccaccctggagaccgagagcagcagcagcaagatcgtgcccaacatcgacgccggcagcatcatcagcgacaccgagagaagcgacgacggcaaggagagcggcaaggagatcagaaagatccagaccaccaccaccacccaggccgtgcagggcagaagcatcacccagcaggacagagacctgagagtggacctgggcttcagaggcatgcccatgaccgaggagcagagaagacagttcagccccggccccagaaccaccatgttcagaatccccgagttcaagtggagccccatgcaccagagactgctgaccgacctgctgttcgccctggagaccgacgtgcacgtgtggagaagccacagcaccaagagcgtgatggacttcgtgaacagcaacgagaacatcatcttcgtgcacaacaccatccacctgatcagccagatggtggacaacatcatcatcgcctgcggcggcatcctgcccctgctgagcgccgccaccagccccaccggcagcaagaccgagctggagaacatcgaggtgacccagggcatgagcgccgagaccgccgtgaccttcctgagcagactgatggccatggtggacgtgctggtgttcgccagcagcctgaacttcagcgagatcgaggccgagaagaacatgagcagcggcggcctgatgagacagtgcctgagactggtgtgctgcgtggccgtgagaaactgcctggagtgcagacagagacagagagacagaggcaacaagagcagccacggcagcagcaagccccaggaggtgccccagagcgtgaccgccaccgccgccagcaagacccccctggagaacgtgcccggcaacctgagccccatcaaggaccccgacagactgctgcaggacgtggacatcaacagactgagagccgtggtgttcagagacgtggacgacagcaagcaggcccagttcctggccctggccgtggtgtacttcatcagcgtgctgatggtgagcaagtacagagacatcctggagccccagagagagaccaccagaaccggcagccagcccggcagaaacatcagacaggagatcaacagccccaccagcaccgtggtggtgatccccagcatcccccaccccagcctgaaccacggcttcctggccaagctgatccccgagcagagcttcggccacagcttctacaaggagacccccgccgccttccccgacaccatcaaggagaaggagacccccacccccggcgaggacatccaggtggagagcagcatcccccacaccgacagcggcatcggcgaggagcaggtggccagcatcctgaacggcgccgagctggagaccagcaccggccccgacgccatgagcgagctgctgagcaccctgagcagcgaggtgaagaagagccaggagagcctgaccgagaaccccagcgagaccctgaagcccgccaccagcatcagcagcatcagccagaccaagggcatcaacgtgaaggagatcctgaagagcctggtggccgcccccgtggagatcgccgagtgcggccccgagcccatcccctaccccgaccccgccctgaagagagagacccaggccatcctgcccatgcagttccacagcttcgacagaagcgtggtggtgcccgtgaagaagcccccccccggcagcctggccgtgaccaccgtgggcgccaccaccgccggcagcggcctgcccaccggcagcaccagcaacatcttcgccgccaccggcgccacccccaagagcatgatcaacaccaccggcgccgtggacagcggcagcagcagcagcagcagcagcagcagcttcgtgaacggcgccaccagcaagaacctgcccgccgtgcagaccgtggcccccatgcccgaggacagcgccgagaacatgagcatcaccgccaagctggagagagccctggagaaggtggcccccctgctgagagagatcttcgtggacttcgcccccttcctgagcagaaccctgctgggcagccacggccaggagctgctgatcgagggcctggtgtgcatgaagagcagcaccagcgtggtggagctggtgatgctgctgtgcagccaggagtggcagaacagcatccagaagaacgccggcctggccttcatcgagctgatcaacgagggcagactgctgtgccacgccatgaaggaccacatcgtgagagtggccaacgaggccgagttcatcctgaacagacagagagccgaggacgtgcacaagcacgccgagttcgagagccagtgcgcccagtacgccgccgacagaagagaggaggagaagatgtgcgaccacctgatcagcgccgccaagcacagagaccacgtgaccgccaaccagctgaagcagaagatcctgaacatcctgaccaacaagcacggcgcctggggcgccgtgagccacagccagctgcacgacttctggagactggactactgggaggacgacctgagaagaagaagaagattcgtgagaaacgccttcggcagcacccacgccgaggccctgctgaaggccgccatcgagtacggcaccgaggaggacgtggtgaagagcaagaagaccttcagaagccaggccatcgtgaaccagaacgccgagaccgagctgatgctggagggcgacgacgacgccgtgagcctgctgcaggagaaggagatcgacaacctggccggccccgtggtgctgagcacccccgcccagctgatcgcccccgtggtggtggccaagggcaccctgagcatcaccaccaccgagatctacttcgaggtggacgaggacgacagcgccttcaagaagatcgacaccaaggtgctggcctacaccgagggcctgcacggcaagtggatgttcagcgagatcagagccgtgttcagcagaagatacctgctgcagaacaccgccctggaggtgttcatggccaacagaaccagcgtgatgttcaacttccccgaccaggccaccgtgaagaaggtggtgtacagcctgcccagagtgggcgtgggcaccagctacggcctgccccaggccagaagaatcagcctggccacccccagacagctgtacaagagcagcaacatgacccagagatggcagagaagagagatcagcaacttcgagtacctgatgttcctgaacaccatcgccggcagaacctacaacgacctgaaccagtaccccgtgttcccctgggtgctgaccaactacgagagcgaggagctggacctgaccctgcccggcaacttcagagacctgagcaagcccatcggcgccctgaaccccaagagagccgtgttctacgccgagagatacgagacctgggaggacgaccagagccccccctaccactacaacacccactacagcaccgccaccagcaccctgagctggctggtgagaatcgagcccttcaccaccttcttcctgaacgccaacgacggcaagttcgaccaccccgacagaaccttcagcagcgtggccagaagctggagaaccagccagagagacaccagcgacgtgaaggagctgatccccgagttctactacctgcccgagatgttcgtgaacagcaacggctacaacctgggcgtgagagaggacgaggtggtggtgaacgacgtggacctgcccccctgggccaagaagcccgaggacttcgtgagaatcaacagaatggccctggagagcgagttcgtgagctgccagctgcaccagtggatcgacctgatcttcggctacaagcagagaggccccgaggccgtgagagccctgaacgtgttccactacctgacctacgagggcagcgtgaacctggacagcatcaccgaccccgtgctgagagaggccatggaggcccagatccagaacttcggccagacccccagccagctgctgatcgagccccacccccccagaagcagcgccatgcacctgtgcttcctgccccagagccccctgatgttcaaggaccagatgcagcaggacgtgatcatggtgctgaagttccccagcaacagccccgtgacccacgtggccgccaacaccctgccccacctgaccatccccgccgtggtgaccgtgacctgcagcagactgttcgccgtgaacagatggcacaacaccgtgggcctgagaggcgcccccggctacagcctggaccaggcccaccacctgcccatcgagatggaccccctgatcgccaacaacagcggcgtgaacaagagacagatcaccgacctggtggaccagagcatccagatcaacgcccactgcttcgtggtgaccgccgacaacagatacatcctgatctgcggcttctgggacaagagcttcagagtgtacagcaccgagaccggcaagctgacccagatcgtgttcggccactgggacgtggtgacctgcctggccagaagcgagagctacatcggcggcgactgctacatcgtgagcggcagcagagacgccaccctgctgctgtggtactggagcggcagacaccacatcatcggcgacaaccccaacagcagcgactaccccgcccccagagccgtgctgaccggccacgaccacgaggtggtgtgcgtgagcgtgtgcgccgagctgggcctggtgatcagcggcgccaaggagggcccctgcctggtgcacaccatcaccggcgacctgctgagagccctggagggccccgagaactgcctgttccccagactgatcagcgtgagcagcgagggccactgcatcatctactacgagagaggcagattcagcaacttcagcatcaacggcaagctgctggcccagatggagatcaacgacagcaccagagccatcctgctgagcagcgacggccagaacctggtgaccggcggcgacaacggcgtggtggaggtgtggcaggcctgcgacttcaagcagctgtacatctaccccggctgcgacgccggcatcagagccatggacctgagccacgaccagagaaccctgatcaccggcatggccagcggcagcatcgtggccttcaacatcgacttcaacagatggcactacgagcaccagaacagatactag

SEQ ID NO: 187775 - protein, 204 aa, Artificial Sequence
  derived and/or modified sequence
MATASPSVFLLMVNGQVESAQFPEYDDLYCKYCFVYGQDWAPTAGLEEGISQITSKSQDVRQALVWNFPIDVTFKSTNPYGWPQIVLSVYGPDVFGNDVVRGYGAVHVPFSPGRHKRTIPMFVPESTSKLQKFTSWFMGRRPEYTDPKVVAQGEGREVTRVRSQGFVTLLFNVVTKDMRKLGYDTGPSDTQGVLGPSPPQSFPQ

SEQ ID NO: 187776 - DNA, 615 bp, Artificial Sequence
  derived and/or modified sequence
atggccactgcaagtccctcagtgtttctgttgatggttaacgggcaagtggagagtgcccagtttccagaatacgacgacctgtattgcaagtactgctttgtgtatggccaggactgggcacccaccgccgggctggaagagggtatctctcagataacttccaagtcccaggatgtccgacaggcgctcgtgtggaactttccaatcgacgtcacctttaagtcaacaaacccatatggttggccccagatcgtgctgagtgtgtatggaccagacgtttttggcaatgatgttgtcagagggtatggcgctgtgcacgtccctttttctcctgggaggcacaagaggacgataccgatgtttgttcccgagtctactagtaaattgcagaagttcactagttggttcatggggcggcggccagagtataccgatcctaaagtggtagcacagggggagggtcgggaggtgactcgggtgaggtcgcagggatttgttaccctccttttcaacgtggtgaccaaggacatgcgcaagctcggttacgatactggaccatcagacacacagggcgtgctcggtcctagcccaccacagtcatttcctcagtag

SEQ ID NO: 187777 - DNA, 615 bp, Artificial Sequence
  derived and/or modified sequence
atggccacagcttcaccgagtgttttcttgctgatggtcaatggccaggttgagagcgctcagttcccagaatatgacgatctgtattgcaaatactgttttgtgtatgggcaggattgggccccaacggctggcttggaggaggggattagccagatcacaagtaaaagccaggatgtgcgtcaggctctcgtgtggaacttccccatagatgttacttttaaatcaacaaatccatacggatggccacagatcgtgctgtccgtgtacggaccggatgtctttggaaacgacgtcgtccggggatacggcgccgtacacgtgcctttctctccggggaggcacaagagaacaataccgatgtttgtgcctgagtccactagcaagctgcagaaattcacatcatggtttatgggcagacgacctgagtatacagaccctaaggtcgttgcccagggcgaggggagggaggtgacacgggtgagatcacaggggttcgtcaccctgttgttcaatgtagttactaaagacatgagaaagctaggctacgataccggacctagtgatacccagggcgtcctgggaccaagcccaccacagtcatttccccagtag

SEQ ID NO: 187778 - DNA, 615 bp, Artificial Sequence
  derived and/or modified sequence
atggccacagccagccccagcgtcttcctgctgatggtgaatggccaggtggagagcgcccagtttcctgaatatgatgacctgtactgcaagtactgctttgtgtatggccaggactgggcccccacagctggcctggaggagggcatcagccagatcaccagcaagagccaggatgtgcggcaggccctggtgtggaacttccccattgatgtgaccttcaagagcaccaacccctacggctggccccagatcgtgctgtctgtgtatggcccagatgtgtttggaaatgatgtggtgcggggctatggagctgtgcacgtgcccttcagccctggccgccacaagaggaccatccccatgtttgtgcctgagagcaccagcaagctgcagaagttcacctcctggttcatgggccggcggcctgagtacacagaccccaaggtggtggcccagggcgagggccgggaggtgaccagggtgcgcagccagggctttgtgaccctgctcttcaacgtggtgaccaaggacatgaggaagctgggctatgacaccggccccagcgacacccagggcgtgctgggccccagccccccccagagcttcccccagtag

SEQ ID NO: 187779 - DNA, 615 bp, Artificial Sequence
  derived and/or modified sequence
atggccaccgccagccccagcgtgttcctgctgatggtgaacggccaggtagaatcagcccagttcccagagtatgatgatctctattgtaaatattgctttgtgtacggtcaggattgggccccaaccgcaggtctggaggaaggcattagccagattacctccaaatcccaggacgtacgccaggccttggtgtggaacttccctatcgatgtgacctttaaaagcactaatccttacggatggccccaaatcgtactgtccgtatacggccccgatgtgttcggaaatgacgtagtccgagggtacggcgctgtgcacgtacccttctctcccggacgccacaaacgtactatcccaatgttcgtccccgaaagtactagtaaacttcagaagttcaccagctggtttatgggtaggagacccgaatacacagaccctaaggtggtcgcccagggagagggcagagaggtcacacgcgttcgatcacagggattcgtcaccctgctgtttaatgtcgtgactaaggatatgcgaaaactggggtacgataccggacccagcgacacccaaggggttttaggtccgtcaccgcctcagagctttccacagtag

SEQ ID NO: 187780 - DNA, 615 bp, Artificial Sequence
  derived and/or modified sequence
atggccaccgccagccccagcgtgttcctgctgatggtgaacggccaggtggaatcggcgcagttcccagaatatgacgacttgtattgtaagtactgcttcgtctacggccaggactgggcccctaccgcgggcttagaggaaggcatttcccagatcacttccaagtctcaagacgttcgacaggctttggtatggaacttcccgatcgatgtcacctttaaatcaactaatccttatggctggccacaaattgtcctctcagtctacggcccagacgttttcggcaatgacgttgtcaggggctacggagctgttcacgtaccattttcccctggcaggcacaagaggaccatccctatgtttgtaccggagagcacctccaagctccaaaagtttacttcttggttcatgggcaggcgtcccgagtatacagacccaaaggtagtggctcagggggaaggccgcgaagtgacccgagtcaggtcacaaggattcgtgacgctcctgtttaacgtcgtcaccaaggacatgcggaagctcggctacgacactggcccttccgacacacagggcgttctgggtcccagccctccccagtcatttcctcagtag

SEQ ID NO: 187781 - DNA, 615 bp, Artificial Sequence
  derived and/or modified sequence
atggcaactgcatcacctagtgtgtttcttttaatggttaacgggcaagttgagtcagcccagtttccagaatatgacgatctgtactgtaagtactgcttcgtgtacggtcaggattgggccccaactgccggtctcgaggaaggaatttctcagattacctctaagagtcaggacgtacgacaggccctagtgtggaacttcccgatagacgtgacattcaagtcaactaatccttacggttggccccagattgtcctgtcggtctatgggccagacgtgttcggtaacgacgtggtcagaggttatggcgctgtgcacgtgccttttagcccaggaagacataaacgcaccattcccatgtttgtacccgaaagcacaagcaagctccagaaatttacttcatggttcatggggagaaggcctgagtacactgaccctaaggtggtcgcgcaaggggagggtcgcgaggtcacaagagtccgcagccagggcttcgtcactctgcttttcaacgtagtcacgaaagacatgcgtaagctgggctatgacacgggcccatccgacactcagggtgtcctgggaccctcgccgccacagtcattcccacagtag

SEQ ID NO: 187782 - DNA, 615 bp, Artificial Sequence
  derived and/or modified sequence
atggctaccgcctcaccatcagtgtttttgctgatggtgaacggtcaggtggaatccgcacaattccccgaatacgatgacctgtactgcaaatactgcttcgtttatgggcaggattgggcacctactgctgggctggaggaagggatctcacagattacgtccaagtcacaggatgtgagacaggctttggtatggaattttcctatcgatgtaacctttaaaagcactaatccctatggatggcctcagatcgttctgagtgtatatggccctgatgtcttcggaaacgatgtagtacgcggatatggcgctgtccatgtgcccttttcccccggaagacataaaaggacaattccgatgtttgttccagaaagcacctctaaactgcagaagttcacatcctggtttatgggacgcagaccggagtatacggacccaaaggttgtcgcgcagggcgaaggaagagaggtgacgcgagtgagatcccagggtttcgtgacgctccttttcaacgtggtcactaaagacatgcgcaagttaggctacgatacaggccctagcgatacgcagggtgtgcttggccctagccctcctcagagctttccccagtag

SEQ ID NO: 187783 - DNA, 908 bp, Artificial Sequence
  derived and/or modified sequence
cgcgcactcgcgtggccttcgcgaaggtgtcgctgccaagaaacgtgtcctgcgcgctacgccgtctgtttctagggcaacgccggcgtctcttagcaaccgcgcgcggcctaggtgggtccccccggcacccccagacctgccatggcgaccgcgagtcctagcgtctttctactcatggtcaacgggcaggtggagagcgcccagtttccagagtatgatgacctctactgcaagtactgctttgtgtacggccaggactgggcccccacagcgggtctggaggaggggatctcacagatcacatccaagagccaagatgtgcggcaagcactggtgtggaacttccccattgatgtcacctttaaaagcaccaacccctacggctggccacagatcgtgctcagcgtgtatggaccagatgtgttcgggaacgatgtggttcgaggctatggggccgtgcacgtgcccttctcacctggccggcacaaaaggaccatccccatgtttgtcccagaatctacgtctaaactgcagaagtttacaagctggttcatggggcggcggcccgagtacacagaccccaaggtggtggctcagggtgaaggccgggaagtgacccgtgtccgttctcagggctttgtcaccctcctcttcaacgtggtgaccaaggacatgaggaaactgggctatgacactgggccttctgatacacagggtgtgttggggcccagcccaccccagagcttcccccagtgaaggctccacaggctgcacagtctctgataatgaagggctgccttcccgaagtcagccgctgcccatcggcctgaggggcagcctggtggccagagctgggggcacacagaatagttttgtataataaagtctcattttcagagagccta

SEQ ID NO: 187784 - DNA, 899 bp, Artificial Sequence
  derived and/or modified sequence
ccgcgcgcggcctaggtgggtccccccggcacccccagacctgccatggcgaccgcgagtcctagcgtctttctactcatggtcaacgggcaggtggagagcgcccagtttccagagtatgatgacctctactgcaagtactgctttgtgtacggccaggactgggcccccacagcgggtctggaggaggggatctcacagatcacatccaagagccaagatgtgcggcaagcactggtgtggaacttccccattgatgtcacctttaaaagcaccaacccctacggctggccacagatcgtgctcagcgtgtatggaccagatgtgttcgggaacgatgtggttcgaggctatggggccgtgcacgtgcccttctcacctggccggcacaaaaggaccatccccatgtttgtcccagaatctacgtctaaactgcagaagtttacaagctggttcatggggcggcggcccgagtacacagaccccaaggtggtggctcagggtgaaggccgggaagtgacccgtgtccgttctcagggctttgtcaccctcctcttcaacgtggtgaccaaggacatgaggaaactgggctatgacactgggccttctgatacacagggtgtgttggggcccagcccaccccagagcttcccccagtgaaggctccacaggctgcacagtctctgataatgaagggctgccttcccgaagtcagccgctgcccatcggcctgaggggcagcctggtggccagagctgggggcacacagaatagttttgtataataaagtctcattttcagagagcctactatcacagctccccggaaagctgtcttctctgtccatggcctcacctcacccagggcactggccttggtccacatcaaggggacctgaa

SEQ ID NO: 187785 - DNA, 615 bp, Artificial Sequence
  derived and/or modified sequence
atggccaccgccagccccagcgtgttcctgctgatggtgaacggccaggtggagagcgcccagttccccgagtacgacgacctgtactgcaagtactgcttcgtgtacggccaggactgggcccccaccgccggcctggaggagggcatcagccagatcaccagcaagagccaggacgtgagacaggccctggtgtggaacttccccatcgacgtgaccttcaagagcaccaacccctacggctggccccagatcgtgctgagcgtgtacggccccgacgtgttcggcaacgacgtggtgagaggctacggcgccgtgcacgtgcccttcagccccggcagacacaagagaaccatccccatgttcgtgcccgagagcaccagcaagctgcagaagttcaccagctggttcatgggcagaagacccgagtacaccgaccccaaggtggtggcccagggcgagggcagagaggtgaccagagtgagaagccagggcttcgtgaccctgctgttcaacgtggtgaccaaggacatgagaaagctgggctacgacaccggccccagcgacacccagggcgtgctgggccccagccccccccagagcttcccccagtag

SEQ ID NO: 187786 - protein, 407 aa, Artificial Sequence
  derived and/or modified sequence
MLFDKVKAFSVQLDGATAGVEPVFSGGQAVAGRVLLELSSAARVGALRLRARGRAHVHWTESRSAGSSTAYTQSYSERVEVVSHRATLLAPDTGETTTLPPGRHEFLFSFQLPPTLVTSFEGKHGSVRYCIKATLHRPWVPARRARKVFTVIEPVDINTPALLAPQAGAREKVARSWYCNRGLVSLSAKIDRKGYTPGEVIPVFAEIDNGSTRPVLPRAAVVQTQTFMARGARKQKRAVVASLAGEPVGPGQRALWQGRALRIPPVGPSILHCRVLHVDYALKVCVDIPGTSKLLLELPLVIGTIPLHPFGSRSSSVGSHASFLLDWRLGALPERPEAPPEYSEVVADTEEAALGQSPFPLPQDPDMSLEGPFFAYIQEFRYRPPPLYSEEDPNPLLGDMRPRCMTC

SEQ ID NO: 187787 - DNA, 1224 bp, Artificial Sequence
  derived and/or modified sequence
atgctgttcgacaaggtgaaggccttcagcgtgcagctggacggcgccaccgccggcgtggagcccgtgttcagcggcggccaggccgtggccggcagagtgctgctggagctgagcagcgccgccagagtgggcgccctgagactgagagccagaggcagagcccacgtgcactggaccgagagcagaagcgccggcagcagcaccgcctacacccagagctacagcgagagagtggaggtggtgagccacagagccaccctgctggcccccgacaccggcgagaccaccaccctgccccccggcagacacgagttcctgttcagcttccagctgccccccaccctggtgaccagcttcgagggcaagcacggcagcgtgagatactgcatcaaggccaccctgcacagaccctgggtgcccgccagaagagccagaaaggtgttcaccgtgatcgagcccgtggacatcaacacccccgccctgctggccccccaggccggcgccagagagaaggtggccagaagctggtactgcaacagaggcctggtgagcctgagcgccaagatcgacagaaagggctacacccccggcgaggtgatccccgtgttcgccgagatcgacaacggcagcaccagacccgtgctgcccagagccgccgtggtgcagacccagaccttcatggccagaggcgccagaaagcagaagagagccgtggtggccagcctggccggcgagcccgtgggccccggccagagagccctgtggcagggcagagccctgagaatcccccccgtgggccccagcatcctgcactgcagagtgctgcacgtggactacgccctgaaggtgtgcgtggacatccccggcaccagcaagctgctgctggagctgcccctggtgatcggcaccatccccctgcaccccttcggcagcagaagcagcagcgtgggcagccacgccagcttcctgctggactggagactgggcgccctgcccgagagacccgaggccccccccgagtacagcgaggtggtggccgacaccgaggaggccgccctgggccagagccccttccccctgccccaggaccccgacatgagcctggagggccccttcttcgcctacatccaggagttcagatacagacccccccccctgtacagcgaggaggaccccaaccccctgctgggcgacatgagacccagatgcatgacctgctag

SEQ ID NO: 187788 - DNA, 1224 bp, Artificial Sequence
  derived and/or modified sequence
atgctattcgataaagtgaaggcattctcagtccaactggatggggccaccgccggagtggagccagttttctccggtggtcaggctgttgctgggcgagtgttgcttgaactctcaagcgccgctcgcgttggcgcactgaggctgcgtgccagggggagggcgcacgtgcactggacagagagcaggagtgccggcagctcaacagcatatacccagtcatacagtgaaagggtcgaagtggtcagtcaccgcgccacgctgctggctccagatacaggtgagacgaccactctgccacccgggcgacatgagtttttattctctttccagctcccgccaactctcgtcacctcttttgaggggaaacatggatccgtcaggtactgtatcaaggccacgttgcacagaccctgggtaccagcgcggcgggcgaggaaggtgttcaccgttatagaacccgtggacattaatacccccgccctgcttgctcctcaggctggcgctagggagaaagttgcaaggagctggtattgtaataggggcctagtgtccctttccgccaagatcgaccggaagggctatacccctggagaggtgatccccgttttcgctgaaatcgacaacggatccactagacctgtacttccgcgtgctgctgtggtgcagacccagacgttcatggcacgcggcgcccgaaaacagaagagggcggtagttgcctcactagccggagaaccagttgggcccggtcaaagggcactgtggcagggacgagctctgcggatcccccccgtagggccctccatcctgcactgtcgtgtattacacgtcgattacgcgctaaaggtgtgcgtcgacattcctgggacctcaaaactgctcctcgagcttcccctggtgattggaactataccacttcacccatttggtagccgttcgtctagtgtgggcagccacgccagcttcttgctggattggagactgggtgcgttgccagaacgccctgaggcaccacccgaatactcagaggttgtggcagataccgaggaagccgctctggggcagagcccgtttccactgccccaggatccagatatgtcgctagaaggccctttttttgcgtatatccaggagtttcgataccggccacctccattgtatagcgaagaggacccaaaccctctgctaggggacatgcgaccccggtgcatgacctgttag

SEQ ID NO: 187789 - DNA, 1224 bp, Artificial Sequence
  derived and/or modified sequence
atgctgtttgacaaggtgaaggccttctctgtgcagctggatggagccacagctggggtggagcccgtcttcagcggcggccaggccgtggccggccgggtgctgctggagctgagcagcgctgcccgggtgggcgccctgcggctgcgggcccggggccgggcccacgtgcactggacagagagccgctctgctggcagcagcacagcctacacccagagctacagcgagcgggtggaggtggtgagccaccgggccaccctgctggccccagacacaggagagaccaccaccctgcccccaggaagacatgagttcctgttctccttccagctgccccccaccctggtgaccagctttgagggcaagcacggctctgtgcgctactgcatcaaggccaccctgcaccggccctgggtgcctgcccggcgggccaggaaggtgttcaccgtcatcgagcctgtggacatcaacaccccagccctgctggccccccaggccggggcccgggagaaggtggcccgctcctggtactgcaacagaggcctggtgtccctgagcgccaagattgacaggaagggctacaccccaggagaggtgattcctgtgtttgctgagattgacaatggcagcaccaggcctgtgctgcccagggctgctgtggtgcagacccagaccttcatggcccggggggccaggaagcagaagagagctgtggtggccagcctggccggggagcctgtgggccctggccagagggccctgtggcagggccgggccctgcgcatcccccctgtgggccccagcatcctgcactgccgggtgctgcacgtggactatgccctgaaggtgtgtgtggacatccctggcaccagcaagctgctgctggagctgcccctggtgattggcaccatccccctgcaccccttcggcagccgcagcagctctgtgggcagccacgccagcttcctgctggactggaggctgggcgccctgcctgagaggcctgaggcccctcctgagtacagcgaggtggtggccgacacagaggaggccgccctgggccagagccccttccccctgccccaggaccctgacatgagcctggagggccccttctttgcctacatccaggagttccgctaccggcccccacccctgtacagcgaggaggaccccaaccccctgctgggggacatgaggccccgctgcatgacctgctag

SEQ ID NO: 187790 - DNA, 1224 bp, Artificial Sequence
  derived and/or modified sequence
atgctgttcgacaaggtgaaggccttcagcgtgcagctggacggcgctacagccggcgtggagcccgtcttctccggagggcaggcagtcgcaggccgggtcctactggagctgtcctctgccgctcgcgttggagctctcaggctccgggctcgaggtagggcacacgttcactggaccgagagcagaagtgctgggtctagtacggcctatactcagagctactcagaaagggtggaggtggtgtctcacagagctaccctgctcgctccagatacaggggaaactaccactctgccgcccgggcgccatgaatttctgttctcttttcaattaccgccaacactagttacctcctttgaaggcaaacatggctcggttagatattgcatcaaagccactctgcatcgcccatgggtgcccgctaggcgcgcaagaaaagtgtttactgtgatcgaaccagtagatatcaatacgcctgctctcttagccccccaggctggcgcacgagaaaaagtcgcgcgctcatggtactgtaacagaggtctggtgtccttatctgccaagatcgaccgcaagggctacacccccggggaggtgattcccgtttttgcggagatcgataatggctcgacccgcccggtgttaccaagagctgctgtggtgcagacccagactttcatggctcggggcgctcggaaacagaagagagccgtcgtggcatctctggccggagaaccagtggggcccggacagcgggccctgtggcagggccgcgcactacggatcccccccgtggggccaagtatacttcactgtagagtgctgcatgtagattacgctctcaaggtctgcgttgacatccctggcacttccaaactcttgctcgagctcccacttgtgattggcaccatcccgttgcatcctttcggttcacgcagctctagcgttgggagtcacgcgtccttcctgctcgactggcgtctgggtgctctccccgaaaggcccgaggctccacccgagtacagtgaagtcgttgccgacaccgaagaagccgcgctcggtcagagccccttccctctgccccaagaccctgatatgagtctggaggggccattcttcgcttatattcaagaattccgatacaggccgcctcctctgtactctgaagaagaccccaaccctctgctgggcgacatgcgacctaggtgtatgacttgttag

SEQ ID NO: 187791 - DNA, 1224 bp, Artificial Sequence
  derived and/or modified sequence
atgctatttgacaaggtgaaggctttcagcgtgcagctcgacggcgctacggcgggtgtcgagcctgtgttttccggtggccaggccgtggcaggccgagttctcttagaattatcttctgcagctcgcgttggcgctttgcgcctcagagctcggggtcgcgcacatgtgcattggaccgaatcaaggtctgccggatcaagtactgcttacacgcagtcctactccgagagggtcgaggtggtgagccatagggccacgcttttagcacccgacactggtgagaccactactctacctcctggaaggcacgagttcttgttcagcttccaattgccccctactctggtcacttcttttgagggcaaacacggcagtgtgcgttattgtattaaggccaccttacacagaccctgggttcccgctcgaagagcaagaaaagttttcacagtgattgaaccagtggacattaacaccccagctctgctggccccacaggccggtgcacgggagaaggtcgccaggagctggtactgcaatcggggactggtttcgctatccgccaagattgataggaagggatacactcctggggaagtaataccggtcttcgcagaaatcgataacggttccacccgtcccgtcctgccgcgagcggcagtggtccaaactcaaacattcatggcgagaggcgcacgtaagcaaaagcgagcagttgtcgcgtctctggccggagagcccgtgggacctggccagcgcgcactatggcaaggaagggcccttcgtatacctcctgtgggcccatcaatccttcactgcagagttctgcatgtggattatgccctcaaggtgtgcgtagatatcccaggcacatccaaactgctgttagagttgcctcttgttatcggaactattccattacacccctttggttctcgatcaagctcggtcggctcacatgcaagtttcctgctggattggaggctgggtgctctgcctgagagaccggaagctcccccagagtacagcgaggtcgtggcagataccgaggaagcagccctcggacaaagccctttcccccttccccaggaccccgatatgtccctggaggggccattcttcgcttatatccaggagttcagatacagaccgccacctctgtactcagaggaggatcctaatcccttgcttggtgacatgcggcctagatgcatgacttgttag

SEQ ID NO: 187792 - DNA, 2495 bp, Artificial Sequence
  derived and/or modified sequence
gggattttctgctccggttggtgagcgcgcctgcgcgttgacggcgattttgcgttctgaggctgcagcgtcggcatcttgagctgccggttcgcgagttcgaggccaggttccgcctgtcgtgggttcgcaccccggacgcgatgctattcgacaaggtgaaagcgttctcggtgcagttggacggcgcgaccgcgggcgtcgagcccgtgtttagcggcggccaggccgtggcgggccgggtgctgctggagctgtcaagcgccgcgcgtgtgggtgccctgaggctgcgcgcgcggggccgcgcccacgtgcactggaccgagtcgcgcagcgcgggctcgagcacggcttacacgcagagctacagtgaacgcgtggaggtcgtgagccaccgcgccacgctcctggcgccagataccggggagaccacgacgctgcctcctgggcgccatgagttcctgttcagcttccagctgcccccgaccctggtgacatccttcgagggcaaacacggtagtgtccgctactgtatcaaggccaccctgcaccggccctgggtcccagcacgccgggcaaggaaggtgttcactgtcatcgagcctgtggacatcaacacgccagccctgctggcacctcaagcgggggctcgggaaaaggttgcccgatcctggtactgtaaccgtggcctagtctccctttcggccaagatcgaccgcaagggctacaccccaggagaggtcatccctgtctttgccgagatcgacaacggctccacacgtcctgtgctgcctcgggcagccgtggtgcagacacagacgttcatggcccgaggcgcccgaaagcagaaacgggcagtggtggccagcctcgcgggcgagccggtgggccccgggcagcgggcgctgtggcagggccgggcactgcggatccccccagtgggtccttccatcctgcactgccgcgttctacacgtggactacgcactcaaggtctgtgtggatatcccaggaacgtccaagctgctgctggagctgccactggtgatcggcaccattcccttgcacccttttggcagccgttcctccagcgtgggcagccacgccagcttcctgctggactggaggctgggggccttgccggagcggcctgaggctcctcctgagtactcggaggtggtagccgacactgaggaggcagccttggggcagagccccttcccgcttccgcaggaccccgacatgagccttgaaggcccgttcttcgcctacatccaagagttccgctaccgcccgccacccctgtactctgaggaggatccaaacccactcttgggggacatgaggccgcgctgcatgacttgctgaacggcacagggacccctcgaggaacaaggttgcacaccagctttcagccaccatgactgtggggagtggctggaccaagggctgacctccccgactgcatcaaagttggggaaccaagtctcagagtgaggcgggggcctttcggatatcacatgggacagaggaagagcccggctggaatctgacttacctggaccgctgtccttgtgaggcattgaatgcccagtgcagtatccgagagactgtttaataacctgtcttcccagccaattggtggtgctggaatcccctaggagccttcagtctgggagaaacagagccagacatagacagttccagcatcacagaaccagaagaagagacctgcaactgtgagagtccagacaggaagcagagaaggcgtccttgcggaaagggcattttagctgaggctttggagtacgaataggagctcagcaggcagacgaatgaggaataaaggtcagagaaggtcagagctgagtgacgtttggaatccaccccgtttattgtagaactgggggttcagagggcaggtgcctcagagttgaggccacacagtgaggtctggtgggtgaaaggacccaggaacgaggcgttcaggaaagcaggttgtcagagctatgtggagtctgtgggtggcaggggcagccgctccagcctttgaagactttgaaagccagagattcctggcgcaggcttggacttcctgggagctcctccaagtacccaggggcatcagagctgcctgggtgttacatggcccagggaacccaggttcagggtaggacaggcaagaccagatacccaatgtgcaaagtgaaaacactgggctccctgttaaacgatgaagaattcaagacagtgacagcattacgtcacccctggggacagaggtcagcctaaggtgacacacggggactactgtgcttccggaggctccctgtgtcctggaggagaaaagcattagagggggcagctggacaagctcccaactgcagagtcccagccctggctggggcagggccccggcctgggactcagcatttctgatatgccttaagaattcattctgttttgtacaattattttttaaaagtaaacgtgtgg

SEQ ID NO: 187793 - DNA, 624 bp, Artificial Sequence
  derived and/or modified sequence
atggtggcccccgtgaccggctacagcctgggcgtgagaagagccgagatcaagcccggcgtgagagagatccacctgtgcaaggacgagagaggcaagaccggcctgagactgagaaaggtggaccagggcctgttcgtgcagctggtgcaggccaacacccccgccagcctggtgggcctgagattcggcgaccagctgctgcagatcgacggcagagactgcgccggctggagcagccacaaggcccaccaggtggtgaagaaggccagcggcgacaagatcgtggtggtggtgagagacagacccttccagagaaccgtgaccatgcacaaggacagcatgggccacgtgggcttcgtgatcaagaagggcaagatcgtgagcctggtgaagggcagcagcgccgccagaaacggcctgctgaccaaccactacgtgtgcgaggtggacggccagaacgtgatcggcctgaaggacaagaagatcatggagatcctggccaccgccggcaacgtggtgaccctgaccatcatccccagcgtgatctacgagcacatggtgaagaagctgccccccgtgctgctgcaccacaccatggaccacagcatccccgacgcctag

SEQ ID NO: 187794 - DNA, 624 bp, Artificial Sequence
  derived and/or modified sequence
atggtggctcctgtgactggctatagccttggcgttcggagagctgaaataaagcctggcgtccgcgaaatccatctgtgtaaggacgagcggggcaagactggcttgaggctgagaaaagtggaccaaggtcttttcgtgcagctggtccaggccaacacaccagcatcactcgtcggactccgtttcggcgaccagttgcttcaaatagatggccgcgactgcgccggatggtcatctcacaaagcacaccaggtggtcaagaaggcctccggagacaagattgtcgtagtagtgcgggataggcctttccaacggaccgtaactatgcacaaggactcaatggggcacgtcgggttcgtcatcaaaaagggcaagatcgtatcactcgtgaagggatccagtgcggctcgcaacggactgctcaccaatcattatgtgtgcgaggtagatgggcagaatgtgatcggcctgaaagataagaaaattatggagatcctggctactgccggcaatgtggtgacactaacgatcattccttccgtgatttatgagcacatggtcaaaaagcttccaccggtccttttgcaccatacaatggatcactcgatacctgacgcttag

SEQ ID NO: 187795 - DNA, 624 bp, Artificial Sequence
  derived and/or modified sequence
atggtggcccctgtgacaggctacagcctgggcgtgagaagagctgagatcaagccaggagtgcgggagatccacctgtgcaaggatgagcggggcaagacaggcctgcggctgaggaaggtggaccagggcctgtttgtgcagctggtgcaggccaacaccccagccagcctggtgggcctgcgctttggagaccagctgctgcagattgatggccgggactgtgccggctggagcagccacaaggcccaccaggtggtgaagaaggccagcggggacaagatcgtggtggtggtgcgggaccggcccttccagaggacagtgaccatgcacaaggacagcatgggccacgtgggcttcgtcatcaagaagggcaagatcgtgtccctggtgaagggcagcagcgctgccagaaatggcctgctgaccaaccactacgtgtgtgaggtggatggccagaatgtcatcggcctgaaggacaagaagatcatggagatcctggccacagctggaaatgtggtgaccctgaccatcatccccagcgtcatctatgagcacatggtgaagaagctgccccctgtgctgctgcaccacaccatggaccacagcatcccagatgcctag

SEQ ID NO: 187796 - DNA, 624 bp, Artificial Sequence
  derived and/or modified sequence
atggtggcccccgtgaccggctacagcctgggcgtgcggcgggccgagatcaagcctggagtaagggaaattcacctgtgtaaggacgaacgcggaaaaacaggcctcagactcagaaaggtggatcaaggcctgttcgtgcagcttgtgcaggccaacacaccagcctctctcgtcgggctgagattcggggaccagctgcttcaaattgacggacgcgactgcgcaggttggtcctcccacaaggctcaccaggttgtcaaaaaagccagcggcgacaagattgtggtggttgttcgtgatcggccctttcagagaactgtcaccatgcacaaggattcaatgggtcatgttggtttcgtgataaagaaaggaaagatcgtatccctggtcaaaggaagttccgccgcgcggaatggccttctcacaaaccactatgtttgcgaagttgatggccagaatgtgataggtttaaaggataaaaaaataatggagatcctggctactgcaggcaacgttgttaccttgaccattattccttctgtgatctatgagcacatggtaaagaagcttcctccagtcctgcttcaccacactatggatcacagcatacccgacgcctag

SEQ ID NO: 187797 - DNA, 624 bp, Artificial Sequence
  derived and/or modified sequence
atggtggcccctgtgacaggctactcacttggagtacgccgagccgagatcaaacctggcgtacgggagatccatctgtgtaaagacgaacggggaaagacagggctgaggctaagaaaagtagaccagggccttttcgttcaactcgtgcaggcaaacaccccggcatccttggttgggctaaggttcggcgatcagctgctacaaatcgacggtcgagattgtgctggctggagttctcacaaagcacatcaggtggttaaaaaggcctccggcgacaaaatcgtggtggttgtccgggacaggcctttccaaagaactgttaccatgcataaagattcgatgggacatgtggggttcgtgatcaagaagggaaaaattgtgtctctcgtgaaagggtcttctgctgcaaggaacggacttctgacgaatcactacgtgtgcgaggtggacgggcagaacgtgataggattgaaagataagaaaatcatggaaattctcgctaccgccggaaacgttgtgaccctcacgatcatcccctccgttatctatgaacatatggtaaagaagctgccccctgtactgctgcaccacaccatggaccattcaattccagacgcctag

SEQ ID NO: 187798 - protein, 1060 aa, Artificial Sequence
  derived and/or modified sequence
MASALNSKINPPGTCQGSKADGGAGWRMDCDPQMHVKMCKKIAQLTKVIYALNTRQDEAEASMEALREAHQEELQNAVAETKARLLQEQGCAEEEALLQRIQALESALELQKRLTEEALAESASCRLETKERELRVEAEHAERVLTLSREMLELKADYERRLQHLTSHEATPQGRLPQESPETKSEPGQGPEMQEVLLEVQRLRVENQQLSKDYARKAEELQATYERENEAIRQAMQQSVSQALWQWQEKESDLRKNFQVQESALQAQVRKLEGDLEHRGRKISDLKKYAQKLKERIQDLDVQLKEARQENSELKGTAKKLGEKLAVAKDRMMLQECRGTQQTDAMKTELVSENKVLREENDLEAGNLHPQQDQSCLKECPCMKGGTDMQTKKEASAETEYMKQQYEEDLRKIKHQTEEEKKHLKDQLVKRLEDLVKKHTVEIKSVRSSVEAERKKLQREVEAQLEEVRKKSEKEIKQLEEEKAALNVKLQNSLLEVLRLEEFIQQNKTRPTGAEESPQELGRQHCSILETQDPCLKLDETSPRGEEYQDKLAAEEGTSSDEEERTKVLLKEGSDPQPPLGSLLKEKTSKIQRLEEDWQSQKAKLQAQVSQMQQALEQCTSNYREDLQALKQLSDLEREKLQRELQETTQQNHAMKAQLEASHQRALRMLEKARHQELKATEERLKKESSHSLQIQHQTHRLELQALEEKARQELQEERERMQAQQALLLESLRQELSEQQAACSGHQKDLEALQAELRALGRQQASSQCPGDSKDHIIATEERGGPGQAGSPPGAAGQGSGEGCGLWEENAQLQDAVRRLRAEVEQHQQEAQKLRDQRRFLEETQQAQRAREVETLRQEHRKEMQAMVADFSSAQAQLQARLAALEAELKDSGEKPGKGASRPEDLQLIGRLQTRLKEREDIIKQLTEERRFHYAAFPSAMSHRNRSFSFNPHPGYLTPSMKKKKVEDVPSRVVSVPNLASYAKNFLSGDLSSRINAPPITTSPSLDPSPSCGRTYKPNQSTDAKTATRTPDGETAQAKEVQQKQGSPHQEWFTKYFSF

SEQ ID NO: 187799 - DNA, 3183 bp, Artificial Sequence
  derived and/or modified sequence
atggccagcgccctgaacagcaagatcaacccccccggcacctgccagggcagcaaggccgacggcggcgccggctggagaatggactgcgacccccagatgcacgtgaagatgtgcaagaagatcgcccagctgaccaaggtgatctacgccctgaacaccagacaggacgaggccgaggccagcatggaggccctgagagaggcccaccaggaggagctgcagaacgccgtggccgagaccaaggccagactgctgcaggagcagggctgcgccgaggaggaggccctgctgcagagaatccaggccctggagagcgccctggagctgcagaagagactgaccgaggaggccctggccgagagcgccagctgcagactggagaccaaggagagagagctgagagtggaggccgagcacgccgagagagtgctgaccctgagcagagagatgctggagctgaaggccgactacgagagaagactgcagcacctgaccagccacgaggccaccccccagggcagactgccccaggagagccccgagaccaagagcgagcccggccagggccccgagatgcaggaggtgctgctggaggtgcagagactgagagtggagaaccagcagctgagcaaggactacgccagaaaggccgaggagctgcaggccacctacgagagagagaacgaggccatcagacaggccatgcagcagagcgtgagccaggccctgtggcagtggcaggagaaggagagcgacctgagaaagaacttccaggtgcaggagagcgccctgcaggcccaggtgagaaagctggagggcgacctggagcacagaggcagaaagatcagcgacctgaagaagtacgcccagaagctgaaggagagaatccaggacctggacgtgcagctgaaggaggccagacaggagaacagcgagctgaagggcaccgccaagaagctgggcgagaagctggccgtggccaaggacagaatgatgctgcaggagtgcagaggcacccagcagaccgacgccatgaagaccgagctggtgagcgagaacaaggtgctgagagaggagaacgacctggaggccggcaacctgcacccccagcaggaccagagctgcctgaaggagtgcccctgcatgaagggcggcaccgacatgcagaccaagaaggaggccagcgccgagaccgagtacatgaagcagcagtacgaggaggacctgagaaagatcaagcaccagaccgaggaggagaagaagcacctgaaggaccagctggtgaagagactggaggacctggtgaagaagcacaccgtggagatcaagagcgtgagaagcagcgtggaggccgagagaaagaagctgcagagagaggtggaggcccagctggaggaggtgagaaagaagagcgagaaggagatcaagcagctggaggaggagaaggccgccctgaacgtgaagctgcagaacagcctgctggaggtgctgagactggaggagttcatccagcagaacaagaccagacccaccggcgccgaggagagcccccaggagctgggcagacagcactgcagcatcctggagacccaggacccctgcctgaagctggacgagaccagccccagaggcgaggagtaccaggacaagctggccgccgaggagggcaccagcagcgacgaggaggagagaaccaaggtgctgctgaaggagggcagcgacccccagccccccctgggcagcctgctgaaggagaagaccagcaagatccagagactggaggaggactggcagagccagaaggccaagctgcaggcccaggtgagccagatgcagcaggccctggagcagtgcaccagcaactacagagaggacctgcaggccctgaagcagctgagcgacctggagagagagaagctgcagagagagctgcaggagaccacccagcagaaccacgccatgaaggcccagctggaggccagccaccagagagccctgagaatgctggagaaggccagacaccaggagctgaaggccaccgaggagagactgaagaaggagagcagccacagcctgcagatccagcaccagacccacagactggagctgcaggccctggaggagaaggccagacaggagctgcaggaggagagagagagaatgcaggcccagcaggccctgctgctggagagcctgagacaggagctgagcgagcagcaggccgcctgcagcggccaccagaaggacctggaggccctgcaggccgagctgagagccctgggcagacagcaggccagcagccagtgccccggcgacagcaaggaccacatcatcgccaccgaggagagaggcggccccggccaggccggcagcccccccggcgccgccggccagggcagcggcgagggctgcggcctgtgggaggagaacgcccagctgcaggacgccgtgagaagactgagagccgaggtggagcagcaccagcaggaggcccagaagctgagagaccagagaagattcctggaggagacccagcaggcccagagagccagagaggtggagaccctgagacaggagcacagaaaggagatgcaggccatggtggccgacttcagcagcgcccaggcccagctgcaggccagactggccgccctggaggccgagctgaaggacagcggcgagaagcccggcaagggcgccagcagacccgaggacctgcagctgatcggcagactgcagaccagactgaaggagagagaggacatcatcaagcagctgaccgaggagagaagattccactacgccgccttccccagcgccatgagccacagaaacagaagcttcagcttcaacccccaccccggctacctgacccccagcatgaagaagaagaaggtggaggacgtgcccagcagagtggtgagcgtgcccaacctggccagctacgccaagaacttcctgagcggcgacctgagcagcagaatcaacgccccccccatcaccaccagccccagcctggaccccagccccagctgcggcagaacctacaagcccaaccagagcaccgacgccaagaccgccaccagaacccccgacggcgagaccgcccaggccaaggaggtgcagcagaagcagggcagcccccaccaggagtggttcaccaagtacttcagcttctag

SEQ ID NO: 187800 - DNA, 3183 bp, Artificial Sequence
  derived and/or modified sequence
atggcaagcgccttgaacagcaagattaacccaccggggacttgtcagggaagcaaggcagacgggggagccgggtggcggatggactgtgacccccagatgcatgtaaagatgtgcaagaaaattgcccagctgacgaaggtgatctatgctcttaacaccaggcaggatgaagccgaagcttctatggaggctctccgcgaggctcatcaggaggaactccagaatgcagtcgcagaaaccaaggcaaggttattgcaggagcagggttgcgcagaagaggaagccctgttacagcggatccaggccctggaatctgcccttgaactacagaagagactgactgaggaggctctggccgagagtgcctcatgtcggctcgagactaaggagcgggagctgagagtagaggcagagcacgccgaacgggtcctgacgttaagtcgggagatgctcgagctcaaggcagactacgagagaaggctccagcacctgactagccatgaggccaccccacaaggccggcttccacaggaatcccccgaaacgaagagtgagccaggacagggtccagaaatgcaagaagtgctactcgaagtccagagactgagagttgagaaccagcagctatctaaagattatgctagaaaggccgaagagttacaggcaacttatgagcgcgaaaatgaggcaatcagacaggctatgcagcaatccgtgagccaggccctctggcaatggcaggagaaagagagcgacctaagaaaaaacttccaagtgcaggagagtgcgctccaagctcaggttcgtaaactggagggtgatctggagcaccgtggcaggaagatctcagacctcaaaaagtacgcccagaaattgaaagaaagaattcaggatctagacgtgcaattaaaggaggctaggcaggagaatagcgaactaaaaggaacagcaaagaagttgggcgaaaagcttgctgtcgccaaagatcgcatgatgctccaagagtgcaggggtacgcagcaaactgatgccatgaagacagagctcgttagcgaaaacaaggtcctgagagaggagaacgacctcgaggccggcaatcttcatccccagcaggaccaatcgtgcctgaaagaatgtccctgcatgaaggggggtaccgatatgcagaccaagaaggaggcatcagccgagaccgagtatatgaagcaacaatacgaggaggaccttagaaagattaagcaccagacagaggaggagaagaaacaccttaaggaccaacttgttaaaagactggaagatttggtgaagaaacatacagtcgaaattaagagcgtgagaagctccgtagaagccgaacggaagaagttacagcgggaagtagaagcacagctggaagaggtgcggaaaaagtccgaaaaagaaattaagcagctggaggaagagaaggctgcacttaatgtgaagctccagaactctcttctggaggtcctgaggctggaagaatttatacagcagaacaaaactagaccaaccggggcagaggagtcccctcaggaactaggaagacagcactgctccattctcgagactcaggacccatgtttaaagctcgacgaaacctcaccccgcggtgaggagtatcaggataaactggcagccgaagaaggcacatcatctgacgaggaagagcggacgaaagttctcttaaaagaaggcagcgaccctcagcctcctctgggtagcctccttaaggagaagacatctaaaatccaacgacttgaggaggattggcagtctcagaaagcgaagctccaggctcaggtttcccagatgcagcaggcactggagcagtgtacatccaattacagggaagacctgcaggccttgaagcagttatccgatctggagagagaaaagctccagcgtgaactgcaggaaacgacccaacaaaatcatgccatgaaagcccagctggaggcaagccaccagcgggccttaagaatgctggagaaagccaggcaccaggagctgaaggctaccgaagagaggttaaagaaggagtcgagccacagtctgcagattcagcatcagacacacagacttgaactccaggccttggaagaaaaagcacggcaggagctgcaggaggagagagagcgtatgcaggctcagcaggctcttctcctcgaatccctcaggcaggaactgtctgaacagcaggctgcatgtagcgggcaccaaaaagacctcgaggccttgcaggctgagctgagagctctcgggcggcagcaggcttccagtcagtgcccaggggatagtaaagatcacataatcgccacggaggagaggggcggcccaggacaagctgggagccctccaggcgcagcaggccaggggtctggtgaaggctgtggcctttgggaagagaatgcccagctgcaagacgccgtgcgtagacttcgcgccgaagtggagcagcatcagcaagaggcccagaagctgcgggatcagcggcggttcctggaagagactcagcaggcgcagagggctagggaggtcgaaacattgcggcaggaacacaggaaggagatgcaagcgatggtagcggacttctcctcagcccaagcacagctgcaggcacggttagctgctcttgaggcagagctgaaagatagcggcgagaagcccggcaaaggagccagccgcccagaagacttacagcttattgggcgcttgcaaacccgcctgaaagagagagaggacatcatcaaacagcttactgaagagcgcaggttccattatgcggctttccctagcgcgatgagtcatcgcaaccggagtttttccttcaatccacacccggggtatctcacaccgagcatgaaaaagaagaaggtggaagacgtgccttcaagggtggtgtctgttcctaatctggctagctacgcaaagaattttctgtccggcgatttgtcctcacgcatcaatgcaccaccaattacaacttccccaagcttggaccccagcccaagctgcggcagaacgtataagccaaaccagagcactgacgctaaaacggctacacgcactcccgacggcgaaaccgcacaggctaaggaggttcagcaaaagcaggggagtccccaccaggaatggttcactaagtacttttctttttag

SEQ ID NO: 187801 - DNA, 6622 bp, Artificial Sequence
  derived and/or modified sequence
gaaccagcaggagaggaaaaagggtgggcgcgcgggtgggcccgggaggcggagaccttcgggaagctggggccacgcggcggtgcaggcgacgggactgcagtgccacctctcccgagaaacccacacgctcgcacgcccgcgcgcgcacgcacgtgcacacggtgggcagggagaaaacgagagagtctgagtgctgggcgcgttttagcgatggcttctgctctcaacagcaaaattaacccgcccggcacttgccagggctccaaagccgacggtggcgccggctggagaatggactgtgatccccagatgcacgtgaaaatgtgcaagaagatcgcccagctcaccaaggtgatttatgccctgaacacccgccaggatgaggctgaggccagcatggaggcgctgcgggaagcgcaccaggaggagctccagaatgcggtggcagagaccaaggccaggctcctgcaggaacagggctgcgcagaggaggaagcccttctacagcgcatccaggccctggagagcgccctggagctgcaaaagaggctgacggaggaggcgctggctgagtcggcctcgtgcaggctggagacgaaggagagagagctgagggtggaggcagagcacgccgagcgagtcctcacgctctccagggaaatgctggagctcaaggctgactacgagaggaggctccagcacctgacgagccacgaggctaccccgcagggccggctgccccaggagagccctgaaaccaagtcggagccaggccagggcccggagatgcaggaggtcctgctagaggtgcagcggctgcgagtggagaaccagcagctgagcaaggactacgcccgcaaggccgaggagctgcaggccacctacgagagggaaaacgaggccatccggcaggccatgcagcagtcggtgagccaggccctgtggcagtggcaggagaaggagtcggacctccgcaagaacttccaggtccaggagtcagccctgcaggctcaggtccggaagctggaaggagacctggagcacagaggccgcaagataagtgacctgaagaagtacgcccagaagctgaaggagaggattcaggacctggatgtgcagcttaaggaggctcgacaggagaattcagagttgaaaggcactgcaaaaaaacttggggagaagctggctgttgccaaagacagaatgatgctgcaggagtgtcgtgggacacagcagacagatgccatgaagactgagttagtttcagagaacaaagtcctgcgggaagagaatgacttggaagccggcaatcttcatcctcagcaggatcaaagctgtctcaaggagtgcccttgcatgaaaggaggcacagatatgcagaccaagaaagaggcaagtgctgagacagaatatatgaagcaacaatatgaagaagaccttcgtaaaatcaaacatcagacagaagaggagaagaaacatctcaaagaccagctagtgaagcgactagaagacttggtaaagaagcacaccgtggaaatcaaatccgttcgctcgtccgtggaggctgaaagaaagaaactgcagagggaagtagaagcacagttggaggaagtgaggaagaaatcagaaaaggagataaagcagctggaagaagagaaagcagccctcaatgtgaagcttcagaattctctgcttgaggttttaaggctggaagaatttatccaacaaaataagacacgccccacaggagctgaggaaagtccccaggaattaggccgccagcactgcagcattctggagacccaggatccatgcttgaagctggatgaaacttcgccgagaggagaggagtatcaagataagttagcagctgaagaaggaaccagcagtgatgaagaagaaaggaccaaagtgcttctcaaggagggaagtgacccacaacctccactgggctctttgttgaaggagaaaacatccaaaatccagcgtctagaggaggactggcaaagccagaaggccaaattgcaagcccaggtctcacagatgcagcaggctctggagcagtgcaccagcaactacagggaggacctgcaggcactcaagcagctctcggacctggagagggagaagctgcagcgtgagctccaggagaccactcagcagaaccacgccatgaaagcccagctcgaggcttcccaccagagagccctgcgcatgctggagaaggccagacatcaggaactcaaggccacagaggaacgcttgaagaaggaatccagccacagcctccagatccaacaccagacacaccgactggagctccaggccttggaggaaaaggccaggcaagagctgcaggaggagcgtgagaggatgcaggcacagcaggccctgctgctagagtcgctcagacaggagctgtcggagcagcaagctgcctgttctgggcaccagaaggacttggaggcactgcaggccgagctgagggctctgggcagacagcaagccagcagccagtgtccaggagacagcaaggatcacataatcgccacagaggagcggggcggcccgggccaggccggctccccaccgggcgctgctgggcagggttccggcgagggatgcgggctctgggaggagaacgcgcagctccaggacgcggtgcggcggctgcgcgcggaggtggagcagcatcagcaggaggcgcagaagctccgagaccagcgcaggttcctggaggagactcagcaagcccagcgggccagggaggtggagacactgcgccaggaacaccggaaggagatgcaggccatggtggcagatttcagtagtgcccaggcccagctccaggcccggctggctgccctggaagccgaactgaaagattccggagagaagccagggaagggagcgtccaggcccgaggaccttcagctcattggccgcctgcagacccgcctgaaggagagagaggacatcatcaagcagctcacggaagagagaagatttcactacgcagcattccccagtgccatgtcccaccggaatcggtctttctctttcaatcctcacccgggatatttgaccccttccatgaagaaaaagaaggtggaggacgtgcccagccgcgtggtcagcgtgccgaacctcgcctcctatgcaaagaactttctgagtggcgatctgagttccaggattaatgcccctccaataactacatcacccagcttggacccaagccccagctgtggccggacctacaaacccaaccagtctacagatgcaaaaactgccacaaggaccccagatggtgaaacggcccaagccaaagaagtccagcagaaacagggctctccgcaccaggaatggttcaccaagtacttttctttctaagctaacctttgggatacatcacagaggatacttgaaaaacatttattttaaatcatccgattgaaggaatgaactaacaccaaccaaccaaataatatgcttatgatttatatatgatagctaaaacaaattttggcgttaacacttcatactgttctgccaggcacagcagctcacgcctgtaatcccatcactttgggaggctgaggcagatggactgcttgagtccaggaatttgagaccagcctggccaatatggtgaaaccccatctctacaaaatatacaaaaattagccaggcatggtggcgtgtgcctgtggtcccaggtacttgggggactgaggcgggaggatcacttgaacctaggaggcagaggttgcagtgagccaagttcgaactcctgcattccaaccagcctgggtgacagagggagaccctgtctccaaaaaaaaaaaaaaaaaaaaaaaaaaaaaaaaaaaaaaaaaaaattgacattaaaccagtgttattaaaagtcatctataggaaaatgttattagcgttactaatgacccataccttgtatttctagtgtccataacatcatactccattttgtggaacatcagactttgtgatttccatgatctatttcaaaagtggttgtacttgtccttaggatgctagtcaactccactggaaagctgtttctatgtaaaatgatgcaattccaaaatgcacatctaacctcaataggaagacaaataacagttaaacaggaaagccaactaaaaacaaaccaaacctaccagaaatggatggtagcatgcttggactgaatactttcacttccttggtctaagacaagcagcagattatagatgggataacacccacctctaaaagggctttgcaaggattaagcaagataacataaattaacatgaattggaattaagtaccacaaggtttttctgtaaataaccaatcctagcccagttataggtctcagtgtaatgaccatagtgccaacatgatcacttgtgaaggtctctagattatctgttctttgaagtcaaagatcttctagactgggcacatggctcatgcctgtaatcccaacactttgggaggctgagatgggaggagagcttgaggccaggaatttgagaccagcctgggcaacacagcgagacctccatctctacaaaaaaataattagcccaaagaaaacccagctacttggaagtctgaggtaggacagcatgagcccaagagttcgagaccagcctgggcaagatagtgagatcccatctctacagattaaaaaaatatatatatatatcccctgaacctctggtctttgggtttgagccatttgcctcatggtgtgttgcttcttcactgcatgaattcccagtgggttaaaggaaccgcaatggctgttcacggtgctgaccttgctctcagtccacactgatttgtcttaccttctgacagagcaatgtgatttgacaagactcaataacaacttttagggggcaaaatattttttcagtctttggtgctggcccagaaggtggcccacaaaccaatgttaattctatgcattgtcaaatctttgctctttgaataaaactttgaataactgggcaataaaaatggttgacttgtattgattttccacagaaaggtaaaattagatgaagacagcttagaaatagaaagttcagttcacattaacctcaatcacaccatcttaaaaaaaaaaaagctgattacatataactgtcaaacttacgtattaaaggtaaatttactgcctaatcaaaacgaggctccaatgcatttttaaatgcaaacaaacacttgtcaccatacattaacacaccatactgtttttcactaccaaatattttttgtgagtttcccgcttagagtgtcttagttcgttcaggctgctctaacaaaatatcttacttatactggataatttataaacaatagaaatatgtcactcacagtcctagaggctaagtccaagatcaaggcaccagcagatatggagtctggggagggcccattcttcagaaatgggtgcctgctacgtgtccttacatggtggaagaggcaagagcgcctccctgagcctcttttgtaagggtacttatcctactcatgagggtgaagccctcatgactccattgcttcccaaaagccccacctcttaatactattacattgacattaggttccaacatatgaattttggaagggacatcaacattcaggacatagcagtgaaccctgtaggactgctctttattttgtgctttcaaaaagactacatacaggtggttctatttttgtgtgttgaaacactttcccaggctgcactttgcatttctgtccttaaactcagcatgatccctgggcaaggagaaaattttactagttgagatcgtacataggttttgactcctttcttgctgcaggtgactgaaaagatctttcagtcttaaatttctaaattctaccctgcaatgattatatctttgttaacaaaatctttgcatgcttccataattttttattgaggccatatgccttgggtattgaagtaaggcatttaaggacacaaacttaagctttttgtttgttattaccaaactgccattcagaaagtttctaacaatttacacccttaccagcagtaaatgaacctactgtgccctaacactattgacaaagaaatacaatttgatagataaaacattctattttagtttgcataatgattccatcaatctctcaacagcagagcggtctagagatgacagtgatggcgtagaggtgacagtgaagatgaagagaaattatccaattcgggattaagttaagagagagaaaaaaacagtatttaatggtaaatctcttcaggctgtattatgacaggggtggaagagttaatatgttcctgcagcaaaactgaaaggaatactatctgttccacatgaaagcaaactgttttgtaattggggtaggtaaaaatggattcacccagtcaatggctgcacaccacatacctgagcccttaactgctctaacactgatgtaatatccaacccaacatttgtgattgaggctacttggttaatttttctccaggatccatctggattctgcagatgaggctggcaaattaaatggaactatgatagggaccatcttactgtatctgtcagat

SEQ ID NO: 187802 - DNA, 3183 bp, Artificial Sequence
  derived and/or modified sequence
atggccagcgccctgaacagcaagatcaaccccccaggcacctgccagggcagcaaggcagatggaggagctggctggaggatggactgtgacccccagatgcacgtgaagatgtgcaagaagatcgcccagctgaccaaggtgatctatgccctgaacacccggcaggatgaagctgaggcctccatggaggccctgcgggaggcccaccaggaggagctgcagaatgctgtggccgagaccaaggcccggctgctgcaggagcagggctgtgccgaggaggaggccctgctgcagaggatccaggccctggagagcgccctggagctgcagaagaggctgacagaggaggccctggccgagagcgccagctgccgcctggagaccaaggagcgggagctgcgggtggaggccgagcacgccgagcgggtgctgaccctgagccgggagatgctggagctgaaggctgactatgaaagaaggctgcagcacctgaccagccatgaggccaccccccagggccgcctgccccaggagagccctgagaccaagtctgagcccggccagggccctgagatgcaggaggtgctgctggaggtgcagaggctgcgggtggagaaccagcagctgagcaaggactatgccaggaaggccgaggagctgcaggccacctatgagcgggagaatgaggccatccggcaggccatgcagcagagcgtgtcccaggccctgtggcagtggcaggagaaggagagtgacctgaggaagaacttccaggtgcaggagagcgccctgcaggcccaggtgaggaagctggagggggacctggagcaccggggcaggaagatcagtgacctgaagaagtatgcccagaagctgaaggagcgcatccaggacctggatgtgcagctgaaggaggcccggcaggagaacagcgagctgaagggcacagccaagaagctgggggagaagctggccgtggccaaggacaggatgatgctgcaggagtgccggggcacccagcagacagatgccatgaagacagagctggtgtctgagaacaaggtgctgcgggaggagaatgacctggaggccggcaacctgcacccccagcaggaccagagctgcctgaaggaatgtccctgcatgaagggcggcacagacatgcagaccaagaaggaggccagcgctgagacagagtacatgaagcagcagtatgaggaggacctgaggaagatcaagcaccagacagaggaggagaagaagcacctgaaggaccagctggtgaagaggctggaggacctggtgaagaagcacacagtggagatcaagtctgtgcgcagctctgtggaggccgagaggaagaagctgcagcgggaggtggaggcccagctggaggaggtgaggaagaagtctgagaaggagatcaagcagctggaggaggagaaggccgccctgaatgtgaagctgcagaacagcctgctggaggtgctgcggctggaggagttcatccagcagaacaagacccggcccaccggggctgaggagagcccccaggagctgggccggcagcactgcagcatcctggagacccaggacccctgcctgaagctggatgagaccagccccagaggagaggagtaccaggacaagctggccgctgaggagggcaccagcagtgatgaggaggagaggaccaaggtgctgctgaaggagggcagtgacccccagccccccctgggcagcctgctgaaggagaagaccagcaagatccagaggctggaggaggactggcagagccagaaggccaagctgcaggcccaggtgtcccagatgcagcaggccctggagcagtgcaccagcaactaccgggaggacctgcaggccctgaagcagctgagtgacctggagcgggagaagctgcagcgggagctgcaggagaccacccagcagaaccacgccatgaaggcccagctggaggccagccaccagagggccctgaggatgctggagaaggcccggcaccaggagctgaaggccacagaggagcggctgaagaaggagagcagccacagcctgcagatccagcaccagacccaccggctggagctgcaggccctggaggagaaggcccggcaggagctgcaggaggagcgggagaggatgcaggcccagcaggccctgctgctggagagcctgcggcaggagctgtctgagcagcaggccgcctgcagcggccaccagaaggacctggaggccctgcaggccgagctgcgggccctgggccggcagcaggccagcagccagtgccctggggacagcaaggaccacatcatcgccacagaggagcggggcggccctggccaggccggcagccccccaggagctgctggccagggcagcggggagggctgcggcctgtgggaggagaatgcccagctgcaggatgctgtgcggcggctgcgggcagaggtggagcagcaccagcaggaggcccagaagctgcgggaccagaggcgcttcctggaggagacccagcaggcccagagggcccgggaggtggagaccctgcggcaggagcacaggaaggagatgcaggccatggtggccgacttcagcagcgcccaggcccagctgcaggcccggctggccgccctggaggccgagctgaaggacagcggggagaagccaggaaaaggagccagcaggcctgaggacctgcagctgattggccgcctgcagacccggctgaaggagcgggaggacatcatcaagcagctgacagaggagcggcgcttccactacgccgccttccccagcgccatgagccacaggaacagaagcttctccttcaacccccaccctggctacctgacccccagcatgaagaagaagaaggtggaggatgtgcccagccgggtggtgtctgtgcccaacctggccagctatgccaagaacttcctgagcggggacctgagcagccgcatcaatgccccacccatcaccaccagccccagcctggaccccagccccagctgtggccgcacctacaagcccaaccagagcacagatgccaagacagccaccaggaccccagatggagaaacagcccaggccaaggaggtgcagcagaagcagggcagcccccaccaggagtggttcaccaagtacttctccttctag

SEQ ID NO: 187803 - DNA, 3183 bp, Artificial Sequence
  derived and/or modified sequence
atggccagcgccctgaacagcaagatcaacccccccggcacctgccaaggttctaaagctgatggcggcgctggctggcggatggattgtgaccctcagatgcacgtgaaaatgtgcaaaaagatagcccagctcactaaggtgatttatgcattgaacacacggcaggacgaagccgaggcatcaatggaggcccttcgcgaagcccatcaggaggagctgcagaatgctgttgcggagaccaaggctagactcctgcaggaacagggctgtgccgaagaagaggcgctcctgcagagaatccaagcactggaaagcgctttggagttgcagaaacgattaacagaagaagctcttgctgaatccgcatcatgtcgcctagaaacaaaggagcgtgagctccgtgttgaggcggaacatgctgaacgcgtgctcaccttgagccgcgaaatgctcgagctcaaggccgattacgaaaggcggctgcagcacctgacatctcacgaagcaacacctcagggacgactgccccaggagtctcccgagaccaaatcggagccaggccagggcccagagatgcaagaggtgttgctcgaggtgcagagacttcgcgtggaaaaccagcagctcagtaaagattacgccaggaaagctgaggagctccaagctacctatgaacgagaaaatgaggcaatccgtcaggctatgcagcaatccgtatctcaggctctgtggcagtggcaagagaaagagagcgatctgcggaagaattttcaggtgcaggaaagtgcactccaggcccaggtgcgtaaattggaaggtgatctggagcatcggggccgcaagatctctgatttgaaaaaatacgcccagaagctcaaggagcgcattcaggatctcgacgttcaactgaaagaagcacggcaggagaactccgaactgaaaggaacggccaagaaattgggagaaaaactagctgtggctaaagaccgcatgatgctacaggaatgtcggggtacacagcagacagatgcaatgaagacagaactcgtgtccgagaacaaagtgctgcgcgaggagaacgacctagaggccggtaacctgcaccctcagcaggatcagtcctgcctgaaagaatgcccttgcatgaaagggggaactgatatgcagacaaagaaggaggcctccgctgagaccgagtatatgaaacagcagtacgaggaagacttacgaaagatcaagcaccaaacagaggaagaaaagaagcatctaaaggaccagctggtgaaacgcttagaggacttagtgaaaaaacataccgtcgaaatcaagagcgtaaggtcttcagtggaagccgagcggaaaaaattgcaaagagaggtggaggcacaactggaggaagttcgaaagaagtccgagaaagaaatcaagcagctggaggaggaaaaagctgccctgaacgtgaagcttcaaaattccctgctggaggtcttgaggttagaggagttcattcaacaaaacaagacacggccgaccggcgcggaggaatcgccacaggaactcggtagacagcattgcagcattctggagacacaggatccgtgcctgaaattggacgaaacctctccacgaggcgaggagtatcaggataagctggccgcagaagagggcacgtccagtgacgaggaagaaagaacgaaggtcctccttaaggagggctcagatcctcagccacccctcggctcactgctcaaggagaagacatctaagattcagcgcctagaggaagactggcagagtcagaaagccaagttgcaggcccaggtctcgcagatgcagcaggccttagaacagtgcacctccaattacagagaggacttgcaggccctgaagcagttgagcgacttagagcgagagaaactgcagagagagctgcaggaaaccactcagcagaatcatgctatgaaggcacagctcgaggccagccaccagagggccctgcgcatgctggaaaaagcccgacaccaggaactcaaagccaccgaagagcgactgaaaaaggaatcaagccactctctgcagatccaacaccagactcacaggttagagctgcaggccctggaagagaaagcgagacaggaactgcaagaggaacgtgaacgcatgcaggcccaacaggccctcctactcgaatccctccggcaagagctttctgagcagcaagccgcctgttctgggcaccaaaaagatcttgaagctctgcaagccgagctgagggcactcggcagacagcaagcttccagccaatgtcctggcgactcaaaagaccacatcattgcaaccgaggaaagaggcggaccaggtcaggccgggagtccgcccggagcagccgggcagggttctggcgaaggctgtgggttatgggaggagaacgcccagctgcaggatgccgtgcggcggctgagggcagaagtcgagcagcaccagcaggaggcacagaaactaagggaccagcgccgttttttagaggagactcagcaggcccagagggcaagagaggtagagactttacgtcaggaacacagaaaggagatgcaggcaatggtagccgattttagtagtgcccaagcccagttgcaggcacgtctggccgctctggaggcagaattgaaggattccggcgaaaaaccaggtaagggcgccagtagacccgaggacctccagttgatcggacggctgcagacacgactgaaggagcgcgaggacattatcaagcagttgacagaggagagacgctttcactacgcagcattcccaagcgccatgtcccataggaatcgcagcttctctttcaatccccaccctggctacctgacaccgtccatgaagaagaaaaaggtggaagacgttccaagtcgcgtggtaagcgtgcccaatctcgcttcgtacgccaaaaatttcctctccggagacctctccagccgaatcaatgctcctcctattacgacctccccatctctggaccctagcccttcctgcggcaggacatacaagcccaaccagtccaccgacgcgaaaaccgcaactcggacgcccgacggtgagactgcccaggcaaaggaagtgcaacaaaaacagggcagtcctcaccaggaatggttcacgaaatattttagtttctag

SEQ ID NO: 187804 - DNA, 3183 bp, Artificial Sequence
  derived and/or modified sequence
atggcctcggctctcaatagcaagattaatcctcctggaacgtgccaggggagcaaggccgatggcggagcgggatggaggatggattgcgacccacagatgcacgtgaagatgtgtaaaaagatcgctcagctaactaaagtgatttacgccctgaacacccgacaggatgaggcggaggccagcatggaagctctgcgtgaagcccaccaggaagagctccaaaacgccgtggcggagactaaagccagactcctgcaggagcaggggtgtgctgaggaagaggcactgcttcaacgcattcaggccctggaatccgctctggaactgcaaaagaggctcaccgaggaggctttggccgaaagcgcctcttgccgactggaaactaaggagagagagctgcgggtggaggctgaacatgccgagcgtgtcctgaccctgtccagagagatgcttgagttaaaggccgactacgagaggagactgcagcacctgacttcacacgaagcgactccccaggggaggctaccccaagagagccccgagacaaagtcagaacccggacaagggcctgagatgcaggaagttctgctggaggtgcagcgcctgagggtggaaaatcagcagctgtcaaaagattatgcgcgtaaagctgaggagttacaggctacctatgagcgggagaatgaggccatcaggcaagccatgcagcagagcgtgtcacaggccctgtggcagtggcaggagaaagaaagcgacctgaggaaaaattttcaggtgcaggagagtgcgctgcaggctcaggtgcgtaagctggaaggggatctcgaacatagaggaagaaaaattagcgacctcaagaaatacgcccaaaagctgaaagagcggattcaggacttggacgtgcaactcaaagaagcacggcaggaaaattctgaactcaagggcacagctaaaaagctcggggagaagctagcagtcgccaaagaccggatgatgttgcaagaatgcaggggaacccaacagacagacgccatgaagaccgagcttgtgagcgaaaataaagtactcagggaggagaacgacctcgaggccggtaatctccacccccagcaggaccagagctgtcttaaggaatgcccctgcatgaaaggagggacagatatgcaaacaaagaaggaggcgtctgcagagactgaatacatgaagcaacagtatgaggaggatctccgaaagatcaagcaccagacggaggaggaaaaaaagcacctcaaggatcagctggtcaaaagactcgaagacctggtgaaaaagcacactgtggaaattaaatcagtacggtcatctgtggaggccgaaaggaagaagctgcagcgagaggtcgaggcccagctggaggaagttcgtaagaaatcggagaaggagattaaacaactggaggaggaaaaggccgctctgaacgtgaagctgcagaacagcttgttggaagtgttgcgtctggaagaattcattcaacagaataaaactcgccctactggcgctgaggagtcaccccaggagctgggtaggcaacattgcagcatcctggagacgcaggatccatgcctgaagttggacgaaacatcccctcggggtgaagaataccaagataaactggctgctgaggaaggcacgtcatccgatgaggaagaacgcactaaggttctgcttaaggaagggtcggatccgcagccccctttgggcagcctgctgaaagagaagactagcaagattcaaagacttgaggaagattggcagtcccaaaaggccaagctgcaggcccaagtctctcagatgcagcaggcacttgaacaatgcactagcaactaccgggaagacctgcaagctcttaaacagctgagtgaccttgagcgcgaaaagcttcagagagaactgcaagagacaacccagcagaaccacgccatgaaagcccagcttgaagcatctcatcagagagccttgaggatgttagaaaaggctcggcaccaggaattaaaggccaccgaggagaggctgaagaaagaatcaagtcacagcctgcagatccagcatcagactcacaggctcgagctacaggcgcttgaagagaaggcgaggcaggagctgcaggaggagcgggagagaatgcaggctcagcaggctctcctgctggagtctctacggcaggagctttccgagcaacaggctgcttgcagtggccatcagaaggatttagaagctttacaggctgagctcagagccttaggccgacagcaagcctcctctcagtgtccaggtgattccaaggaccacatcattgccactgaggaacggggaggaccaggtcaggccggttctccgccaggagccgcaggacaggggagtggcgaggggtgtggcctttgggaagagaacgcacagctgcaagacgcagtccgccgtctacgggcagaagtggaacagcatcagcaagaagcccaaaaacttcgcgaccagcggagatttctggaggagacgcagcaggctcaaagagctcgcgaggtcgaaaccctgcgtcaagaacaccgcaaagagatgcaggccatggtggccgatttcagtagtgcccaagctcagctgcaggctaggctggccgcattggaggccgagctgaaagactcgggcgagaagcccggaaagggcgcttccagacctgaggatctgcagctgatcggcagactgcagactcgcctgaaagaaagagaggatattattaagcagctcacagaggagagacgtttccactatgctgcctttccaagtgcgatgtcacataggaacagaagcttttcattcaacccacacccgggatacctcacaccttcaatgaaaaagaaaaaagttgaggacgtcccatctagagtcgttagtgtcccaaatctcgcaagctacgctaagaattttctctctggggacctttcttcacggatcaatgcccctccgattaccaccagcccttcactggacccctcaccttcctgcggtagaacatataagccaaatcagtctaccgacgctaaaaccgccacacgcacacctgatggtgagacggcacaggctaaggaggttcagcagaagcagggatcacctcatcaagagtggttcacgaagtattttagcttttag

SEQ ID NO: 187805 - protein, 1009 aa, Artificial Sequence
  derived and/or modified sequence
MDMFSLDMIISDPAAEASRAGKKQLRGVQNPCPSARARPRHKSLNIKDKISEWEGKKEVPTPAPSRRADGQEDYLPSSTVERRSSDGVRTQVTEAKNGMRPGTESTEKERNKGAVNVGGQDPEPGQDLSQPEREVDPSWGRGREPRLGKLRFQNDPLSVLKQVKKLEQALKDGSAGLDPQLPGTCYSPHCPPDKAEAGSTLPENLGGGSGSEVSQRVHPSDLEGREPTPELVEDRKGSCRRPWDRSLENVYRGSEGSPTKPFINPLPKPRRTFKHAGEGDKDGKPGIGFRKEKRNLPPLPSLPPPPLPSSPPPSSVNRRLWTGRQKSSADHRKSYEFEDLLQSSSESSRVDWYAQTKLGLTRTLSEENVYEDILDPPMKENPYEDIELHGRCLGKKCVLNFPASPTSSIPDTLTKQSLSKPAFFRQNSERRNFKLLDTRKLSRDGTGSPSKISPPSTPSSPDDIFFNLGDPQNGRKKRKIPKLVLRINAIYEVRRGKKRVKRLSQSMESNSGKVTDENSESDSDTEEKLKAHSQRLVNVKSRLKQAPRYPSLARELIEYQERQLFEYFVVVSLHKKQAGAAYVPELTQQFPLKLERSFKFMREAEDQLKAIPQFCFPDAKDWVPVQQFTSETFSFVLTGEDGSRRFGYCRRLLPGGKGKRLPEVYCIVSRLGCFSLFSRILDEVEKRRGISPALVQPLMRSVMEAPFPALGKTILVKNFLPGSGTEVIELCRPLDSRLEHVDFESLFSSLSVRHLVCVFASLLLERRVIFIADKLSILSKCCHAMVALIYPFAWQHTYIPVLPPAMVDIVCSPTPFLIGLLSSSLPLLRELPLEEVLVVDLVNSRFLRQMDDEDSILPRKLQVALEHILEQRNELACEQDEGPLDGRHGPESSPLNEVVSEAFVRFFVEIVGHYSLFLTSGEREERTLQREAFRKAVSSKSLRHFLEVFMETQMFRGFIQERELRRQDAKGLFEVRAQEYLETLPSGEHSGVNKFLKGLGNKMKFLHKK

SEQ ID NO: 187806 - protein, 79 aa, Artificial Sequence
  derived and/or modified sequence
MDMFSLDMIISDPAAEASRAGKKQLRGVQNPCPSARARPRHKSLNIKDKISEWEGKKEVPTPAPSRRADGQEDYLPSST

SEQ ID NO: 187807 - protein, 158 aa, Artificial Sequence
  derived and/or modified sequence
MDMFSLDMIISDPAAEASRAGKKQLRGVQNPCPSARARPRHKSLNIKDKISEWEGKKEVPTPAPSRRADGQEDYLPSSTVERRSSDGVRTQVTEAKNGMRPGTESTEKERNKGAVNVGGQDPEPGQDLSQPEREVDPSWGRGREPRLGKLRFQNDPLS

SEQ ID NO: 187808 - DNA, 3030 bp, Artificial Sequence
  derived and/or modified sequence
atggacatgttcagcctggacatgatcatcagcgaccccgccgccgaggccagcagagccggcaagaagcagctgagaggcgtgcagaacccctgccccagcgccagagccagacccagacacaagagcctgaacatcaaggacaagatcagcgagtgggagggcaagaaggaggtgcccacccccgcccccagcagaagagccgacggccaggaggactacctgcccagcagcaccgtggagagaagaagcagcgacggcgtgagaacccaggtgaccgaggccaagaacggcatgagacccggcaccgagagcaccgagaaggagagaaacaagggcgccgtgaacgtgggcggccaggaccccgagcccggccaggacctgagccagcccgagagagaggtggaccccagctggggcagaggcagagagcccagactgggcaagctgagattccagaacgaccccctgagcgtgctgaagcaggtgaagaagctggagcaggccctgaaggacggcagcgccggcctggacccccagctgcccggcacctgctacagcccccactgcccccccgacaaggccgaggccggcagcaccctgcccgagaacctgggcggcggcagcggcagcgaggtgagccagagagtgcaccccagcgacctggagggcagagagcccacccccgagctggtggaggacagaaagggcagctgcagaagaccctgggacagaagcctggagaacgtgtacagaggcagcgagggcagccccaccaagcccttcatcaaccccctgcccaagcccagaagaaccttcaagcacgccggcgagggcgacaaggacggcaagcccggcatcggcttcagaaaggagaagagaaacctgccccccctgcccagcctgccccccccccccctgcccagcagccccccccccagcagcgtgaacagaagactgtggaccggcagacagaagagcagcgccgaccacagaaagagctacgagttcgaggacctgctgcagagcagcagcgagagcagcagagtggactggtacgcccagaccaagctgggcctgaccagaaccctgagcgaggagaacgtgtacgaggacatcctggacccccccatgaaggagaacccctacgaggacatcgagctgcacggcagatgcctgggcaagaagtgcgtgctgaacttccccgccagccccaccagcagcatccccgacaccctgaccaagcagagcctgagcaagcccgccttcttcagacagaacagcgagagaagaaacttcaagctgctggacaccagaaagctgagcagagacggcaccggcagccccagcaagatcagcccccccagcacccccagcagccccgacgacatcttcttcaacctgggcgacccccagaacggcagaaagaagagaaagatccccaagctggtgctgagaatcaacgccatctacgaggtgagaagaggcaagaagagagtgaagagactgagccagagcatggagagcaacagcggcaaggtgaccgacgagaacagcgagagcgacagcgacaccgaggagaagctgaaggcccacagccagagactggtgaacgtgaagagcagactgaagcaggcccccagataccccagcctggccagagagctgatcgagtaccaggagagacagctgttcgagtacttcgtggtggtgagcctgcacaagaagcaggccggcgccgcctacgtgcccgagctgacccagcagttccccctgaagctggagagaagcttcaagttcatgagagaggccgaggaccagctgaaggccatcccccagttctgcttccccgacgccaaggactgggtgcccgtgcagcagttcaccagcgagaccttcagcttcgtgctgaccggcgaggacggcagcagaagattcggctactgcagaagactgctgcccggcggcaagggcaagagactgcccgaggtgtactgcatcgtgagcagactgggctgcttcagcctgttcagcagaatcctggacgaggtggagaagagaagaggcatcagccccgccctggtgcagcccctgatgagaagcgtgatggaggcccccttccccgccctgggcaagaccatcctggtgaagaacttcctgcccggcagcggcaccgaggtgatcgagctgtgcagacccctggacagcagactggagcacgtggacttcgagagcctgttcagcagcctgagcgtgagacacctggtgtgcgtgttcgccagcctgctgctggagagaagagtgatcttcatcgccgacaagctgagcatcctgagcaagtgctgccacgccatggtggccctgatctaccccttcgcctggcagcacacctacatccccgtgctgccccccgccatggtggacatcgtgtgcagccccacccccttcctgatcggcctgctgagcagcagcctgcccctgctgagagagctgcccctggaggaggtgctggtggtggacctggtgaacagcagattcctgagacagatggacgacgaggacagcatcctgcccagaaagctgcaggtggccctggagcacatcctggagcagagaaacgagctggcctgcgagcaggacgagggccccctggacggcagacacggccccgagagcagccccctgaacgaggtggtgagcgaggccttcgtgagattcttcgtggagatcgtgggccactacagcctgttcctgaccagcggcgagagagaggagagaaccctgcagagagaggccttcagaaaggccgtgagcagcaagagcctgagacacttcctggaggtgttcatggagacccagatgttcagaggcttcatccaggagagagagctgagaagacaggacgccaagggcctgttcgaggtgagagcccaggagtacctggagaccctgcccagcggcgagcacagcggcgtgaacaagttcctgaagggcctgggcaacaagatgaagttcctgcacaagaagtag

SEQ ID NO: 187809 - DNA, 3030 bp, Artificial Sequence
  derived and/or modified sequence
atggatatgttcagcctggacatgattatctcggaccctgccgctgaagccagcagagccggcaaaaaacagctccgtggcgtccaaaacccatgtccctcagctagggccaggcctcgtcataaaagcttgaatataaaggataagatatctgagtgggaagggaaaaaagaggttcccaccccagccccaagccggcgcgcagacggtcaggaggattatctccctagttcaaccgtcgagagacggagtagcgacggagtgaggacccaggtgaccgaagctaaaaatggcatgcggcctggaaccgagagcaccgagaaggagcgaaataagggagcagtcaacgtaggtggccaagatcctgaacccgggcaagatctgagtcagccagagcgcgaggtggatccatcatggggcagagggcgagagccaagactcggaaagctgcggttccagaacgaccctctttccgttctaaagcaggttaagaagctggagcaggccctcaaagatggaagtgctggcctggacccccaactacccgggacttgttattcccctcactgccctccagacaaagccgaggcagggagcactttgcctgagaatctcggcggggggagcgggtctgaagtgtcacagcgggtccacccttcagacctggagggccgcgaaccaacgcccgagctggtggaggatcggaagggctcatgtcgtaggccctgggatagatctctggaaaatgtctaccggggatcagaaggctcacccactaagcccttcatcaacccattgccgaaacctagaagaacgtttaagcacgccggggagggagataaggatggcaagcccggaatcgggttccgcaaggagaagagaaatctgcctcccctgccttcactgccaccaccacctcttccctcttcacctccgccatcctccgtgaacaggcgcttgtggactggtcgccagaagtcttccgcggatcacagaaaatcgtatgagtttgaggacctgctgcagagctcaagcgagtcctcccgcgtggactggtatgcacagaccaaactgggactgacaagaaccctaagcgaggagaatgtgtacgaagacatccttgaccccccgatgaaggaaaatccctacgaggacattgagctccatgggagatgtctgggtaaaaaatgtgtattgaatttcccggccagtcccacatcatccatcccagatacgctgacaaagcagtccctgtctaagccggccttctttagacagaattccgagcggaggaattttaagcttctggacactaggaagctgagtagggacgggacaggaagtccatccaaaatttctccaccttctaccccatctagccctgatgatatcttctttaatctaggcgacccccagaatggccggaagaaacggaagatccccaagcttgtcctacgtataaacgccatctacgaagtgcgaaggggtaaaaagcgggtaaagcgcctctcacagtctatggagtcaaactccggcaaagttacagacgagaatagcgagagcgactccgacactgaggaaaagttgaaggcccatagccagagactggtaaatgtgaagtcacgactgaaacaagctcccaggtatcctagcctggctcgcgagcttatcgaataccaggagcgtcagctctttgaatactttgtggtggtgagtctgcacaagaagcaggcaggggccgcatatgtccctgagctgactcaacagtttcctttgaaactcgagaggtcctttaagttcatgagggaagccgaggaccaactgaaggcaatcccccaattctgttttcctgacgcgaaggactgggttcccgtgcaacagtttacaagcgaaaccttctctttcgttctcaccggcgaggacggctcccgccgatttgggtactgccggagactgttgcccggagggaaaggcaaaagactgcctgaggtctattgcatcgtgtcgaggctgggctgcttctctctgttcagccgcattctggatgaagtagagaagcggagagggattagtcctgcgttagtgcagcctctaatgcgctcagtgatggaagctccctttcctgccttggggaagacaatccttgtcaaaaatttcctcccaggctcaggcacagaggtgatcgaactttgtcgccctctggactctagactggagcatgtcgacttcgagagcctcttttcgagcctgtctgttagacacttggtgtgcgtatttgcttccttgctgctagaaaggagagtcattttcatcgcggataagttatccattctgagcaaatgctgtcacgccatggtggcactgatttacccattcgcatggcagcatacatatatccccgtgctgccacctgctatggtcgacattgtatgtagcccaaccccatttctaatcggcttgttgtcttccagcctgccccttctccgagagctccctctggaggaggtattagtcgtcgacctggtgaacagtcgctttcttaggcaaatggatgatgaagactcaatcctcccacgtaagctccaagttgccctggagcacattctggagcagaggaacgagctggcctgcgagcaggacgaggggccccttgatgggcgccatggacctgaaagcagcccactcaacgaagtggtcagcgaggcgtttgtgaggttctttgtggagatcgtggggcattattctctgttcctgacctccggcgaaagggaagagagaacattacagcgggaggcgtttaggaaggcagtgagcagcaagtccttaaggcacttcttggaggtatttatggaaacccagatgttccgcggctttatccaagagcgagagctccggagacaggatgcaaaaggtctgtttgaggtgcgcgcccaggaatacctggagaccttgccgtcaggcgagcacagcggggtaaataaatttttaaagggcctggggaataaaatgaagtttctgcacaaaaagtag

SEQ ID NO: 187810 - DNA, 3030 bp, Artificial Sequence
  derived and/or modified sequence
atggatatgttttctttggacatgatcattagcgaccccgctgccgaggcaagcagggcgggcaaaaagcaactgcgcggtgtccagaacccctgcccgtccgctcgcgcacgaccacgccacaagagtctaaatattaaagataagatcagcgaatgggaggggaagaaagaggtgcccacacccgccccatccagacgcgctgacggccaagaggactaccttccaagttccacagttgagcgaagatcgagcgacggagtgaggacccaggtgaccgaggctaagaatgggatgcgaccaggcactgaatctacggagaaagaaagaaataaaggcgccgttaacgtgggtggtcaggacccggaacctggtcaagacctatcccaacccgagagggaggtggacccatcttgggggagggggcgagagcctcggttaggaaaactgcgcttccagaacgaccctctaagtgtcctgaaacaagtgaaaaagctggagcaggcactcaaggacggatctgccgggttggatccgcagctgcccggcacctgttattccccacactgccccccggacaaagcagaagcaggatccacactgccagagaatctgggcggagggtcggggtcagaggtgagccaaagagtacatccaagcgatctcgagggacgagagcctactcctgagttggtagaagacaggaagggcagctgccgcagaccctgggataggtctttggaaaatgtatacagggggtctgagggtagccccactaaacccttcattaatcccctgcccaaacctcgtagaacctttaagcatgctggggaaggcgataaagacggtaagcccgggattgggttcaggaaagagaaacggaacctgcctccactccctagcttaccccctccccctctcccttcatcacccccaccatctagcgtgaacagacggctgtggacaggcaggcaaaagagtagcgccgaccacaggaagagctatgaatttgaggatctgctgcaatcaagtagcgaatcttcccgcgtggactggtacgcccagaccaagctgggcctcacccgcactctctctgaggagaacgtctatgaggatattctcgacccacccatgaaagagaacccttatgaggacatcgaactgcacggacgctgcttgggtaagaagtgcgtgctcaattttccagcaagcccaacctcatctattccagacactctcaccaaacagagcctgtcgaaacccgcattctttcgacagaattcggaacgcagaaacttcaagctcctcgatacacggaagctgtcccgcgacgggacaggaagtccgagtaaaatttcgcccccatcaacaccttccagccctgatgatatcttctttaaccttggcgatccacaaaacggccgcaagaagaggaagattcccaagctggtgctgagaatcaacgccatctacgaagtgcggaggggtaagaagagggtgaaacgactctcacaatcgatggagagtaactctggcaaggtgacagatgagaattctgaaagtgactctgatacagaagaaaagctcaaagctcactcccagcgtctcgtaaatgttaaatcacggctgaaacaggccccccgctatcccagtttggcccgggagctgatagaatatcaggagaggcagctcttcgaatatttcgttgtggtgtctctgcataagaaacaagccggagcagcttatgtgccggagctgacccagcagttcccactaaagctcgagagatcctttaagttcatgagagaagcggaggaccagctgaaggcgatcccacagttctgtttcccagatgctaaagattgggtgcctgtacaacaattcacatctgagacgttctcctttgtgcttacaggcgaagatggttctcgccggttcggctactgcagaagattgctccccggcgggaaaggaaaaaggctgcccgaagtgtattgtatcgttagcaggctgggttgcttcagcctgtttagtcggatcctcgatgaagtggaaaaacgtagagggatctcacccgccttggtgcaaccactgatgagaagtgttatggaagctccgttccccgcactagggaaaactattctcgtgaaaaactttttgccgggatccggcacggaggttattgaactatgtcggcctttagactcgcgcttggaacacgttgacttcgaatcccttttttcctccttaagcgttaggcatttggtctgcgtgttcgcctccttgctgctggagcggagagtgatttttatcgcagacaagcttagtatattaagtaagtgctgtcacgcgatggtagctttgatctaccctttcgcgtggcagcacacctacatccctgtccttccacccgcgatggtcgatatcgtctgttctcctaccccatttctcatcggcctgttgtctagcagtctccccttgttacgggagctgccgctcgaagaggtgcttgtcgtggacctggtaaactcaagatttctaagacagatggacgatgaagactccattttgcccagaaagttgcaggtggcccttgagcatattcttgagcagcgcaacgagctagcttgtgaacaggatgaagggccactggatgggagacacggcccagaaagcagcccgctgaatgaagtagttagcgaagctttcgtgcgctttttcgtggagatcgtgggtcactattccttattcctcacctctggcgagcgtgaggagcggacactgcagcgtgaagcgtttcggaaagctgtcagctccaagtctttgaggcacttcctggaggtgtttatggagacccagatgttccgtggcttcatacaggagcgcgaactgagacgccaagacgcgaaaggtctctttgaggtgcgggcacaggaatatctggagactcttccgagtggcgagcacagcggcgtgaataaattcttaaaaggactgggcaataaaatgaaatttctgcacaaaaagtag

SEQ ID NO: 187811 - DNA, 3030 bp, Artificial Sequence
  derived and/or modified sequence
atggacatgttttctctggacatgattatctcagatccagccgccgaagcctccagagcgggaaagaagcaattgcgcggagtccaaaacccttgtccttctgcgcgggcgcgcccaaggcacaaatcacttaacatcaaggataagatctcggagtgggagggaaagaaagaggtgcccactcctgccccctctcggagagcagatggacaagaagattatttaccttcatctaccgtagagcggaggagcagtgatggagtacggactcaggtgaccgaagccaaaaacgggatgagaccagggactgaaagcactgaaaaggagcggaacaagggcgcagtaaacgtcggcggccaggatcctgagccgggccaggatctcagccagcccgaaagggaggtggacccctcgtggggcagaggacgagaaccacgtctggggaaactgcgcttccaaaacgaccccttgagtgtcctaaaacaggtgaagaagctggaacaggcactgaaagatggatcagccggcctggaccctcagttaccaggaacttgctatagcccacactgtccacccgataaagctgaagcagggagcacacttccggagaacttggggggcggttccggatccgaggtgtctcagagagtgcaccctagcgatctggaaggcagagaaccaacaccagaacttgtagaggaccgtaagggctcatgtcgccgtccctgggataggtcccttgagaacgtttatcgcggcagcgaaggatcacctacgaagcccttcattaacccgctgccaaagcccaggcgtacattcaaacatgccggggaaggcgataaagacgggaaacctggcatcgggtttagaaaagagaaaaggaatctgcctccgctccccagcctccctcctcctcccctaccgtcctctccaccccctagctccgttaatcgacgattatggacaggccggcagaaatcatctgctgaccataggaagtcttatgagtttgaggacctgctacagtcatcaagcgaatcctcaagggtggactggtatgcacagactaagctggggctgacacgcacgctgtcggaggaaaacgtttatgaggatatactggacccacccatgaaagaaaacccatacgaggatattgaactgcacggcaggtgtctgggaaagaagtgtgtactcaacttccctgcctcaccaacgtcaagcattcctgacacacttaccaagcagtctttgagcaagcctgcatttttcaggcagaattccgaaagacggaactttaaactgctggacacaaggaaattaagtcgggatggaaccgggagtccctctaagatcagtccaccaagcaccccctccagtcctgatgacatcttctttaacctgggagatccacagaacgggaggaaaaaacgtaagattcccaagctggtgctgcggattaacgcaatttatgaagtccgaagaggcaagaagagagttaaacgcctcagccagtccatggagagcaacagcggaaaggtgacggatgaaaacagtgagagtgacagtgatactgaggaaaagttgaaagcccactcccagcgtttggtcaacgtcaagtcgagactgaagcaagcaccccgatatccttcacttgctcgggaactaatagagtaccaggagcgtcagctatttgaatacttcgttgtggtgagtcttcataaaaagcaggctggcgccgcatacgtccctgaacttactcagcagtttccactgaagttggaaaggtccttcaagtttatgcgcgaggctgaggatcagttgaaggccattccccagttttgtttccctgacgccaaggactgggtccctgtgcagcagtttacttctgagacatttagcttcgtcctgacaggggaagatggttcacggcggttcggatattgcagacgactgttgcccggcgggaaaggaaagcgtctacccgaagtgtattgcatcgtgtcaagactcggatgctttagtctgttttccagaattctggatgaggtggaaaaacgcagaggaatcagtcctgcccttgtgcaacccctgatgcgttcggtgatggaggcaccatttccagcactgggaaagaccatcttggtgaagaatttcctacccggctctggaaccgaggtcatcgagttgtgcagaccactcgattcgcggcttgaacacgtagacttcgaatctctgttcagctccttgagtgtgagacacctagtctgtgtgttcgccagcttgctgctggagagaagggtgatattcattgcggataaactgtccattttgtctaaatgctgtcatgccatggtggcccttatctacccttttgcatggcagcacacttatatcccagttctgcctcctgccatggtggacatagtgtgtagtccaactccgtttttgattggcctgctctcctcttctctgcccctgttaagagaacttcctctggaagaggtgctcgtcgtcgacctcgtcaatagcaggtttctgcgacaaatggacgacgaagacagcatcttgccccggaagttacaggtggctctggaacatatcctcgagcagcggaacgagctggcttgtgagcaggatgagggacccctggatgggcgccacggtccagagagctcacctctgaacgaggtggtgagcgaggcctttgtaagatttttcgttgagattgtcggccactatagcctttttctgacatcgggggaacgagaggaaaggacgcttcagcgggaggccttcagaaaagccgttagttcaaagtccctccggcattttctggaagtgtttatggagacccaaatgttcaggggctttatccaggagagggagctgaggcgccaagatgccaagggtctatttgaggttcgtgcccaggagtatctggagaccctgccatctggcgagcatagtggtgtgaacaagttcctgaaaggcttgggaaataagatgaagttcctgcacaagaagtag

SEQ ID NO: 187812 - DNA, 3735 bp, Artificial Sequence
  derived and/or modified sequence
gccgcgggcgagcctgcgctgggccggccgagggaagcgcgccgctggggccgggggcggcggggaccccacgggagcgcgcgcggcggggacccccaggggcttgcgggcggccgggggaggctcggcggacaaaggggcggagggcggagggccatggcgtccccggcacccgccgccgcccgcccccgagccgcgccgccagccgtcccggcccgccccggagcccccaagatgcgccccagagcccgcggagccgccgcccgcggggagggtcaaggtggaaggtccaaggactgagaaagaccctcgaaggcatccactttagtcctccattccattcctagagactgatcaggagtcaggcttcagaaggagtcccctggaaggcctccacaacctcacgctagagtcaagaatggatatgttcagcttggatatgatcatcagtgacccagctgcagaagccagcagggctgggaagaagcagctcagaggtgttcagaacccttgcccatctgccagagccagaccccggcacaagtccctcaacataaaggacaagatatcagaatgggaagggaagaaagaggtgcccactcctgcacccagcaggagagcagacggacaggaggattatctgccgtcctctacggtggagaggaggagtagtgatggggtgagaactcaggtcacagaggctaagaatggaatgaggccaggaacagagagcacagagaaggagaggaataaaggagcagtgaacgtcgggggacaggacccagagccggggcaagacctaagccagccagaacgggaagtggatcctagctggggccgaggccgagagccaagacttggcaagctacgctttcagaacgatcccctctccgtgctgaagcaggtcaagaaactcgagcaggctttgaaggatgggtcggcagggctggatccccagttaccagggacttgttactccccacactgccctcctgacaaggcagaggcagggtccacccttcctgagaacctgggaggcgggagtggctcagaagtcagccagagggtccacccctcggacctggaaggcagggagcccacccctgagcttgtggaggacaggaaaggttcatgcagaaggccctgggaccggagccttgagaacgtgtataggggctcggagggttcccccacaaagcccttcatcaaccctctgccaaaaccccggagaacgttcaaacatgccggagaaggggacaaagatgggaagcctggcatcggcttcaggaaagagaaaagaaatctgcctcctctgccctctctacctcccccgcctctgccctcctctcccccaccttcctctgtgaacagaagactgtggaccgggagacagaaatccagtgcagaccacagaaagtcctatgagtttgaagatttactgcagtcttcctctgagagcagcagggtggactggtacgcgcagactaagctggggctgacacgcactttatcggaggagaacgtctatgaagacattctagatccgccaatgaaggagaacccttatgaggacatcgagttacatggtcgctgcctgggaaagaagtgtgtcttgaattttcctgcttctcccacctcttccatccctgacacactcaccaagcagtcattgtccaaacctgcttttttccgacaaaattcagagaggaggaacttcaagctgctggacactaggaagctgagtcgggatggaactgggtccccttccaaaatcagccctccctccactcccagcagccctgatgacattttctttaaccttggagacccacagaacggcaggaagaagagaaagatacccaagctggtgttgcgaatcaacgccatttatgaggtccggagaggaaagaaacgggtgaagaggctgtcccagtcaatggagagcaactcaggaaaagtgacagatgagaacagtgagtctgacagtgacacagaggagaagctgaaagctcacagccagcgcctggtcaacgtgaagtcccggctgaagcaggcgcctcggtacccatcacttgcccgggaactcatcgagtaccaggagaggcagctcttcgagtactttgtggttgtgtctttgcacaagaagcaggccggggctgcctacgtgccagaactcacccaacagttccctctgaagttggaaaggtctttcaagttcatgagagaagctgaggaccaactgaaggccattccccagttctgttttcccgatgccaaggattgggttcctgtccagcagttcaccagtgaaacattctcatttgtcttaactggagaagatgggagcagaaggttcggttactgccgaagactgctgcctggaggcaaagggaagcgccttcctgaagtttactgcattgtgagccgcctgggatgcttcagcctcttttcaaggatcttggatgaggtggaaaaaagacgaggcatctctcctgccctggttcagccactcatgagaagtgtcatggaagcccctttcccagccctgggcaaaaccatccttgtcaagaacttcctgccaggttcaggaactgaggtgatcgaactgtgccgcccgctggactcccggctcgagcacgtggactttgagtctctcttctcctccctcagcgtccgccacctggtctgtgtgtttgcctccctgcttctggagaggagggtcatcttcattgcagacaagctcagcatcctgtccaagtgctgccacgcgatggtggcgctgatctaccccttcgcctggcagcacacctacatcccggtgctgccacccgccatggtcgacatcgtgtgctcgccgacgcccttcctcatcgggctgctctccagctcgctgccactgctcagggagctgccgctggaagaggtccttgtggttgacctcgtcaacagccggttcctcagacagatggacgatgaggactccatcctgccccggaagcttcaggtggccctggaacacattctggaacagaggaacgagctggcttgtgagcaggacgaagggcccctagacggcaggcacggtccagagtccagccccttgaacgaggtggtgtctgaagcctttgtccgcttcttcgtggagattgtgggacactactctttgttcctgacgtcgggcgagcgtgaggagagaaccctgcagcgggaggccttccgcaaagctgtctcctccaagagcctccgccacttcctggaggtcttcatggagactcagatgtttcggggcttcatccaggagcgggagctgcgccggcaggatgccaaaggtctgtttgaggtccgagcccaagagtatctggaaacactccccagtggagagcacagcggtgtcaataagttcctgaagggactaggcaataaaatgaaatttctccacaagaaataactctcagcctcaagggaaaacttcctcctagtgcagccctatgctttaaaaacagttcctggtggcctttctgaaaggctgggtcccaggttgtcacggtgcggaactggaggccgcggtggcttctggccgaggctgggctcttccctggatgaggacctgggagccgcctgggaggacagccccagaaagggagcccgagaccaggcgtgtcgccgacatgcaaatgggttgttttggtggttgggtttttttttttatcttagatattaaaagtaagaaaaatg

SEQ ID NO: 187813 - DNA, 3562 bp, Artificial Sequence
  derived and/or modified sequence
aagatgcgccccagagcccgcggagccgccgcccgcggggaggtgacctggaactcccctcggtactgacatgatgacagtgtgcaggccggccaagggcagccacagccagactgaaaacctgagctacaaattggctgacaaggtcaaggtggaaggtccaaggactgagaaagaccctcgaaggcatccactttagtcctccattccattcctagagactgatcaggagtcaggcttcagaaggagtcccctggaaggcctccacaacctcacgctagagtcaagaatggatatgttcagcttggatatgatcatcagtgacccagctgcagaagccagcagggctgggaagaagcagctcagaggtgttcagaacccttgcccatctgccagagccagaccccggcacaagtccctcaacataaaggacaagatatcagaatgggaagggaagaaagaggtgcccactcctgcacccagcaggagagcagacggacaggaggattatctgccgtcctctacggtggagaggaggagtagtgatggggtgagaactcaggtcacagaggctaagaatggaatgaggccaggaacagagagcacagagaaggagaggaataaaggagcagtgaacgtcgggggacaggacccagagccggggcaagacctaagccagccagaacgggaagtggatcctagctggggccgaggccgagagccaagacttggcaagctacgctttcagaacgatcccctctccgtgctgaagcaggtcaagaaactcgagcaggctttgaaggatgggtcggcagggctggatccccagttaccagggacttgttactccccacactgccctcctgacaaggcagaggcagggtccacccttcctgagaacctgggaggcgggagtggctcagaagtcagccagagggtccacccctcggacctggaaggcagggagcccacccctgagcttgtggaggacaggaaaggttcatgcagaaggccctgggaccggagccttgagaacgtgtataggggctcggagggttcccccacaaagcccttcatcaaccctctgccaaaaccccggagaacgttcaaacatgccggagaaggggacaaagatgggaagcctggcatcggcttcaggaaagagaaaagaaatctgcctcctctgccctctctacctcccccgcctctgccctcctctcccccaccttcctctgtgaacagaagactgtggaccgggagacagaaatccagtgcagaccacagaaagtcctatgagtttgaagatttactgcagtcttcctctgagagcagcagggtggactggtacgcgcagactaagctggggctgacacgcactttatcggaggagaacgtctatgaagacattctagatccgccaatgaaggagaacccttatgaggacatcgagttacatggtcgctgcctgggaaagaagtgtgtcttgaattttcctgcttctcccacctcttccatccctgacacactcaccaagcagtcattgtccaaacctgcttttttccgacaaaattcagagaggaggaacttcaagctgctggacactaggaagctgagtcgggatggaactgggtccccttccaaaatcagccctccctccactcccagcagccctgatgacattttctttaaccttggagacccacagaacggcaggaagaagagaaagatacccaagctggtgttgcgaatcaacgccatttatgaggtccggagaggaaagaaacgggtgaagaggctgtcccagtcaatggagagcaactcaggaaaagtgacagatgagaacagtgagtctgacagtgacacagaggagaagctgaaagctcacagccagcgcctggtcaacgtgaagtcccggctgaagcaggcgcctcggtacccatcacttgcccgggaactcatcgagtaccaggagaggcagctcttcgagtactttgtggttgtgtctttgcacaagaagcaggccggggctgcctacgtgccagaactcacccaacagttccctctgaagttggaaaggtctttcaagttcatgagagaagctgaggaccaactgaaggccattccccagttctgttttcccgatgccaaggattgggttcctgtccagcagttcaccagtgaaacattctcatttgtcttaactggagaagatgggagcagaaggttcggttactgccgaagactgctgcctggaggcaaagggaagcgccttcctgaagtttactgcattgtgagccgcctgggatgcttcagcctcttttcaaggatcttggatgaggtggaaaaaagacgaggcatctctcctgccctggttcagccactcatgagaagtgtcatggaagcccctttcccagccctgggcaaaaccatccttgtcaagaacttcctgccaggttcaggaactgaggtgatcgaactgtgccgcccgctggactcccggctcgagcacgtggactttgagtctctcttctcctccctcagcgtccgccacctggtctgtgtgtttgcctccctgcttctggagaggagggtcatcttcattgcagacaagctcagcatcctgtccaagtgctgccacgcgatggtggcgctgatctaccccttcgcctggcagcacacctacatcccggtgctgccacccgccatggtcgacatcgtgtgctcgccgacgcccttcctcatcgggctgctctccagctcgctgccactgctcagggagctgccgctggaagaggtccttgtggttgacctcgtcaacagccggttcctcagacagatggacgatgaggactccatcctgccccggaagcttcaggtggccctggaacacattctggaacagaggaacgagctggcttgtgagcaggacgaagggcccctagacggcaggcacggtccagagtccagccccttgaacgaggtggtgtctgaagcctttgtccgcttcttcgtggagattgtgggacactactctttgttcctgacgtcgggcgagcgtgaggagagaaccctgcagcgggaggccttccgcaaagctgtctcctccaagagcctccgccacttcctggaggtcttcatggagactcagatgtttcggggcttcatccaggagcgggagctgcgccggcaggatgccaaaggtctgtttgaggtccgagcccaagagtatctggaaacactccccagtggagagcacagcggtgtcaataagttcctgaagggactaggcaataaaatgaaatttctccacaagaaataactctcagcctcaagggaaaacttcctcctagtgcagccctatgctttaaaaacagttcctggtggcctttctgaaaggctgggtcccaggttgtcacggtgcggaactggaggccgcggtggcttctggccgaggctgggctcttccctggatgaggacctgggagccgcctgggaggacagccccagaaagggagcccgagaccaggcgtgtcgccgacatgcaaatgggttgttttggtgg

SEQ ID NO: 187814 - DNA, 3452 bp, Artificial Sequence
  derived and/or modified sequence
ggtcaaggtggaaggtccaaggactgagaaagaccctcgaaggcatccactttagtcctccattccattcctagagactgatcaggagtcaggcttcagaaggagtcccctggaaggcctccacaacctcacgctagagtcaagaatggatatgttcagcttggatatgatcatcagtgacccagctgcagaagccagcagggctgggaagaagcagctcagaggtgttcagaacccttgcccatctgccagagccagaccccggcacaagtccctcaacataaaggacaagatatcagaatgggaagggaagaaagaggtgcccactcctgcacccagcaggagagcagacggacaggaggattatctgccgtcctctacggtggagaggaggagtagtgatggggtgagaactcaggtcacagaggctaagaatggaatgaggccaggaacagagagcacagagaaggagaggaataaaggagcagtgaacgtcgggggacaggacccagagccggggcaagacctaagccagccagaacgggaagtggatcctagctggggccgaggccgagagccaagacttggcaagctacgctttcagaacgatcccctctccgtgctgaagcaggtcaagaaactcgagcaggctttgaaggatgggtcggcagggctggatccccagttaccagggacttgttactccccacactgccctcctgacaaggcagaggcagggtccacccttcctgagaacctgggaggcgggagtggctcagaagtcagccagagggtccacccctcggacctggaaggcagggagcccacccctgagcttgtggaggacaggaaaggttcatgcagaaggccctgggaccggagccttgagaacgtgtataggggctcggagggttcccccacaaagcccttcatcaaccctctgccaaaaccccggagaacgttcaaacatgccggagaaggggacaaagatgggaagcctggcatcggcttcaggaaagagaaaagaaatctgcctcctctgccctctctacctcccccgcctctgccctcctctcccccaccttcctctgtgaacagaagactgtggaccgggagacagaaatccagtgcagaccacagaaagtcctatgagtttgaagatttactgcagtcttcctctgagagcagcagggtggactggtacgcgcagactaagctggggctgacacgcactttatcggaggagaacgtctatgaagacattctagatccgccaatgaaggagaacccttatgaggacatcgagttacatggtcgctgcctgggaaagaagtgtgtcttgaattttcctgcttctcccacctcttccatccctgacacactcaccaagcagtcattgtccaaacctgcttttttccgacaaaattcagagaggaggaacttcaagctgctggacactaggaagctgagtcgggatggaactgggtccccttccaaaatcagccctccctccactcccagcagccctgatgacattttctttaaccttggagacccacagaacggcaggaagaagagaaagatacccaagctggtgttgcgaatcaacgccatttatgaggtccggagaggaaagaaacgggtgaagaggctgtcccagtcaatggagagcaactcaggaaaagtgacagatgagaacagtgagtctgacagtgacacagaggagaagctgaaagctcacagccagcgcctggtcaacgtgaagtcccggctgaagcaggcgcctcggtacccatcacttgcccgggaactcatcgagtaccaggagaggcagctcttcgagtactttgtggttgtgtctttgcacaagaagcaggccggggctgcctacgtgccagaactcacccaacagttccctctgaagttggaaaggtctttcaagttcatgagagaagctgaggaccaactgaaggccattccccagttctgttttcccgatgccaaggattgggttcctgtccagcagttcaccagtgaaacattctcatttgtcttaactggagaagatgggagcagaaggttcggttactgccgaagactgctgcctggaggcaaagggaagcgccttcctgaagtttactgcattgtgagccgcctgggatgcttcagcctcttttcaaggatcttggatgaggtggaaaaaagacgaggcatctctcctgccctggttcagccactcatgagaagtgtcatggaagcccctttcccagccctgggcaaaaccatccttgtcaagaacttcctgccaggttcaggaactgaggtgatcgaactgtgccgcccgctggactcccggctcgagcacgtggactttgagtctctcttctcctccctcagcgtccgccacctggtctgtgtgtttgcctccctgcttctggagaggagggtcatcttcattgcagacaagctcagcatcctgtccaagtgctgccacgcgatggtggcgctgatctaccccttcgcctggcagcacacctacatcccggtgctgccacccgccatggtcgacatcgtgtgctcgccgacgcccttcctcatcgggctgctctccagctcgctgccactgctcagggagctgccgctggaagaggtccttgtggttgacctcgtcaacagccggttcctcagacagatggacgatgaggactccatcctgccccggaagcttcaggtggccctggaacacattctggaacagaggaacgagctggcttgtgagcaggacgaagggcccctagacggcaggcacggtccagagtccagccccttgaacgaggtggtgtctgaagcctttgtccgcttcttcgtggagattgtgggacactactctttgttcctgacgtcgggcgagcgtgaggagagaaccctgcagcgggaggccttccgcaaagctgtctcctccaagagcctccgccacttcctggaggtcttcatggagactcagatgtttcggggcttcatccaggagcgggagctgcgccggcaggatgccaaaggtctgtttgaggtccgagcccaagagtatctggaaacactccccagtggagagcacagcggtgtcaataagttcctgaagggactaggcaataaaatgaaatttctccacaagaaataactctcagcctcaagggaaaacttcctcctagtgcagccctatgctttaaaaacagttcctggtggcctttctgaaaggctgggtcccaggttgtcacggtgcggaactggaggccgcggtggcttctggccgaggctgggctcttccctggatgaggacctgggagccgcctgggaggacagccccagaaagggagcccgagaccaggcgtgtcgccgacatgcaaatgggttgttttggtggttgggtttttttttttatcttagatattaaaagt

SEQ ID NO: 187815 - DNA, 3030 bp, Artificial Sequence
  derived and/or modified sequence
atggacatgttcagcctggacatgatcatcagtgaccctgctgctgaggccagccgggccggcaagaagcagctgcggggcgtgcagaacccctgccccagcgcccgggcccggcccaggcacaagagcctgaacatcaaggacaagatcagcgagtgggagggcaagaaggaggtgcccaccccagcccccagccggcgggcagatggccaggaggactacctgcccagcagcacagtggagcggcgcagcagtgatggagtgaggacccaggtgacagaggccaagaatggcatgaggcctggaacagagagcacagagaaggagaggaacaagggagctgtgaatgtgggcggccaggaccctgagcccggccaggacctgagccagcctgagcgggaggtggaccccagctggggccggggccgggagccccggctgggcaagctgcgcttccagaatgaccccctgtctgtgctgaagcaggtgaagaagctggagcaggccctgaaggatggcagcgctggcctggacccccagctgcccggcacctgctacagcccccactgccccccagacaaggccgaggccggcagcaccctgcctgagaacctgggcggcggcagcggcagcgaggtgtcccagagggtgcaccccagcgacctggagggccgggagcccaccccagagctggtggaggacaggaagggcagctgccggcggccctgggacaggagcctggagaatgtgtaccggggcagcgagggcagccccaccaagcccttcatcaaccccctgcccaagcccaggaggaccttcaagcacgccggggagggggacaaggatggcaagccaggcatcggcttcaggaaggagaagaggaacctgccccccctgcccagcctgcccccaccacccctgcccagcagccccccacccagctctgtgaacagaaggctgtggacaggccggcagaagagcagcgctgaccacaggaagagctatgaatttgaggacctgctgcagagcagcagcgagagcagccgggtggactggtacgcccagaccaagctgggcctgaccaggaccctgtctgaagaaaatgtgtatgaggacatcctggacccccccatgaaggagaacccctatgaggacatcgagctgcacggccgctgcctgggcaagaagtgtgtgctgaacttccctgccagccccaccagcagcatcccagacaccctgaccaagcagagcctgagcaagccagccttcttccggcagaacagcgagaggaggaacttcaagctgctggacaccaggaagctgagcagagatggcaccggcagccccagcaagatcagcccccccagcacccccagcagcccagatgacatcttcttcaacctgggggacccccagaatggaaggaagaagaggaagatccccaagctggtgctgcgcatcaatgccatctatgaggtgcggcggggcaagaagagggtgaagaggctgagccagagcatggagagcaacagcggcaaggtgacagatgaaaattctgagagtgacagcgacacagaggagaagctgaaggcccacagccagaggctggtgaatgtgaagagccggctgaagcaggccccccgctaccccagcctggcccgggagctgattgagtaccaggagcggcagctgtttgagtactttgtggtggtgtccctgcacaagaagcaggccggggccgcctacgtgcctgagctgacccagcagttccccctgaagctggagaggagcttcaagttcatgagggaggccgaggaccagctgaaggccatcccccagttctgcttcccagatgccaaggactgggtgcctgtgcagcagttcaccagcgagaccttctcctttgtgctgaccggggaggatggcagccgccgcttcggctactgccggcggctgctgcccggcggcaagggcaagaggctgcctgaggtgtactgcatcgtgtcccggctgggctgcttcagcctcttcagccgcatcctggatgaggtggagaagagaagaggcatcagccctgccctggtgcagcccctgatgaggtctgtgatggaggcccccttccctgccctgggcaagaccatcctggtgaagaacttcctgcccggcagcggcacagaggtgattgagctgtgccggcccctggacagccggctggagcacgtggactttgagagcctcttcagcagcctgtctgtgcgccacctggtgtgtgtgtttgccagcctgctgctggagcggcgggtcatcttcatcgctgacaagctgagcatcctgagcaagtgctgccacgccatggtggccctgatctacccctttgcctggcagcacacctacatccctgtgctgcccccagccatggtggacatcgtgtgcagccccacccccttcctgattggcctgctgagcagcagcctgcccctgctgcgggagctgcccctggaggaggtgctggtggtggacctggtgaacagccgcttcctgcggcagatggatgatgaagattccatcctgcccaggaagctgcaggtggccctggagcacatcctggagcagagaaatgagctggcctgtgagcaggatgagggccccctggatggccgccacggccctgagagcagccccctgaatgaggtggtgtctgaggcctttgtgcgcttctttgtggagatcgtgggccactacagcctcttcctgaccagcggggagcgggaggagaggaccctgcagcgggaggccttcaggaaggctgtgagcagcaagagcctgcggcacttcctggaggtgttcatggagacccagatgttccggggcttcatccaggagcgggagctgcggcggcaggatgccaagggcctgtttgaggtgcgggcccaggagtacctggagaccctgcccagcggggagcacagcggcgtgaacaagttcctgaagggcctgggcaacaagatgaagttcctgcacaagaagtag

SEQ ID NO: 187816 - DNA, 3030 bp, Artificial Sequence
  derived and/or modified sequence
atggacatgttcagcctggacatgatcatcagcgaccccgccgccgaggcctcccgcgcagggaaaaaacagctgcgtggggttcagaatccctgcccttccgcacgtgcgaggccccgacacaaaagcctcaatataaaggataagatttcggagtgggagggaaagaaggaggtgccaacccctgcaccaagccggagagccgacggccaggaggactacctgccctccagcacagtggaacggcggagctctgacggcgtccgcacacaagtgacagaagccaagaatggtatgaggccaggtaccgagtctaccgagaaggaacgcaacaagggcgcagtcaacgttggcggacaagatccggaacctgggcaggatctcagtcagcccgagcgggaagtggatccatcttggggcagaggccgcgaacccagattgggcaaattaaggttccaaaatgaccccctgtcagtgctcaaacaggtgaagaagctggaacaggccctaaaagatggtagcgccggcctggaccctcagcttcctggtacgtgttactcgcctcattgcccccccgacaaagcagaggctgggtccacacttcccgaaaacttgggaggcggctcaggcagcgaggtgtcccagagggttcaccctagtgacttggagggtagagagccaacaccagagctcgtggaagatcgaaaggggtcttgccgtcgtccctgggacagaagcctcgaaaatgtctatagggggtcggagggctcaccgacgaagcctttcatcaaccccttacctaagccccgacgcacttttaaacacgctggagaaggcgacaaggacggcaagccaggaattggatttagaaaggaaaaacggaacctacctcccctcccgagccttcctccgccacctttaccctcctctccacccccgagctccgtaaaccgcaggctgtggacagggcgccaaaaaagcagtgctgaccacagaaaatcatacgaattcgaggatctgcttcaatccagctctgaatcatcgcgtgtcgattggtatgcgcaaaccaagcttgggcttacgcgcaccctctctgaggaaaacgtgtatgaggacatcctggatcctcccatgaaagaaaacccttatgaagatatcgagttgcatgggcgctgtcttggaaagaagtgtgtgcttaacttccctgcgagccctacaagttcgataccagacactctgacaaagcaatcactgtccaagcccgcattcttcagacagaatagcgagaggagaaacttcaagctgctggacactagaaaactgtcccgggacgggacaggcagtccatccaagatctccccaccctctactccctccagtcccgacgacatcttttttaatctcggggatccacagaacggacgaaaaaaaagaaagattccgaagctggtcctgaggattaatgccatttatgaagttagacgaggtaaaaaaagagtgaaacggctgagtcagtcaatggaaagtaattcgggtaaggtcacggatgaaaacagcgagagcgacagcgataccgaggaaaagctgaaggcccattcccaacggctggtgaacgttaagagcaggctgaaacaggccccacggtacccaagtctcgcaagagagcttattgagtaccaagagaggcagctgttcgagtacttcgttgttgttagcctccataagaagcaggccggtgcagcttacgtaccagagctcacgcagcagttcccacttaaactggagcggtctttcaagttcatgcgcgaagctgaggaccagctgaaggcgattccacagttctgttttcctgacgccaaggattgggtgccagtgcagcagtttacatccgagacgttctcgttcgtactgactggggaagatggctctaggagattcggctactgcaggagactgctgccaggcggcaagggcaagagactacccgaagtctattgtattgtgtcccgtctcggatgcttttctcttttctcccgcattttagacgaggtcgaaaagcggcgggggatcagtccagcacttgtgcagcccctgatgagaagcgtcatggaggccccctttcccgcgctcggcaaaactatcctggtgaagaactttctgccagggtccggcacagaggttattgagctctgtcgcccgttagactcacgcctggagcatgtggacttcgagagccttttctctagtctcagtgtgcggcacctcgtgtgcgtttttgcgagtttgcttttggaacggagagtcatttttatcgcagacaagttgtcaattctgtctaagtgttgtcacgctatggtcgctctgatatacccatttgcttggcagcacacatacatcccagtattgccccctgctatggtggacatcgtgtgttctcctacaccgtttctgatcgggctccttagctcctcacttcctctgctgagggaactaccattagaggaagtcctggtggtggatcttgtgaactcccgatttctcaggcagatggacgatgaagacagcatcctgcctcgcaagctgcaggtcgccctcgaacatatcttagagcagagaaatgaactggcttgtgagcaagatgagggcccgcttgacgggagacatggccctgagtcatcaccattgaacgaagtcgtgtcagaggccttcgtgcgctttttcgtagagattgttggacactactctctgtttcttacctccggtgaaagggaagagaggactcttcagcgggaggcattccggaaggcagttagctccaaaagccttaggcacttccttgaagtttttatggaaactcagatgtttcggggcttcatccaggagcgagagttgagaagacaggacgccaaaggactttttgaggtccgggcacaagaatacttggagacacttccttccggggagcacagtggcgtaaacaagtttctgaagggcctgggaaacaagatgaaatttttgcataaaaagtag

SEQ ID NO: 187817 - DNA, 3030 bp, Artificial Sequence
  derived and/or modified sequence
atggacatgttcagcctggacatgatcatcagcgaccccgccgccgaagccagccgtgccgggaaaaagcaacttaggggcgtgcagaatccatgcccatccgcccgcgctcggcctcggcacaaatcacttaacattaaggataaaatcagcgaatgggaaggaaagaaggaagtcccaacacccgccccaagtcggcgcgctgatggacaagaggactatcttccttcgtcaaccgttgaacgcaggtcctccgacggggtgcggacacaggtcaccgaggccaagaacggcatgagacctggcacagaatcaactgagaaggaaaggaacaagggcgcagtcaacgtaggaggacaagaccccgagccgggacaagatctgagccagccagaaagagaggtagacccttcatgggggagggggagggagcctcggctgggtaagctccgttttcaaaacgatcctctctccgtgctgaagcaagtgaagaaactggaacaggctctgaaagatgggtctgctgggctcgatccccagttaccaggaacgtgctacagtcctcactgcccaccagataaagcagaagcgggaagcacccttcccgagaacttagggggggggtccgggtctgaggtgagtcagcgcgtgcatccttctgaccttgaaggcagggagcctactccagagctggtggaggatcgcaagggcagttgccgcagaccatgggacaggtccttggaaaatgtgtacaggggcagcgaaggatcccctactaagcctttcatcaacccgctccccaaaccacgtcgtaccttcaagcacgcaggcgagggtgataaggacggcaagcctggaatcggatttcggaaggagaaacgtaatctgccacccctaccctctctcccccctccccccctgcctagtagcccacctccctcctctgtgaaccggcgcctttggactgggaggcagaagtcgtctgccgaccacagaaaaagttatgaatttgaggacctcctccagtcgagcagcgaatccagccgagtggactggtacgcccagactaagctcggtttgaccagaactctcagcgaggaaaacgtttacgaagacattctggaccctcctatgaaggaaaatccgtacgaggatatcgagctacacggaaggtgtctgggcaagaagtgtgtacttaatttccctgctagccctactagttctattcccgacaccttaacaaagcagtcactgagcaagcccgccttcttccgccaaaactccgaaaggagaaacttcaagttgctggacactagaaagttgagccgcgatggaaccgggtctcccagcaagattagcccgccctctacgccatcctcccccgatgatattttcttcaatttgggagatcctcagaacggtcgcaagaagcgtaagatcccaaaattagtactgagaatcaatgcaatttatgaagtcaggcgcggaaagaaacgcgtcaaaaggctcagccagtctatggaaagcaattccgggaaggtaaccgatgagaacagcgagtccgactctgacactgaggaaaaattaaaagcccacagccagcgtctcgtcaatgtcaaatctaggcttaagcaagcaccgaggtatccctctctggctagggagctgatcgagtatcaggaacgtcaacttttcgagtacttcgtggtggtaagcctccacaagaagcaggctggcgcggcctatgtccctgagctgactcagcagttcccactgaagttggagcggagtttcaagtttatgcgggaagctgaggaccagttgaaggccatccctcagttctgctttcctgatgccaaagattgggtaccagtgcaacaattcactagcgagacgttctccttcgttctgacaggagaggacggctctaggcgtttcggctactgtagaagactactgcccggggggaagggcaagaggctccccgaagtgtactgtatagtgagccgactgggctgcttttccctattcagtagaatccttgacgaggtggaaaagcggcgagggattagtcccgctctagtgcagccgttgatgcgcagcgtaatggaggcacccttccccgcgttgggcaaaaccattttggtgaaaaattttctgccaggatctgggaccgaggtcatcgagctctgccgtcctctggattcaaggctggaacacgtggacttcgagtcactattttcatcactgagtgttcgacaccttgtgtgcgtctttgcttccctgctcctagagcggagggtaatatttatagctgacaaactgtcgattctatccaagtgctgtcacgcaatggtcgccttgatttacccatttgcctggcaacacacatatattcctgtgctgccaccagccatggtggatatcgtatgctcccccaccccattcttaatcggccttctgtcatcttcgctgccgctccttcgcgagctgcccttagaggaggtgctggttgtggacctggtaaactccagatttctacggcaaatggacgacgaagacagcatcctcccgcgtaagttacaggtggcccttgagcacatcctggagcaacgaaacgagctcgcttgcgagcaggacgaagggccactggatggccgccatggacctgagtccagtcctctcaacgaagtggtgtctgaggcatttgtgaggttttttgtcgagatagtcgggcactacagtctcttcctcacgagcggcgaacgggaggaacggaccctgcagcgggaagcgttcaggaaggccgtgtcctctaagtcgttgagacactttctggaggtgtttatggaaactcaaatgttccgaggttttattcaagaacgggagttgcgccgtcaggacgcaaaggggttatttgaggtgagagcgcaggaatatttggaaactctgcccagcggggagcactctggcgtcaataaatttctgaagggcttgggaaataagatgaaattcctgcacaagaaatag

SEQ ID NO: 187818 - DNA, 3030 bp, Artificial Sequence
  derived and/or modified sequence
atggacatgttcagcctggacatgatcatcagcgaccccgccgccgaggcatcacgggccggaaagaaacagcttaggggcgtgcagaacccttgtccatcagcccgtgcacgaccccgtcataaatccctcaatatcaaagacaagattagtgaatgggaaggaaagaaggaggtgccaacaccagcaccatcaagaagggccgatggccaggaggattacctgcctagttccaccgtggagcgccggagttccgacggcgtccgaacacaggttacagaagccaaaaacgggatgaggcccgggaccgaaagtactgagaaggaacgtaacaaaggcgctgtgaacgtgggaggacaggaccccgaacccgggcaggacctgtctcaacccgagcgtgaagtggatccctcttggggacgggggagagagcctcgtctcggcaagctgcggttccagaatgacccactgtctgtactcaagcaggtgaaaaaactcgaacaggctttgaaggacggctccgccgggcttgatccacagctgcctggcacgtgctactcccctcactgtcctcctgacaaggctgaggccggatctacactgccggaaaatctaggtggcggctctggtagtgaagtgtcccagcgcgtccatccaagcgatctggaaggacgtgaacctacaccggagttggtggaggataggaaagggtcatgcaggcgcccatgggataggtccctggagaatgtatatcggggatccgagggatcgcccacaaagcccttcatcaatccgctgcccaaacctcggcggactttcaagcacgccggcgaaggcgacaaagatggcaagccaggaattgggtttagaaaagaaaaacgcaatctaccgccgctaccatccctgccaccgccccccctgccgtccagcccacctccttcgtctgtgaaccggcgcctgtggactggcagacaaaaatcttccgcagatcaccgaaaaagttacgagttcgaggacttgctacagagcagcagcgagtcatcccgcgtggattggtacgcgcaaaccaagttaggtcttacccgaactctcagcgaagagaatgtatacgaagatatattggaccccccaatgaaggaaaacccatatgaggacatcgagctacatggtaggtgcttaggaaagaagtgcgtgctcaacttcccggcttcccccacaagctcaataccggatactctgactaaacagtcccttagcaaacctgctttcttccgacaaaacagcgagcgcagaaactttaagctcctggacactcggaaactgtctagggacggcactggctcaccctctaagatttctcctccctctacaccaagctcacctgacgatatattttttaatctgggcgacccccagaatggccgaaagaaaagaaaaattcctaaactcgttttgcggatcaacgccatatacgaggtgcgccgcggcaaaaagagagtgaaacggctgtctcagtccatggagagcaactcaggtaaagtgaccgatgagaactccgagagtgattctgacacagaagagaagctgaaagctcactctcagcggttggtgaacgtcaaaagtagattaaaacaggcaccgaggtatcctagtctcgctcgggagcttatcgaataccaagagcgtcagctgtttgaatatttcgtggtggtaagcttgcataaaaagcaagctggcgctgcgtatgtgcccgagttgacccagcagtttcctctgaagttggagcggagctttaaattcatgagggaggcagaggaccagttgaaagccattccgcagttttgcttccctgatgctaaggattgggtgcctgtgcagcagttcacgagcgagacgttcagcttcgtcttgaccggcgaggatgggtccagacggtttggttattgccggaggttgctgccgggaggcaaaggtaaacggttgccagaagtgtattgtattgtgagcaggctgggttgttttagcctgttttcaagaattctcgacgaggtagagaagagacgagggatctcacccgccctcgtacagccacttatgaggtctgttatggaagccccttttccagccctcggcaaaacaatacttgtcaaaaacttcctgcccgggagtggaactgaagttatcgaactgtgccgtcctctggactctaggctcgagcatgtggatttcgagtctctcttcagttccttatcagtgcggcacctggtgtgcgtgttcgcctctctgttacttgaacggcgagtgatcttcatagctgataagctgtcaattctgagtaagtgctgccatgccatggtggccttaatttatccattcgcctggcagcacacctacatcccagtgcttccacccgccatggtagacattgtctgctcgcccactccttttctcatcggcctgctgagttccagtctccctctcctgagggaattgccgttggaggaagttctagtggtggaccttgtgaattcccgctttctccgacagatggatgacgaggattccatcctaccgaggaagcttcaagtcgccctggagcacatcttggaacagaggaacgagcttgcttgtgagcaggatgagggtccactggatggcaggcacggacccgaatcctccccactgaatgaggtagtgagcgaagcctttgtgcgattcttcgtcgagattgtgggtcattatagcctgtttcttacaagcggggaacgcgaagaacggactttacagcgggaggccttcaggaaggcggtgagcagtaaaagcctcagacactttcttgaggtgtttatggagacccagatgttcagaggctttattcaggagagggagttaagacgacaagatgccaagggcctattcgaagtacgtgctcaagagtacctcgaaacgctgccgtccggcgagcactccggagtgaataagttcctgaaggggctgggtaacaaaatgaaatttctacacaaaaaatag

SEQ ID NO: 187819 - DNA, 3030 bp, Artificial Sequence
  derived and/or modified sequence
atggacatgttcagcctggatatgattatctccgatcccgctgccgaggcatccagagcaggcaaaaagcagctgcggggtgttcagaacccatgtccctccgccagagcgagacccagacacaaaagcttgaacattaaggacaagatcagtgagtgggagggtaagaaggaggtgccgacacctgcaccaagccggagggctgatggtcaggaagactatctgcccagttctaccgtggagagacggtcttccgatggcgtgcgaacacaagtgacagaagctaaaaatggaatgagaccaggcactgagtccaccgagaaggagagaaataaaggggctgtcaatgtggggggacaggacccagaacccggacaggacctgagtcaacctgagagggaggtcgatccttcatggggtagggggagagagccaagactggggaagctgagatttcagaatgaccccctaagcgtgctcaagcaagtgaagaagctggagcaggccctcaaggacggcagtgctggtttagatccgcagttacccggaacctgctactctccgcactgccctcccgataaagccgaggcgggatctactctccctgagaacctgggcggtggcagcggctctgaggttagtcagcgcgttcatccatcagacctggagggcagagagccaacccccgaactggttgaggaccggaagggaagctgccgaagaccctgggatcggagcctggagaacgtctatcgaggcagcgagggcagtccaactaagccgttcattaatcctcttcccaagcccagacgcacattcaaacacgccggagagggtgacaaggacggaaaaccagggatcggatttcgaaaagagaaaaggaacctgccacccctgccaagcctgccgcctccccctctgccttctagccccccaccttctagcgtcaaccgcaggctgtggacaggcaggcagaaaagtagcgccgaccatcgaaaatcatatgaatttgaggatttattgcagtcctcttcagaatcctcacgcgtggactggtatgcccagacgaagctggggcttactcggacgctgagcgaggaaaacgtgtacgaggacattctggacccgccaatgaaggagaatccatacgaagacattgaactgcacgggcgatgtctggggaaaaagtgcgtactgaatttccctgcctcaccaacttctagcatcccggacaccctcactaagcagtctctgtctaaaccggcatttttccgacaaaacagcgaaagacgtaattttaagttgctggacactaggaagttgagtcgcgatgggacgggatcgccaagcaagatctctccacctagcaccccaagcagtcccgatgacattttttttaatctgggggacccccagaacggcaggaagaaaaggaagatccccaaactagttctccggatcaacgccatttacgaggttcgaagaggcaaaaagcgcgtcaagaggctgagtcaatccatggagtcaaattcaggtaaagtgactgacgaaaactctgagagcgatagcgatacagaggagaaattaaaagctcacagtcaaaggctggtaaatgttaagagcagattgaagcaagcaccgagatacccatcattggccagagagcttatcgagtatcaagaaagacagttgttcgaatatttcgtggtagtttctctccacaagaaacaggctggtgccgcatacgtgcctgaattgacacagcagtttccattgaaacttgagcggtcgtttaaattcatgagggaagcagaggaccagctcaaagcgatacctcagttctgctttccagatgctaaagattgggtgccggtacaacaatttacttccgaaacgttctcttttgtgctgacgggcgaagacggttcccgaagatttgggtattgtcggcgactgctgcctggcggtaaggggaaacggttgccagaggtttactgtatagtgagcagactgggctgcttttccctgtttagtaggattctggatgaagtggagaagcggagaggcatcagcccagcactggtgcagccattgatgcggagtgttatggaagcaccttttccggcactgggcaagacaattctggtcaaaaattttctacctggctctgggacagaggtgattgaattgtgtaggccgctcgacagtaggctcgaacacgtggatttcgaaagcctgtttagttccctgtccgtccgtcatcttgtgtgtgtgttcgctagcctgctgctggaacggagagtgatctttatcgccgataagctctccatcctgtcaaaatgttgtcatgccatggtggctctgatatacccttttgcttggcagcacacatacattcccgtgttgccgccagctatggtggacattgtatgcagcccgacacctttcttaattgggctactgtccagttccttgcctctgcttagagaactcccactggaagaagtgttggtggtagatctcgtgaattctcggtttttacggcaaatggatgatgaggactctatactacccaggaaactgcaggtcgctctggaacatatcctcgagcagaggaacgagctcgcatgtgagcaggacgaagggcctcttgatgggcgtcacggtcctgagagctctccgttgaacgaggtcgtctctgaggcctttgtcaggttttttgtagaaatcgtaggacattacagtctgttcttgactagcggagagagagaggaaaggactttacaacgggaagccttccgaaaggctgtctcttcaaagagcctgcggcatttcctagaggtgtttatggagacacagatgttcagggggttcattcaagagcgggagctaagacggcaggatgcgaaggggctcttcgaggtgcgtgctcaggagtatcttgagactctgccctcaggggaacattccggcgtcaataaatttctgaagggcctgggaaataaaatgaaattcctgcataagaaatag

SEQ ID NO: 187820 - DNA, 3030 bp, Artificial Sequence
  derived and/or modified sequence
atggatatgtttagtttggatatgataatcagtgaccccgcagctgaggcctcaagggccggaaagaagcagctgcgcggtgtccagaatccatgcccatccgcaagggccaggccacggcataaatctttgaacatcaaggataaaatatcagaatgggaaggcaaaaaggaggtacccactcctgcgccaagcaggcgggctgatggccaggaggactatttacctagctctaccgtcgaacgcaggtcaagtgacggtgtgagaacccaggtaactgaagcaaagaacggtatgcgccctggaactgagtctactgagaaagaacgcaataaaggggcagtaaacgtgggagggcaggacccagagccgggtcaggatctgagtcaacccgagcgcgaggtagatcctagttggggtcgagggcgtgagcccagactcggaaaactgcggtttcaaaacgaccctctgtctgtgctgaaacaggtgaagaaacttgaacaggccctcaaagacggatctgctggcctggatccgcagctgcctggtacgtgctactcccctcactgcccaccagacaaagctgaggcagggagtacactccctgagaatctcggcggaggttcgggatctgaagtgtcccagagggtgcaccccagtgacttagaggggagggagcccacccccgaactggtcgaggataggaaaggctcttgcaggcggccttgggacagaagcctggagaacgtttatcggggatctgaggggagcccaacaaaacccttcattaatcctctgcctaagccccgacgcaccttcaaacacgccggagagggagataaggacggaaagccaggaatcgggtttcggaaagaaaaacgaaacctgcccccacttcctagcctgccaccgccacccctcccatcgtccccaccaccttcgagtgtgaaccgacggctgtggaccggacgccaaaagtcttctgctgaccaccgcaagagctacgaatttgaagatctgctccagtcctccagcgaaagtagcagagtggactggtatgctcagactaagttgggcctgacacggacactctctgaggagaacgtgtatgaagacatcctggaccctcccatgaaggaaaacccatacgaggacatcgaattacacggaaggtgccttggcaagaaatgtgtgctgaacttcccagcaagccccaccagttctatacccgataccctcaccaagcagtccctcagtaaacctgcttttttcagacaaaattcggagcgacggaattttaaacttctggacaccaggaagctgtccagagatggaacaggcagtcccagcaagatcagtcctccttctactccaagttcgcccgatgatattttcttcaacttaggcgatcctcagaacgggagaaaaaagcgtaagataccgaagctcgtgctgagaatcaatgccatctatgaggtaagacgaggcaagaaacgcgtcaagcgactgtcccagtccatggagtctaatagcgggaaagtcactgatgaaaactcggagagtgactccgacacagaggaaaagctgaaggcccactcacagcgtcttgttaatgtgaaatcgagactcaaacaggctcctcggtatccttcgctcgcaagggagttaatcgagtatcaggagaggcagctgttcgaatatttcgtggttgtgtctctgcataagaagcaggccggtgccgcttacgtgcccgagttgactcaacagtttcccttaaaacttgaacggtcatttaagttcatgcgggaggcggaagaccaacttaaggccatcccgcagttttgctttcccgatgctaaggattgggtgccagtacaacagttcacgtctgagaccttcagctttgtgctcaccggcgaagacgggtcaagacggtttgggtactgtaggcggctgctgcccggagggaagggcaaacgactgccagaggtgtactgtattgtatccaggctgggatgctttagtctgttcagtcgcatcctagacgaggtcgagaaacggaggggcatcagtcctgccctagtccagcccctcatgagatcagtgatggaggcaccctttcccgctctcggaaagacaatcctggtgaaaaactttctccccggatctggcactgaagtgatcgaactgtgtaggccccttgacagtcgccttgaacatgtggactttgaatcccttttttccagtttaagcgtcagacacctggtttgcgtgttcgcctccctgttactggagagacgagtaatctttatcgcagataagttgtcaattcttagtaaatgctgccatgccatggtagcgctgatttatccatttgcttggcaacatacttacattcccgtgttgcctcccgcaatggtggacatagtgtgtagccccaccccattcctgatcggactgctctcctcttctctgcctcttcttcgcgagctgccccttgaggaagtactggtggtggacttggtgaattctaggttcctcaggcagatggatgatgaggattcaatcctgcctcgcaagcttcaggtggcccttgagcacatcctcgaacaacggaacgaactcgcttgcgagcaagatgagggacccctggacggtcggcacgggcctgaaagcagtcccctgaacgaggttgttagcgaggccttcgtgcgcttcttcgtcgagatcgtgggccactacagcctattcctaaccagtggagagagggaggaacgtaccctccagcgcgaagctttcagaaaggccgtgtcgtccaaaagtctccggcacttcctagaggtattcatggagacccagatgtttcggggatttatccaggagcgggaattaagacgtcaggacgccaaaggcctgttcgaggtcagagcccaggaatatctggaaaccctgccctccggagagcattcaggcgtcaataagttcctgaaaggtctcggaaataagatgaagttcctgcataagaagtag

SEQ ID NO: 187821 - DNA, 3030 bp, Artificial Sequence
  derived and/or modified sequence
atggacatgttcagcttagatatgatcatttccgaccctgctgcagaagcttccagggcaggtaaaaaacagctgcggggtgtgcagaacccgtgccccagtgctagggcacgcccacgacacaaaagtctgaatattaaagataagatttctgagtgggaagggaagaaagaagtcccaaccccagctccgtcacgtcgcgctgacggccaggaggactacctgccctcttctacagtggagagaaggtcgagtgatggggtcagaacacaggtcaccgaagccaaaaacggcatgaggccaggcaccgagtctacagagaaagaacggaataagggcgctgtgaatgtgggcggtcaggaccccgagccgggtcaggatttgtcccagcctgagcgtgaggtcgatcccagctggggaaggggtagggagcccaggctcggtaaacttcggttccagaatgaccccctgtccgtgctgaaacaggttaagaagctggaacaggctctcaaggatggatccgcaggtctcgatcctcagctccccggtacctgctatagcccccactgcccgccagacaaggccgaggcagggtcgactctccctgaaaacctgggcggtggatccggatctgaagtgtcccagcgcgtccacccatccgatctcgaaggtcgcgaacctacaccagagcttgttgaggaccgtaagggatcctgtaggcgaccatgggacaggtccttggagaacgtctatcggggtagcgaggggtcccccaccaaacccttcatcaacccattacccaaacccagaagaaccttcaagcacgcgggagagggggacaaggatggtaagcctggcatcggctttcgcaaggagaaacggaatttgcctccactacccagcctgcctcctccacccctcccttcctccccacccccttcttctgtgaacagacggctgtggaccggtcggcagaaaagctcagccgatcaccggaaatcatacgagtttgaggacctgcttcagtcatccagcgagtcctctcgagtggactggtacgcccaaaccaagttaggccttactagaacactgtctgaggagaacgtgtatgaagacatcctcgatccaccaatgaaggagaacccgtatgaggatattgagttgcacgggcgttgcctggggaaaaagtgtgtcttgaactttcctgcctcgcctacctcctctatcccggacaccctcaccaaacaaagcctgtcaaaacccgctttttttaggcaaaatagtgagcggagaaactttaagctgctcgacacccggaagctgtctcgcgacggaaccggctcccccagtaaaatatctcctccgtctaccccttcctcccccgatgatatcttcttcaacttgggggatccacagaacggcagaaagaagcgaaagattccaaagctggttctcagaatcaacgccatatatgaagttaggaggggaaagaagagggtgaagaggctatctcagagtatggagagtaattccgggaaagtgacggacgagaactctgagagcgattctgacacagaagagaaactgaaagcccactcccaacggctcgtcaatgttaaaagtcggctaaagcaagccccaaggtacccttccctggcacgagagttgattgagtaccaggagaggcagctgttcgagtattttgtcgtggtgtccctccacaaaaagcaagcaggcgcagcttatgttcccgaattgacgcagcagttccctctcaaacttgagcgttcttttaagttcatgcgcgaggccgaggaccaattgaaagcgattcctcagttctgttttccggacgcaaaggattgggtgcccgtgcagcagttcacgtctgagaccttctccttcgttctgaccggtgaagatggctcgcgtagattcggatattgtaggaggcttctcccgggtggcaagggcaagcgtttacccgaggtctattgcatcgtaagtagacttggctgcttcagcctgttcagcaggatcttggatgaggtggagaagcgccgtggcatcagccccgcactggtgcagcctctcatgaggtccgttatggaagcccctttccccgctcttgggaaaactatcctcgtgaagaactttcttccgggatccgggactgaagtcattgagctttgcaggcccctggacagcagattggagcacgttgattttgagtctctgttttcctctctgagcgtgagacacctggtgtgcgtgttcgccagcctcctgctggagaggcgcgtgatcttcattgcggacaaattgtcgatcctgagtaagtgctgtcatgcaatggtggcccttatatacccatttgcttggcagcacacatatatccctgtcctgccacctgcaatggtcgatatcgtttgctctcctaccccgtttttgattggactgctatcatcaagccttccgctcctgcgggaactcccactggaggaggtgcttgtcgtcgaccttgtcaacagtcgcttcctccggcagatggacgacgaggacagtatcctccccagaaagctgcaagttgcgttggagcatattcttgagcagagaaatgagctagcctgcgagcaggacgagggccctctggatggccgacacggtcccgaatcttctccactgaatgaggtcgtcagcgaggccttcgtgcgcttttttgtagaaattgttggtcactatagccttttcctgacttccggcgaacgagaagagcggacacttcaaagggaagcatttcgaaaggctgttagcagtaagtccttacgacattttcttgaggtgtttatggagacccagatgttcaggggtttcatccaagaacgggagctgaggcgacaggacgcaaaaggtttattcgaagtcagagctcaggagtacctcgaaacactcccaagcggagagcactctggcgtcaacaagttcttgaagggtcttggcaataagatgaaattcttgcacaagaagtag

SEQ ID NO: 187822 - protein, 1932 aa, Artificial Sequence
  derived and/or modified sequence
MAPGALRGGCEQRAPGGGARTAALGPWPWPSPGPAPSPGAAPPRSRKMSGALLWPLLPLLLLLLSARDGVRAAQPQAPGYLIAAPSVFRAGVEEVISVTIFNSPREVTVQAQLVAQGEPVVQSQGAILDKGTIKLKVPTGLRGQALLKVWGRGWQAEEGPLFHNQTSVTVDGRGASVFIQTDKPVYRPQHRVLISIFTVSPNLRPVNEKLEAYILDPRGSRMIEWRHLKPFCCGITNMSFPLSDQPVLGEWFIFVEMQGHAYNKSFEVQKYVLPKFELLIDPPRYIQDLDACETGTVRARYTFGKPVAGALMINMTVNGVGYYSHEVGRPVLRTTKILGSRDFDICVRDMIPADVPEHFRGRVSIWAMVTSVDGSQQVAFDDSTPVQRQLVDIRYSKDTRKQFKPGLAYVGKVELSYPDGSPAEGVTVQIKAELTPKDNIYTSEVVSQRGLVGFEIPSIPTSAQHVWLETKVMALNGKPVGAQYLPSYLSLGSWYSPSQCYLQLQPPSHPLQVGEEAYFSVKSTCPCNFTLYYEVAARGNIVLSGQQPAHTTQQRSKRAAPALEKPIRLTHLSETEPPPAPEAEVDVCVTSLHLAVTPSMVPLGRLLVFYVRENGEGVADSLQFAVETFFENQVSVTYSANETQPGEVVDLRIRAARGSCVCVAAVDKSVYLLRSGFRLTPAQVFQELEDYDVSDSFGVSREDGPFWWAGLTAQRRRRSSVFPWPWGITKDSGFAFTETGLVVMTDRVSLNHRQDGGLYTDEAVPAFQPHTGSLVAVAPSRHPPRTEKRKRTFFPETWIWHCLNISDPSGEGTLSVKVPDSITSWVGEAVALSTSQGLGIAEPSLLKTFKPFFVDFMLPALIIRGEQVKIPLSVYNYMGTCAEVYMKLSVPKGIQFVGHPGKRHVTKKMCVAPGEAEPIWVVLSFSDLGLNNITAKALAYGDTNCCRDGRSSKHPEENHADRRVPIGVDHVRRSVMVEAEGVPRAYTYSAFFCPSERVHISTPNKYEFQYVQRPLRLTRFDVAVRAHNDARVALSSGPQDTAGMIEIVLGGHQNTRSWISTSKMGEPVASAHTAKILSWDEFRTFWISWRGGLIQVGHGPEPSNESVIVAWTLPRPPEVQFIGFSTGWGSMGEFRIWRKMEVDESYSEAFTLGVPHGAIPGSERATASIIGDVMGPTLNHLNNLLRLPFGCGEQNMIHFAPNVFVLKYLQKTQQLSPEVERETTDYLVQGYQRQLTYKRQDGSYSAFGERDASGSMWLTAFVLKSFAQARSFIFVDPRELAAAKSWIIQQQQADGSFLAVGRVLNKDIQGGIHGTVPLTAYVVVALLETGTASEEERGSTDKARHFLESAAPLAMDPYSCALTTYALTLLRSPAAPEALRKLRSLAIMRDGVTHWSLSNSWDVDKGTFLSFSDRVSQSVVSAEVEMTAYALLTYTLLGDVAAALPVVKWLSQQRNALGGFSSTQDTCVALQALAEYAILSYAGGINLTVSLASTNLDYQETFELHRTNQKVLQTAAIPSLPTGLFVSAKGDGCCLMQIDVTYNVPDPVAKPAFQLLVSLQEPEAQGRPPPMPASAAEGSRGDWPPADDDDPAADQHHQEYKVMLEVCTRWLHAGSSNMAVLEVPLLSGFRADIESLEQLLLDKHMGMKRYEVAGRRVLFYFDEIPSRCLTCVRFRALRECVVGRTSALPVSVYDYYEPAFEATRFYNVSTHSPLARELCAGPACNEVERAPARGPGWFPGESGPAVAPEEGAAIARCGCDHDCGAQGNPVCGSDGVVYASACRLREAACRQAAPLEPAPPSCCALEQRLPASSSSTYGDDLASVAPGPLQQDVKLNGAGLEVEDSDPEPEGEAEDRVTAGPRPPVSSGNLESSTQSASPFHRWGQTPAPQRHSGRVVGAHRPGLLSPVFVYSPAFQSGGEEGLWMSNTCTLR

SEQ ID NO: 187823 - protein, 1943 aa, Artificial Sequence
  derived and/or modified sequence
  misc_feature (1)..(1): Xaa can be any naturally occurring amino acid
XPSLAGRGAGRMAPGALRGGCEQRAPGGGARTAALGPWPWPSPGPAPSPGAAPPRSRKMSGALLWPLLPLLLLLLSARDGVRAAQPQAPGYLIAAPSVFRAGVEEVISVTIFNSPREVTVQAQLVAQGEPVVQSQGAILDKGTIKLKVPTGLRGQALLKVWGRGWQAEEGPLFHNQTSVTVDGRGASVFIQTDKPVYRPQHRVLISIFTVSPNLRPVNEKLEAYILDPRGSRMIEWRHLKPFCCGITNMSFPLSDQPVLGEWFIFVEMQGHAYNKSFEVQKYVLPKFELLIDPPRYIQDLDACETGTVRARYTFGKPVAGALMINMTVNGVGYYSHEVGRPVLRTTKILGSRDFDICVRDMIPADVPEHFRGRVSIWAMVTSVDGSQQVAFDDSTPVQRQLVDIRYSKDTRKQFKPGLAYVGKVELSYPDGSPAEGVTVQIKAELTPKDNIYTSEVVSQRGLVGFEIPSIPTSAQHVWLETKVMALNGKPVGAQYLPSYLSLGSWYSPSQCYLQLQPPSHPLQVGEEAYFSVKSTCPCNFTLYYEVAARGNIVLSGQQPAHTTQQRSKRAAPALEKPIRLTHLSETEPPPAPEAEVDVCVTSLHLAVTPSMVPLGRLLVFYVRENGEGVADSLQFAVETFFENQVSVTYSANETQPGEVVDLRIRAARGSCVCVAAVDKSVYLLRSGFRLTPAQVFQELEDYDVSDSFGVSREDGPFWWAGLTAQRRRRSSVFPWPWGITKDSGFAFTETGLVVMTDRVSLNHRQDGGLYTDEAVPAFQPHTGSLVAVAPSRHPPRTEKRKRTFFPETWIWHCLNISDPSGEGTLSVKVPDSITSWVGEAVALSTSQGLGIAEPSLLKTFKPFFVDFMLPALIIRGEQVKIPLSVYNYMGTCAEVYMKLSVPKGIQFVGHPGKRHVTKKMCVAPGEAEPIWVVLSFSDLGLNNITAKALAYGDTNCCRDGRSSKHPEENHADRRVPIGVDHVRRSVMVEAEGVPRAYTYSAFFCPSERVHISTPNKYEFQYVQRPLRLTRFDVAVRAHNDARVALSSGPQDTAGMIEIVLGGHQNTRSWISTSKMGEPVASAHTAKILSWDEFRTFWISWRGGLIQVGHGPEPSNESVIVAWTLPRPPEVQFIGFSTGWGSMGEFRIWRKMEVDESYSEAFTLGVPHGAIPGSERATASIIGDVMGPTLNHLNNLLRLPFGCGEQNMIHFAPNVFVLKYLQKTQQLSPEVERETTDYLVQGYQRQLTYKRQDGSYSAFGERDASGSMWLTAFVLKSFAQARSFIFVDPRELAAAKSWIIQQQQADGSFLAVGRVLNKDIQGGIHGTVPLTAYVVVALLETGTASEEERGSTDKARHFLESAAPLAMDPYSCALTTYALTLLRSPAAPEALRKLRSLAIMRDGVTHWSLSNSWDVDKGTFLSFSDRVSQSVVSAEVEMTAYALLTYTLLGDVAAALPVVKWLSQQRNALGGFSSTQDTCVALQALAEYAILSYAGGINLTVSLASTNLDYQETFELHRTNQKVLQTAAIPSLPTGLFVSAKGDGCCLMQIDVTYNVPDPVAKPAFQLLVSLQEPEAQGRPPPMPASAAEGSRGDWPPADDDDPAADQHHQEYKVMLEVCTRWLHAGSSNMAVLEVPLLSGFRADIESLEQLLLDKHMGMKRYEVAGRRVLFYFDEIPSRCLTCVRFRALRECVVGRTSALPVSVYDYYEPAFEATRFYNVSTHSPLARELCAGPACNEVERAPARGPGWFPGESGPAVAPEEGAAIARCGCDHDCGAQGNPVCGSDGVVYASACRLREAACRQAAPLEPAPPSCCALEQRLPASSSSTYGDDLASVAPGPLQQDVKLNGAGLEVEDSDPEPEGEAEDRVTAGPRPPVSSGNLESSTQSASPFHRWGQTPAPQRHSGRVVGAHRPGLLSPVFVYSPAFQSGGEEGLWMSNTCTLR

SEQ ID NO: 187824 - DNA, 5798 bp, Artificial Sequence
  derived and/or modified sequence
atggcccctggggctctacgcggagggtgtgaacagcgggctccgggtggtggagccaggactgcagccctgggcccatggccatggccatcacctggtccagccccatcccctggcgctgcgcctcctcggtcgcggaagatgtctggcgctcttttgtggcccctgctgccacttctgttgttgcttctctcggcacgcgacggtgtgcgggcagcacagcctcaagcccctggctatctgattgcagccccatctgttttcagagcaggcgttgaggaggttatcagcgtaacaatttttaactcaccaagagaggtcacagttcaagctcagctggtggcccaaggagagccagtggtgcagtcacagggtgctatcctagataagggcaccattaaacttaaagttccgactggactacgtggccaagccttactcaaagtgtgggggaggggttggcaagccgaggagggtccactattccacaatcagacatcagtcacggtcgatggaaggggcgcttctgtgttcatccagactgataaacctgtgtatcgtccacagcatagagtgctaatctccatatttaccgtgagtcctaacctgcgccctgtcaatgaaaaattggaagcctatatcctggatccacgcggatcccggatgattgaatggcggcacctgaagcctttctgttgtgggatcacgaatatgtcctttccactatccgatcaacccgtgctgggcgaatggtttattttcgtggagatgcaggggcatgcctacaacaagtcgtttgaagtccaaaagtacgtcctgccaaagttcgaactcctaattgatccgcctagatacatccaggatctggatgcatgcgagacgggaacagtcagggcccgatatacatttggtaagcccgtagccggagctctgatgatcaacatgacagtgaatggggttggctattacagccacgaagttggacgtcccgtgctacgtaccacaaagatcctcgggagccgcgactttgacatatgcgtccgagatatgattccagcagacgtcccagaacacttcaggggaagagtctctatctgggcaatggtaacatccgtggatggatcccagcaggtcgcttttgatgatagcactcctgtacagaggcagctcgtcgacatcagatattccaaagacactaggaagcagttcaagcccggtctcgcatatgtgggtaaggtcgagctgtcataccctgatggctctcctgctgaaggagttaccgtccagataaaggcggagctcacccccaaggataatatttatacaagtgaagtggtctcgcagagaggtttggtcggattcgagatcccgtccatcccaacatctgcacaacacgtctggctggagactaaggtcatggctcttaacggcaaaccagtgggcgctcagtacctgccatcatacctctctctggggagttggtacagtcccagccaatgctatctccagttgcagccccctagccatcccttgcaagtgggtgaagaggcttacttctccgtgaagtctacttgcccatgcaactttaccctgtattacgaggtggccgcacgaggcaacatcgtattgtcaggccaacagcctgcccataccacacagcagcgatccaagagggccgctcccgctctggagaaacccattcgcctgacacacttatccgagaccgagcctccgcctgcccctgaagccgaggtcgatgtgtgcgtcacgtctctgcacctcgctgtcacgccatctatggtaccactaggaaggctgctggttttttacgtgagagagaatggggaaggagtggctgatagtctgcaattcgccgtggagacgttcttcgaaaaccaagtgtccgtcacctacagcgccaatgagacgcagccaggcgaggtcgttgacctacggatcagggccgctagagggtcatgtgtatgtgtggctgccgtggataagagcgtctatctgttgaggtcgggtttcaggctgacaccggctcaggtattccaggaactagaagattacgatgtgagcgattcattcggagtgtcacgtgaggacggtccgttttggtgggcgggactaaccgcccaacggaggaggaggagtagcgtgtttccctggccctggggaatcactaaagactccggctttgcctttaccgagaccggcttggtcgttatgacggatcgagtgagtttgaatcatcgtcaggacggagggctgtataccgatgaagctgtgcctgctttccagcctcacaccggctcacttgtggctgtagcacctagtcgacacccgccacgaacagaaaagcggaagcggacctttttccctgagacatggatctggcactgtttgaatataagtgaccccagtggtgagggcaccctctcagtgaaagtgcccgattccataacgtcttgggtgggagaggcagtggcgctgtctacttcgcaaggactcggcatcgctgaacctagtctactgaagacttttaaacccttttttgtcgacttcatgctgccggctctaataattcgaggagagcaggtcaagatcccactctccgtgtacaactacatggggacttgcgccgaggtatacatgaagctctcagttcccaagggcattcagtttgtaggtcacccaggcaaacggcatgtcaccaaaaagatgtgcgtggcccctggagaggccgaacctatctgggtagtgctaagtttcagcgacctgggattgaacaatataacggcaaaggccttagcctatggggacacaaattgctgtagggatggacgctctagcaaacaccctgaggagaatcacgccgacagaagggtccccattggcgtggaccacgtacgcagaagtgtcatggtagaggcggagggcgtgcctcgagcatacacctattcagcttttttttgtccttctgaaagagtccacatcagtaccccgaacaagtacgaattccagtacgtccagcgccctttgaggctcacccgattcgacgtcgccgtgagagcccacaacgatgcacgcgtcgctctctccagcggtccacaggacaccgctggtatgatcgagatcgtactcggtggacaccagaatacccgatcctggattagtacatctaagatgggggagcctgtggccagcgcgcacacagctaagatcctgtcctgggacgaattccgcaccttttggatttcctggagaggaggactcatccaggtcggccatggacccgagccgtctaatgagtccgttatcgtggcctggaccctaccacgtcccccagaggtccagtttatcgggttttcaacagggtggggaagtatgggtgaatttcgtatttggaggaaaatggaggtggacgagtcatacagcgaggcatttactctgggcgtcccacacggcgctatccctggctctgagagagccaccgctagcataattggggacgttatggggccaacccttaaccacttgaataacttgctacggctgcctttcggctgtggcgaacagaatatgatccactttgcccctaacgtcttcgtgctgaagtacctgcagaagacccagcagctaagcccagaggtagagagggagacaaccgattacctggttcagggctatcagaggcagctaacctacaagagacaggatggaagttacagtgcttttggagaacgggacgctagtggtagcatgtggctgaccgccttcgtgcttaaatcgtttgcacaggccagatcttttatcttcgtcgatccaagagagctcgcggcagctaaatcttggattatccagcaacagcaggctgatgggtccttcctcgcagtcggtagggtactgaacaaagacatccaaggtggaatacacggtaccgtgcctctgaccgcctacgtcgtcgtggcattgctggagaccggtaccgcctccgaggaagaacgcggaagtaccgacaaggcaagacacttccttgagtcagccgctccactggccatggatccctactcttgcgccctcaccacgtacgctctaacgttgctcagatctcccgctgcccctgaggctctgaggaaactgcggtcactggctataatgcgggacggtgttacacattggtcactttcaaattcatgggacgtggacaaggggacctttctaagtttttctgaccgggtctctcaatctgttgtgtctgcagaggtggagatgacagcttacgcactcctgacctacacgctcctcggcgacgtcgccgcagctcttcccgtggtgaaatggctgagccagcagcgtaacgccttgggcggtttctcatccacccaggatacctgcgtagctctgcaggcattggcagaatacgccattctttcgtatgcgggtgggatcaatttaaccgtcagtcttgcaagcaccaatctcgactaccaagaaactttcgaacttcatcgcaccaatcagaaagtgctacagacggctgccattccatcactgccgaccggtctgttcgtttccgcaaagggggacggctgctgcctgatgcagatcgatgtaacgtataacgtcccagaccccgtcgctaagccagctttccagctgctggtctccctccaagaaccagaagcacaggggaggcctccgcctatgcccgcaagtgctgccgagggatcacggggtgactggccaccagccgacgatgatgatcctgccgcagaccagcaccaccaggagtacaaggtgatgctggaagtgtgcacaagatggctccacgctggatcctctaatatggcagtcctcgaggtgcctttactctctggttttagggccgacatcgaatccctggagcaacttctgctcgataagcatatgggcatgaagcggtacgaagtcgctgggaggcgcgtcctgttctactttgacgaaatccccagtagatgtctgacctgcgtcaggttccgtgccctgcgggaatgtgttgtgggtcgcacgagcgctctgcctgtcagcgtttacgattattatgaacctgcctttgaagccactaggttctataatgtgtccacccattccccactggcacgcgagctctgtgccggtccagcgtgtaatgaggttgagcgtgccccagcgagaggaccagggtggttccccggagagagcggcccagcggtagctccggaggagggtgccgctatcgcgagatgtggttgtgatcatgattgtggcgctcagggtaatcccgtgtgcggcagcgatggcgtggtgtatgcatccgcttgcagattgcgagaagctgcgtgccgccaggccgctcctctggagcctgctcctccctcttgttgtgccctggagcagagacttccagcatcctcgtcatctacttacggagatgatctcgcttcagtggctccagggcctctacagcaagatgttaaactcaacggcgcaggactcgaggtggaagactccgaccccgaacccgaaggggaggccgaggacagagtgacggccggtcctcgccctcccgtgagctccggaaacctagaatcttccactcagtcagctagcccatttcacaggtgggggcagacaccagccccacagaggcattccggccgtgtagtgggcgcacacaggcccggactgcttagtcccgtgtttgtatactcgccggcattccaaagcggaggtgaagagggcctctggatgagtaatacgtgcaccctgagata

SEQ ID NO: 187825 - DNA, 5832 bp, Artificial Sequence
  derived and/or modified sequence
taaccctccttggcgggacgtggggcagggaggatggcacctggtgccttgagaggtggctgtgaacaacgcgcacctgggggtggcgcaaggaccgctgctttggggccatggccttggccttcccccggtccagcaccaagtcccggagctgctcctcccagatctcgcaaaatgtctggcgctctactgtggccattgttgcctctgctgcttctactgctcagtgctcgtgatggagttagagccgctcagccacaggcaccaggctacctaatcgcagctccatccgtgttcagggctggcgttgaagaggttatctctgtgactatcttcaattctcccagggaggtgactgtccaggcgcaactggtagcccagggggagcctgttgtgcaatcacaaggagcaattctcgataagggaacaatcaagctgaaggtgccaaccggtctccgtggacaggcactgctgaaagtttgggggagaggctggcaagccgaggagggccctctctttcataatcaaaccagtgtgactgtagatgggaggggagcttccgtctttatccagaccgataagcctgtttataggcctcagcatagggtgctgatatccatattcacagtgtccccgaacctccggccagtgaacgagaagctcgaggcctacatactcgaccccagaggcagccgtatgattgaatggaggcatctgaagccattctgctgcgggataacaaacatgtcctttccactgtcagatcaacccgtcttgggcgaatggttcatatttgtggagatgcaaggtcatgcctacaataagtcatttgaggtgcagaagtatgtcttgcctaagtttgagctcctcattgatccacctcgctacattcaagatttagacgcctgtgaaacaggaaccgtaagagccagatacacattcgggaaaccagtcgctggcgctttaatgataaatatgacggtgaacggcgtaggatattactcacacgaggtgggcagacccgtccttaggactacaaagattcttggctccagagattttgacatatgcgtgcgcgacatgatcccggctgatgtgccagaacacttcaggggtcgcgtgagtatctgggctatggtgaccagtgttgatgggagccagcaagtggcctttgatgactctactcccgttcagagacagctggtagacatacgatactctaaagacacccgaaagcagtttaagccgggactggcttatgtgggcaaggtcgagttatcttaccccgacggctcaccagcagaaggagtgaccgtgcaaatcaaagccgagctgacacccaaggacaatatttatacttcagaagtggtgagccagagggggttagttggcttcgagatcccaagtatacccacctccgcccagcacgtctggctcgaaacaaaagtcatggctttaaatggaaagccagtaggggcacagtatctgccatcttatctgtcactcggtagttggtactccccatcccaatgttacctccagttgcagccgccttcccatcccttacaggtaggagaagaggcctacttctcggtgaaaagtacttgtccatgtaacttcaccctgtattacgaagtcgcggctcgcggaaacatagtcctatccgggcaacagcctgcgcacaccacacagcagagatctaagagagcagcacctgccctcgaaaaacccattaggctcactcacctgtcggagaccgaacccccacctgcgcctgaagctgaggtggatgtgtgcgtaacaagcctgcacctggcggttacacccagcatggtgccactgggcaggctgttagtcttctatgtccgagagaacggggaaggtgtcgcggacagcctccaattcgccgtggaaacttttttcgaaaaccaggtgagcgtgacatactccgcaaatgagacacagcctggcgaagtggttgatctgagaatccgcgcagctcggggatcctgtgtatgcgtcgcggcagtggacaagagtgtgtacctactgcgctctggctttaggctgacaccggctcaggtgtttcaggaacttgaagattacgatgtttccgatagtttcggggtctctcgggaagacggaccattttggtgggcagggttgaccgcgcagcgtcgccgacgaagctcagttttcccatggccctggggtatcacaaaggactccgggttcgcatttaccgagactgggctggttgtgatgactgacagggtgagccttaatcaccggcaggacggcggtttgtacacagacgaggcggtcccagcctttcaaccccatactgggtcattagtcgccgtggccccttctaggcaccctccaaggacagaaaaacgaaagcgcacttttttccccgagacctggatttggcattgcttgaacatatctgatccaagcggcgagggaacccttagtgttaaggtccccgactcgattacctcctgggtgggggaggcagttgccctgtcaacaagtcaaggccttggaattgccgaacccagtctgctgaagacattcaagcctttctttgtcgacttcatgctgcccgctcttatcatccgcggtgagcaagttaaaataccgctgtcagtctacaactatatggggacctgcgccgaagtttacatgaaactgtctgtgcctaagggaattcaatttgtgggtcatccaggcaaacgtcatgtgacaaaaaagatgtgtgtcgccccaggggaagcggaacctatttgggtcgtgctgagtttcagtgacctaggactgaataatatcacagcaaaggctcttgcctacggggataccaactgttgtagagatgggaggtctagcaagcatcccgaggaaaatcacgccgacaggcgagtgccaatcggggtggatcatgtgcgcagatccgtaatggtggaggcagagggggtaccgagagcttacacatacagtgccttcttttgtccttccgagcgtgttcacatctctaccccgaacaaatacgaattccaatacgtgcaacgtcctctgaggctaacacggttcgacgttgccgtccgcgctcataacgacgcacgggtagctctcagcagtgggcctcaggataccgcaggcatgatagaaatagttctaggcggtcaccagaacacccgtagttggatttcaacaagtaaaatgggggagccggtcgcatccgcacacacagccaagatcttgtcctgggacgaatttcgcactttctggatctcttggcggggtggattaatccaagtaggacatgggccagagccatctaacgagagtgtgattgtggcgtggacactacccaggccaccggaggtccagtttattggattctcaactggctggggatccatgggagaatttcgtatttggcgcaaaatggaagttgatgaaagctacagcgaagcctttaccctgggagtgccccacggagctatccccggttctgagcgggcaactgccagtattattggcgatgtcatgggccctactctcaaccacttgaataacctgctgagactgcctttcgggtgcggagaacagaacatgatccacttcgcccctaatgtgttcgtcctgaagtatttacagaagacacagcagttgtccccggaggtggagcgcgaaaccacagactatctggtgcagggttatcagagacagctcacatataaaaggcaggacggatcttactccgctttcggcgaacgggacgcctcaggctccatgtggcttacagcatttgtgctcaaaagctttgcgcaggccagatctttcatttttgtagacccgagggagctcgccgcagcaaagtcctggatcatccaacagcaacaggccgatggaagtttccttgctgttggtagagtgctgaacaaggacatccagggaggaatccacggtactgtgccacttaccgcttacgtggtagtcgccttactggagactgggactgccagtgaagaggagcggggttcaacggacaaggctcgccatttcctggaatcggccgcaccattagcaatggatccttattcctgtgcactgaccacttatgctctgacgctgttgaggtctcctgcagccccagaagcactgagaaagttgaggtccctagcaatcatgagagatggggttacacactggtcactgagcaatagctgggacgtggataagggcacctttctgtcattcagtgaccgtgtgagccagtctgtggtgtccgcagaggtggaaatgactgcttacgccctgctgacctataccttgcttggggacgtggcagccgctctgcctgtagtcaagtggctgtcacagcagcggaatgccttaggcggattctccagtacacaagacacctgcgttgctctccaggcattagctgaatatgcaatcttgtcctacgctggcggaattaatttgactgtgtcgcttgcatcaactaatctcgactaccaggaaacatttgagcttcacaggactaaccagaaagtcctccagaccgccgctatcccctcgctaccaaccggcctcttcgtgagcgccaaaggagacggatgttgcctgatgcaaattgatgtcacttacaatgtgcccgatcctgtggcaaagcctgcattccagctgctggtgtccctgcaggagcccgaggctcaaggaagacctccaccaatgcccgcaagcgctgctgaagggtcacgcggagactggccaccagccgatgatgacgatccagctgcagaccaacatcatcaggaatacaaagtgatgctggaggtctgcaccagatggctgcatgccggttcctccaatatggcagtcctggaagtgcctctattgtctgggttccgcgcagatattgaaagcttagagcagctgctactggataaacacatgggaatgaaacggtacgaagttgccggacggagagtactcttttacttcgacgagattccgagtcggtgtctgacttgtgttaggtttcgggcactgcgggagtgcgtagtgggtcggaccagtgccttacctgtcagtgtttacgattactacgagccagccttcgaggctacaagattctataatgtgagcacccatagccccttagctcgagagctgtgtgccggtcctgcatgtaacgaggtggagagagcacctgctcggggacccggttggttcccaggagagagcggccctgctgtcgctccggaggagggcgctgccatcgctcggtgtggctgcgatcatgattgtggagcccaggggaacccagtctgcgggtccgatggcgtggtctatgcttctgcatgcaggttgagggaggctgcgtgtcggcaggctgctccattagaacctgccccacctagctgttgcgctcttgagcagcgcctacccgctagcagctcttcaacatacggagacgacttagcctctgtcgctcccggaccattgcaacaggacgttaagctgaacggcgctggcctggaagttgaagatagcgatccagagcccgagggtgaggccgaagatcgcgttactgccggaccccgtccacccgtgagttccgggaaccttgaatcctccactcaaagtgcctcacctttccataggtggggtcagacacctgcacctcaacggcattcgggcagggtggttggagcccacagacctggactgttatctcccgttttcgtgtatagcccggctttccaaagcggtggggaagaaggcctgtggatgtctaacacatgcactcttcgataa

SEQ ID NO: 187826 - DNA, 5799 bp, Artificial Sequence
  derived and/or modified sequence
atggcacctggcgctctgcgaggagggtgtgaacagcgcgcccccggcggcggagcccgaactgcagccctgggtccttggccttggccaagtcccggccctgcgccttcaccaggcgccgctcctccccgttcgcgcaaaatgagcggcgccctgttatggcctctcttaccccttctgctgctcctgctaagcgcccgcgacggagtgcgcgccgctcagccccaagctccaggctacctgatagccgccccatccgtgtttagagccggcgttgaagaggtgatctcagtcacaatctttaatagcccgagagaggttaccgtgcaagcgcagctggtggcgcaaggagagccagtggttcaaagtcagggggcaatcttggataaagggaccatcaagctcaaggtacctactggattacgaggacaagccctgttaaaagtatgggggcggggatggcaggccgaagagggaccactctttcacaaccaaacaagcgtcacggtcgacggccgcggggcttccgtcttcattcagaccgacaagcctgtatacagacctcagcatagagtccttatatcaatctttacagttagtcccaacctgaggccagttaacgagaagctcgaagcgtatattctggatcccagagggtcgaggatgattgaatggagacaccttaagccgttttgttgtggtatcacaaatatgtcattccctttgtccgaccagcccgtgctcggagaatggtttatcttcgttgagatgcaggggcacgcgtataataaaagttttgaagtgcagaagtacgtgctgcctaagtttgagttgctcattgaccctcctcggtatattcaagatctggacgcatgcgaaacgggcacagtgcgtgcaaggtacacgttcggaaaacccgtcgcgggcgctctcatgataaatatgactgtgaatggggtgggatattactcccacgaggttggtaggcccgtacttcggactactaagatcctgggttcgagggattttgatatctgtgtgagagatatgattcctgccgatgtgcccgagcattttagaggacgggtttccatatgggctatggtgacgtctgtcgatgggtctcagcaagttgcttttgacgacagcacccccgtccagcggcagctggtggacatccgttactccaaagacacacgtaagcagtttaaaccgggcctggcttacgtcggaaaagtggaactctcttacccagacggttcccccgccgagggcgtaactgtgcaaattaaagctgaactgactcccaaggataacatttacacttccgaggtcgtgagtcagcgcggtctggttggatttgaaattccttcgatccccaccagcgcccagcacgtatggctcgagacgaaggtgatggctctgaacgggaagcccgtgggtgcacagtacctcccttcatacctgtctctgggttcgtggtatagcccaagtcaatgctatctccagttacagccaccaagccatccactgcaggtcggtgaagaggcctacttcagtgtgaagtctacttgtccttgcaatttcaccttgtactatgaagtggccgctagggggaacattgtattaagtggacagcagccagctcacactacgcagcagcgctccaagagggcggcaccagcattggaaaaaccgatcagactgacccacctgagcgaaaccgagcctcctcccgctcccgaggcagaggtagacgtgtgtgtgacgtccctccatctggctgtgacaccctctatggtgccactggggagactcctggtgttttacgtgagagagaatggtgagggggttgccgacagcctgcagtttgcagtggagaccttcttcgagaatcaagtctccgtcacctacagtgccaatgaaacacagcccggagaagtagtggatctgcggatccgcgccgcccgtggcagttgcgtctgcgttgctgctgtcgataagtctgtgtatcttctaaggtccggatttagactaactccagcacaggtattccaagaattagaagattacgatgtctcggactcctttggggtctcaagagaggacggaccattttggtgggctggcctcacggcccaaaggagaagacgcagttcagtgtttccttggccttggggaatcaccaaggatagtgggtttgcctttaccgaaaccggcttggtagtaatgacagacagggtctccctgaaccatcggcaagacggtggcctttacaccgacgaggccgtgcctgcgttccagcctcacactggttccctggttgctgttgcaccatcacggcaccctcccagaacggagaagcggaagcggactttcttcccagagacttggatatggcattgcctaaacatttcagaccccagcggagaggggactctgtcagttaaggtgccggacagtattacgtcctgggtgggcgaggctgtggctctgagcactagccagggactcggaatcgctgagccttctctcctgaaaacctttaaaccatttttcgtggattttatgttgcctgccctcatcattcggggtgagcaggtgaagatccccctctccgtgtataattacatggggacatgcgcagaagtttatatgaagctcagtgtgcctaaaggaatccagtttgtcggtcaccctggtaagcgccacgtcacaaaaaagatgtgcgtagccccaggtgaggctgaaccaatatgggtcgtcctctctttttctgatcttgggctgaacaacattaccgctaaggcgctggcttacggcgacacaaactgttgtagggatggacggtcgtccaagcacccggaggaaaaccacgctgataggagggtccctattggggtcgatcatgtgaggagatcagtcatggtcgaagctgagggcgtaccacgtgcctacacatacagtgcctttttttgtcccagtgaacgggtgcatatctccacaccgaacaaatatgaatttcagtatgttcagcgtccactgagacttacacggttcgatgtagccgtgcgggcccacaacgatgctcgggttgcacttagttccgggccccaggacactgctggaatgatagaaattgtcctgggcgggcatcagaatacacgcagttggatcagcacctctaagatgggtgaacctgtcgccagtgcccataccgccaagatcttatcgtgggacgagtttaggacattttggatctcctggaggggtggactcattcaagtagggcacggccccgagcctagtaacgaatcagttatcgtggcatggacccttccacgaccacctgaggtccagtttattggattttctactggatggggatcaatgggcgagtttagaatttggaggaaaatggaagtggacgaatcctacagcgaagcttttactctcggggttccccacggggcgattccgggatctgagcgcgcaacagcctcaatcattggggatgtgatgggcccaacactaaaccacttaaacaacctgctgcggttaccttttggatgcggagaacagaacatgattcatttcgcccccaatgtgttcgtgctgaagtacctgcagaagacccaacagctgtctcccgaagttgaaagggagacaaccgattacttggtccaaggatatcagcggcaactgacctataagcggcaggacggctcatattcagcctttggggagcgggatgcatctggttccatgtggttgactgccttcgtgttaaaatcttttgctcaggctcggagtttcatcttcgtcgatcctcgcgagctcgctgctgcaaaatcttggattatccagcaacaacaagcagatggcagcttcctggcagtgggacgcgtgcttaataaagatattcaggggggaatccacggtactgtgccattgaccgcctacgtcgtggttgcacttttggaaaccggcactgcaagcgaagaagaacggggaagcactgataaagcaagacacttcttggaatcagccgcccctctggcaatggacccctacagctgcgccttgaccacctatgcactgaccctactcagatcacctgccgccccagaggctctcaggaaactccgttccttggccataatgcgcgatggagtaacccactggtctctgagcaattcttgggacgtcgacaagggcacatttctctcattctcagatcgcgtgtctcagtccgtagtcagcgctgaggtagaaatgaccgcttacgccctcctaacatacacgctgctgggcgacgttgccgctgcgctacccgtggtgaagtggttgtctcagcagcgaaacgccctcggaggcttctcatcgactcaggacacttgcgtggctctccaggcccttgcagaatatgccattctgagttacgccggcggtattaacctgaccgtgagtctggcatccactaatctggattaccaagagacatttgaactccataggactaaccaaaaggtccttcaaaccgcagcaatccctagtctgccaactggtctgttcgtctctgccaaaggtgatggatgctgtctcatgcagatcgacgtcacctacaacgtgccggaccctgtcgctaaacctgcttttcagttactcgtgtccctccaggaaccagaagcccaggggcgccctccgccaatgcccgcgtccgccgctgaaggttcccgaggtgactggccccctgccgatgatgacgaccctgccgcagaccagcaccaccaagaatataaggtaatgctcgaagtttgtactcgatggctccatgcgggctctagcaacatggctgttctggaagtccctttgctgagcggtttccgggcggacatcgagtctttggagcagctgctgttggacaagcacatgggaatgaaaagatatgaggtcgctggacgaagagtgctgttttattttgatgagatccccagtcgatgtctcacctgtgtgaggttcagggcactgcgagaatgtgtggtcggaagaaccagcgcactgcccgtatccgtgtacgactattacgagccagcatttgaagccacgaggttctacaacgtcagcactcacagcccactggcaagagaattgtgtgccggacctgcatgcaatgaggtcgagcgcgcacctgccagaggccctggatggttccctggggagagtggaccagccgtagccccggaagagggcgcggcaatagccagatgcgggtgtgatcacgactgtggtgcacagggcaacccagtgtgtggctcagacggcgtggtctatgccagcgcgtgtcggcttagagaggcagcctgcagacaagcagcccccctagaacccgccccaccgagctgttgtgcgctagaacagcggctccctgcctcatctagttcaacgtacggggatgacctggcctcagtcgcacccggacccctccaacaggacgttaagcttaacggcgccggcctggaggtggaggattctgaccctgagcccgaaggtgaggcagaagatcgcgtgacagcagggccccgcccaccggtgtcaagtggcaaccttgagtcttcgacccagagcgcctccccgttccataggtggggccagactcccgcgccacagagacacagcggtcgagttgttggtgcccaccggcccgggcttctgtcccccgtatttgtgtactcgccggcttttcagtcaggcggagaagaaggattatggatgtctaacacttgtaccttgcgctag

SEQ ID NO: 187827 - DNA, 5832 bp, Artificial Sequence
  derived and/or modified sequence
tgacctagtctggctggacggggggcagggaggatggcccctggcgctctccgcggaggttgtgaacagcgagctccagggggcggagctaggacggccgcgctgggaccttggccctggccatcacccgggccggcaccctctcccggcgctgcccccccacggtcccgaaagatgagtggcgcgttactgtggccattacttccattgctgcttctgttgctgtcggcccgtgatggtgtccgcgccgcccaaccccaggcccccggttacctgatagctgccccttcagtattcagagcaggggtagaggaggtcattagcgtgaccatcttcaactctcccagggaggtcacagtacaggctcagctggttgcccaaggagaacctgtcgttcagtcccaaggtgcaattctggataagggaaccatcaaacttaaagtcccaacaggtctcaggggccaggctctcctgaaggtgtggggtcggggatggcaggccgaagaggggcctttgttccacaatcagacctcagtgactgttgacgggcgcggcgcctctgtgtttattcagacggacaaacccgtgtatagacctcagcaccgcgttctcatctcaatttttaccgtgtcaccgaatttgagacccgtgaatgaaaagttggaggcttacatacttgacccacggggatctcgcatgattgagtggaggcaccttaagcctttttgctgcggcattaccaatatgtcattccccctcagcgatcagcctgtgctgggagagtggtttatatttgttgagatgcaggggcacgcttacaacaaatcattcgaggtacagaagtatgttctgccaaagttcgaactgctgatcgacccgcctcgctacatccaggacctcgatgcatgtgagactgggactgtgcgagcaaggtacacgtttgggaaaccagtggccggcgcccttatgatcaacatgaccgtaaatggtgtcgggtattattctcacgaagtgggtaggccagtactgagaactaccaaaatattagggagccgggacttcgacatttgcgtgcgcgacatgattcccgcagacgtgcccgagcatttccgcggtcgggtttcaatctgggcaatggtgacgtccgtcgatggatcccagcaggtcgcttttgatgatagcacacccgtacagagacaactggtagatattcggtattccaaggatacgagaaagcagtttaagccaggcctcgcgtatgtcgggaaagttgagctgtcttatcctgacggctcgccagcggagggggttaccgtgcagataaaagctgagcttacacctaaagacaatatttacacctcagaagtcgtgagccagaggggcctggtggggttcgaaatcccatctatcccaacgtccgctcaacacgtgtggctggagacaaaggttatggctctcaacggcaaaccagtgggcgctcagtatctgcccagctacctcagccttggtagttggtatagtccctctcagtgttacctgcagttgcagcctccatcacatcctttgcaggtgggagaggaagcctacttttccgtgaaaagtacttgcccatgtaatttcaccctgtattacgaagtggctgctagagggaatattgtgctgtccgggcagcaaccggcgcacactactcagcaaaggagcaagagagccgcgcccgccttggaaaagcccattagactgactcacctgagcgaaacagagcctcccccagccccagaagctgaagtcgacgtttgcgtgacatctctccacctggcggtcacccccagtatggtgccactcggccgcctactcgtgttttatgtgcgggaaaatggcgaaggtgtcgctgacagtctccagtttgcagtcgagaccttttttgaaaaccaggtgtccgtgacgtattcagcgaatgagactcaaccaggagaagtcgtcgacctgcgaattagagctgcaagagggtcttgtgtttgcgtggcggccgtggataagagcgtctacctgcttaggagcggtttcagactgaccccagcccaggtgttccaggaattggaagactatgacgtgtctgactcttttggtgtgagtagggaggatggccctttttggtgggccggtttaaccgcacagaggcgtaggcgaagcagtgtgtttccttggccgtggggaataactaaagactctgggttcgctttcacggagaccggcctggtggtgatgactgatcgggtctcgctcaaccatcggcaggatggcggattatacaccgacgaggcagtgcccgcctttcagccgcacaccgggagtctggttgcagtcgcaccttctcggcaccctcccaggacagagaagcgcaaaagaacatttttccctgagacttggatttggcattgtctgaacatcagtgaccctagcggcgagggaacgctcagtgttaaagtgcccgattccatcacttcatgggtaggcgaggccgtcgcactctcaaccagccaggggttgggcatcgccgaacccagcttgttaaaaacctttaaaccctttttcgtcgattttatgctgcctgcccttattattcgcggcgaacaggtgaaaatacccttatccgtctataactatatgggcacttgcgctgaagtttacatgaagttgagcgtacccaaaggaatacagttcgtgggtcatcctggaaagagacacgtgactaagaagatgtgcgttgcacccggggaagccgagcccatttgggtcgtcctgtcgttcagcgatttggggttgaataatatcactgccaaggctttggcttacggcgatacgaactgttgccgagacgggagatctagcaagcacccagaagagaaccatgccgacagaagagtgcctatcggtgtcgaccatgtgcggcgcagtgttatggtcgaggcggaaggcgtcccaagagcatacacatactccgcgttcttctgtccgtcagagagggtacatatctccacccccaacaagtatgaattccaatacgtgcagcgacccctcaggcttacccgcttcgacgtcgctgttagggcgcacaatgacgctcgtgttgctctgagcagcggcccccaggacaccgcgggcatgatagaaatcgttcttggcgggcaccaaaatacccggtcttggatctcaacatctaagatgggagagcccgtagccagcgcacatacggccaagatcctgtcgtgggacgagttccgtaccttttggatttcttggcggggcggtctcatccaggtgggccatggacccgaaccttccaacgagtcagtgatcgtggcctggaccttacccaggccccctgaggttcaattcataggtttcagcactggatgggggtccatgggagagtttcggatatggaggaagatggaagtggacgaatcctattcggaggctttcacgctcggtgttccccacggcgcaattccagggtctgagagggccactgcatccattattggagatgtgatgggccctaccctaaatcacctcaacaatctgctacgtctgccttttggctgcggggagcagaatatgatacacttcgcgcccaacgtgttcgtcctgaagtacctgcagaagacccagcagctgagtcctgaggtggagcgggagacaacagattaccttgtgcaggggtatcagagacaactgacgtacaaacgccaggacggctcgtactcagcatttggcgaacgggatgcaagcgggagcatgtggttaacggctttcgtattaaagtcctttgcccaggctagaagctttatcttcgtagacccacgggagctggccgctgccaaaagctggattatccagcagcagcaagctgacggatcattcctcgccgtcggacgcgtgctgaacaaagacatacagggtggaattcacggtactgtgccgctaaccgcgtacgttgttgtcgccctgttggagactggcacagcttccgaagaagaacgtggatccaccgacaaggcgaggcactttttagagagtgcagctccgctggcgatggacccctattcctgcgcattaactacatacgctctcaccctcctacgttctcccgctgctcccgaagcacttagaaaactgagatcacttgcaattatgagggacggagtgacgcattggagcctgagcaattcctgggacgtagacaaaggtacgttcctgagtttctctgaccgcgtctctcagtctgtggtctcagccgaagtggaaatgaccgcctatgcactactgacttacactctgctcggcgatgttgcggccgccttgcccgtcgttaaatggctgagtcagcagaggaacgctctcggaggcttctcctccacacaggacacctgcgttgccctgcaggctttggctgaatacgctattctctcttatgctggcggcatcaatctgaccgtctctctggcgtcaactaacctggactaccaggagactttcgaactccacagaaccaatcagaaggtattacagactgccgccattccttcactcccaaccggcttattcgttagtgccaaaggcgatgggtgctgcctgatgcaaattgatgtcacctacaatgtgccggatcctgtggctaagccagctttccagttgctggtgtcactccaggaacctgaggcccaaggccggcctccccccatgcctgccagtgctgctgagggttcccgaggagactggccaccggccgacgacgacgaccccgcggccgatcaacaccaccaagagtataaggttatgctggaggtgtgcacccgctggctccacgcaggctcatccaatatggcagtgctggaggtgcctctgttgagtggcttcagagccgacatcgagtcccttgaacagctcctgctggacaaacatatggggatgaaacgctacgaggtggccggtagaagagtgctcttttattttgacgagatccctagtcgctgtcttacttgcgttcgatttagagcattacgcgaatgcgtagtcggccgaacttccgccctccccgtttccgtttacgactattatgagccagccttcgaggctaccagattttataacgtctccactcactcccctctggcacgcgagctgtgtgcaggcccagcctgtaatgaggtggaacgcgcacctgcacgtggcccagggtggtttcctggagagtcaggccccgccgtggccccagaagaaggagcagctattgcacggtgcggctgcgaccatgattgcggagcccaggggaaccctgtgtgtgggagcgacggagtcgtgtacgcgtctgcctgccgcctgcgtgaagcagcctgccgccaggctgcaccgttggagcctgcgcctccttcctgctgtgccttagaacaaagactgcctgcaagctctagttcaacgtacggtgatgatctggcctcagtcgcacccggtccgcttcagcaagatgtgaaactgaatggggccggcctcgaggtcgaagattcggacccagaacctgaaggcgaagcggaggacagagttaccgccggcccgcggccccctgtatcttctggcaatcttgaatcatccacgcagagcgcatcaccttttcatcggtggggacaaacgcccgctccacaacgacattcaggcagagtggtgggagctcatcgacccggactgctcagtcctgttttcgtatacagtcccgctttccagagtgggggagaagaaggactgtggatgagtaatacctgtacgctacggtag

SEQ ID NO: 187828 - DNA, 5992 bp, Artificial Sequence
  derived and/or modified sequence
gccccagcttggccgggcgcggagcggggcgcatggcgccgggcgcactgcgcgggggctgcgaacaaagggcccccggcggcggcgcgaggacggccgcgctcggaccctggccctggcccagccctggcccggccccctccccaggcgcggcgccccccaggagccgaaaaatgagcggcgccctgctctggccgttgctcccgctcctgctcctgctgctgtcggcgcgggacggcgtgcgcgccgcgcagcctcaggccccgggttacttgattgcagctccctctgtttttcgcgcgggcgtggaggaagtcatcagcgtgaccatctttaactctccaagggaagtcacggtccaggctcagctggtggcccagggtgagccggtggtgcagagccagggagccatcctggataaagggacaatcaaactcaaggtgcccacgggcctccggggccaagcgcttctgaaagtgtggggccgcggctggcaggcggaggaggggcccctctttcacaaccagacctcggtgaccgtggacggccggggcgcttctgtattcatccagacggacaagcctgtgtacagaccccagcaccgagtgctcataagcatcttcaccgtctctccaaatctgaggcctgtcaacgagaagctggaagcctacatcctggacccccgaggctctcggatgatagagtggagacacttaaagccgttctgctgcggcatcaccaacatgagcttccccttgtccgaccagcctgtgttgggagaatggttcatttttgttgaaatgcaaggccacgcgtacaacaagtcttttgaagttcagaagtatgtgttgcccaagtttgagcttctgattgacccgccccggtatatccaagacctggacgcctgtgagacaggcactgtgcgggccaggtatacctttgggaaacctgtggctggtgccttaatgatcaacatgactgttaatggtgtagggtactacagccacgaggtgggacgccctgtcctcagaacaaccaagatcctcggctcccgggacttcgacatctgcgtgagggacatgatcccagcggacgtccctgagcacttccggggcagggtcagcatctgggccatggtgaccagtgtggacgggagccagcaggtcgcgttcgatgactccacccccgtgcagaggcagctggtggacatccggtactccaaggacacgaggaagcagttcaagccgggcctggcctacgtggggaaggtggagctatcctaccccgatggcagcccagctgagggggtgacggtccagattaaggcagagctgacaccaaaggataacatctacaccagtgaagttgtgtcccagcgtggactagtggggtttgaaatcccctccatccccacgtcagcccagcacgtgtggctggagaccaaggtgatggcactgaacgggaagcctgtgggggctcagtacctgcccagctacctctccctcggcagctggtactcccccagccagtgctacctgcagctgcagccaccctcccacccactgcaggttggggaagaagcctatttttctgtgaagtccacatgtccctgcaactttaccctgtactacgaggtggctgcacggggcaatattgtgctatcgggccagcagcctgcccacaccacccagcagcgaagcaagcgggcggcccctgccctggagaaaccgattcgtttaacacacctttctgagacagagcccccaccagccccagaagctgaggtcgacgtgtgtgtgacctctcttcatctggccgtgacccccagcatggtcccccttggtcgcctgctggtcttctacgtcagggagaatggagaaggggtcgccgacagccttcagtttgcagtcgagaccttcttcgaaaaccaggtttcagtgacgtattcagcaaatgagacccaacctggggaggttgtcgacctgcggatcagggctgcaaggggcagctgtgtgtgcgtcgccgcagttgataagagtgtctacctgctcaggtctgggttccggctgactcctgcccaggttttccaggaactggaagattatgatgtttctgattcctttggcgtgtccagggaggatggtcctttttggtgggctgggctgacggcacaacgacgccggcgctcctctgtcttcccgtggccttggggcatcaccaaggactctgggtttgccttcaccgaaacgggactggtggtgatgaccgaccgagtgagcctgaaccaccggcaggacggtggcctctacaccgatgaggctgtccccgctttccagccccacacagggagcctggtggcagtggctccttccaggcacccccccagaacagagaagagaaaaaggactttcttccccgaaacatggatttggcattgtctcaacatcagtgacccatctggtgaggggacactcagtgtgaaggtcccggactccatcaccagctgggtgggtgaggccgtggccctgtccacctctcagggcttaggcatcgccgagccctccctgctgaagaccttcaagcccttcttcgtggacttcatgctccccgctctcatcatccgtggggagcaggtcaagatcccgctcagtgtctacaactacatgggcacctgcgctgaggtgtacatgaagctctcggttcccaagggcatccagtttgttgggcatcctggcaaacgccatgtgaccaagaagatgtgtgtggcccccggggaggctgagcccatctgggtcgttctgtccttcagcgacctgggactcaacaacatcacggccaaagcccttgcttacggagacacaaattgctgccgggatgggaggtccagcaaacaccctgaggagaatcacgccgacaggagggtccccatcggggtggatcacgtcaggcgcagtgtgatggttgaggcggaaggagtcccccgggcgtacacctacagcgcattcttctgtcccagtgagagagtccacatctccacccccaacaagtatgagttccagtatgtgcagcggccactgcgcctcacccgctttgatgtggctgtgcgagctcacaatgatgcccgtgtggccttgtcttctgggccccaggacacagcaggcatgatcgagatcgtcctgggggggcatcagaacaccaggtcatggatctccaccagcaagatgggagagcccgtggccagtgcacacacggccaagatcctctcctgggatgaattcagaacattctggatcagctggcgtggtggccttatccaggttggccatggtccagagccatccaatgagtctgtcattgtggcctggaccctcccgaggccaccagaggtccagttcattggcttttccaccggctggggctccatgggtgaattccgaatctggaggaagatggaggtggacgagagctacagcgaggccttcaccctgggggtcccacacggcgccatccctgggtctgagcgagccaccgcctccatcatcggggacgtcatggggccaaccctgaaccacctcaacaacctcctgcggctgccgtttggctgtggagagcagaacatgatccactttgcacccaacgtctttgtcttgaagtatcttcagaaaacccagcagctcagccctgaggtggagagagagaccaccgactacctagtacaaggctaccagcgccagctgacctacaagcgccaggatggctcctacagcgcgtttggggagcgggacgcatcggggagcatgtggctcacagcctttgtcctgaagtccttcgcacaggctcgcagctttatcttcgtggacccccgggagctggctgccgccaagagctggatcatccagcagcagcaggccgatggctccttcctggccgtgggcagggtcctgaacaaggacatccagggtgggatccacggcactgtcccgctgacagcctacgtggtggttgctctcctggaaacaggcacagcctcagaggaggagagaggctccactgacaaagcgaggcacttcctggagtctgctgcgcccctggccatggacccttatagctgtgccctgactacctacgcgctgaccctgctccgcagcccggcagcccctgaggcactgcgcaagctccgtagcctggccatcatgcgagatggggtcacccactggagcctgtcaaattcctgggacgtggacaagggcacattcttgagcttcagtgacagggtctctcagtcagtggtctcggccgaggtggaaatgacagcctacgcccttctgacctacactctgctgggtgacgtggctgccgccctgcctgtggtgaagtggctgtcccagcagcgaaatgcacttgggggcttctcctccactcaggacacctgcgtggctctgcaggccttggctgaatatgccatcttgtcctatgctggaggcatcaacctcactgtctccctggcctccaccaacctggactaccaggaaaccttcgagctgcacaggaccaaccagaaggttctgcagacagcagcgatccccagcctccccacggggctgtttgtgagtgccaagggggacggctgctgcctgatgcagattgatgtcacctacaatgtgcctgacccggtggccaagccagctttccagctgctcgtaagcctccaggagcctgaggcccagggacgcccgccccccatgcctgcctccgcagctgagggttcccgaggagactggcccccagctgacgatgatgacccagcggccgatcagcatcaccaggaatacaaggtgatgctggaggtgtgcaccaggtggctgcatgcagggtcttccaatatggctgtcctggaggtgcccctgctgtcaggcttccgggcagacatcgagagcctggagcagctgctccttgacaagcacatggggatgaagaggtatgaagtggctggacgccgagtgctcttctactttgatgagatccccagccggtgcctgacgtgcgtgcggttccgtgctctccgggagtgcgtggtgggcaggacgtcggcgctgccagtctccgtgtacgactactacgaacccgccttcgaggccactcgcttctacaacgtcagcacccacagcccactcgcccgggaactgtgcgccggacccgcgtgcaacgaagtggagcgcgcccctgcccggggcccgggctggttccccggcgagtcgggccctgccgtggcccctgaggagggggcggcgatcgcgcgatgcggctgcgaccacgactgcggcgcccaggggaacccggtgtgcggctccgacggggtggtctacgccagcgcctgccgcctgcgggaggccgcctgccgccaggccgcgcccctggagcccgcgcctcccagctgctgcgccctcgagcagcggctgccggcctcgtcgtcctccacctacggggatgacctggcttctgtggccccggggcctttacagcaggacgtgaagctgaatggagccggccttgaggtggaggactcagaccctgagcctgaaggggaggcggaggacagggtcacagccgggcctcggcctcctgtgagcagcgggaacctggaaagcagcacccagagcgccagcccgttccacagatggggccagactccggcccctcagagacatagtggccgggtggtgggggcccacaggccagggcttctgagccctgtcttcgtctacagcccagcctttcagagtggtggggaggagggtttatggatgtcaaacacctgcaccttgagataatcctacaaccacatgcagttgtgggaccgcagtttggtcctggggaccattcatacccacacacccagcttgtgcctgtggttaacatctcagaaaactctggtaaatgatcactccaggatattgacaagaatacacgttactgatcttactcacatgtt

SEQ ID NO: 187829 - DNA, 5799 bp, Artificial Sequence
  derived and/or modified sequence
atggctccaggagccttgcgtgggggctgcgaacagcgcgctcctggtgggggtgccagaacagcggcactcggcccgtggccatggccttccccagggccagctcctagccccggagccgcccctccccgctctagaaagatgtctggggccctcttatggcccttacttccattgcttttgctgctcctgagcgcccgcgacggtgtcagggctgcccaaccacaagcacccggctacttgatcgccgcaccctctgttttcagggccggagttgaagaagtgatctcagtcacgattttcaattcacccagggaagtcaccgttcaagctcagctggtggcccagggagagcccgtcgtgcaatcacagggcgccattcttgataaaggtaccatcaagcttaaggttcccactggactgcgtggacaggcactgctcaaggtgtggggtagaggttggcaagccgaggagggccccctttttcataaccaaacatccgtgaccgtggacgggagaggtgcctcggtctttattcaaacagacaagccagtctataggccacagcacagagtgctcatctccatttttaccgtgtcccctaacctccgaccggtcaatgagaaactcgaagcctacatactggatcccagaggaagtcggatgattgaatggcgacacctaaaacccttttgctgtggcattaccaacatgagcttccccttatctgaccagccagtactgggcgagtggtttatcttcgttgaaatgcaaggccatgcttataacaaaagcttcgaagtacagaaatacgttctacctaagtttgagttactgatcgatccaccacgatatatccaggacctcgatgcctgcgaaacaggcaccgtgcgcgccagatacacatttggcaagccagttgcaggggctcttatgataaacatgacagtaaacggggtcggctattacagtcacgaagtcggcaggccggtcctgcgtaccacaaagatactaggctctagggattttgatatttgtgtgagagacatgatcccagccgatgtgccagaacatttcagaggccgggtctccatctgggcgatggtcacctctgttgatggctcacagcaggtagcattcgacgactcaaccccagtgcagcgccaattggtcgacatcagatactctaaggataccaggaagcaattcaaacccggcctcgcctacgttggaaaagtcgagttgagctaccccgatgggtcccctgccgaaggcgtaaccgttcagatcaaagcagaactcaccccaaaggacaacatctatacctccgaagttgtgtctcaaagaggcttagtgggcttcgaaatcccaagtatccctactagcgcccagcacgtgtggttagagacaaaagttatggcgctcaatggtaagcctgtgggcgcccaatacctgccatcatatctgtctttgggatcatggtacagccctagccagtgttatcttcagctacagccaccttcccaccctctgcaggtaggtgaggaggcctacttcagcgttaagtctacttgcccatgtaatttcaccctctactatgaggttgctgctcgaggtaatattgtactatctggccaacagcccgcccatactacacaacaaaggtcaaagcgcgccgcacccgcactagagaagccaatcagactgactcacctgagcgaaacagagcctcctccagcaccagaggccgaggttgatgtgtgtgtgacatccctgcacttggccgtgaccccttccatggtgccactgggtaggctgctcgtgttttacgtccgcgaaaatggggagggagttgccgacagtctgcagtttgctgtggagactttctttgagaaccaagtgagtgtgacctactctgccaacgaaacccagcccggggaggtggtcgatctccgaattagggcagctagagggagctgcgtgtgcgtggccgctgtcgataaaagtgtctatctgctcagatccggatttagactgacaccagctcaggtctttcaagaactagaagattatgacgtttccgactcctttggcgttagtcgcgaggatggtcctttctggtgggccggattaaccgctcagaggcgaagacgctctagcgttttcccgtggccctggggtataactaaagatagtggatttgcctttactgagaccggcctggttgtaatgaccgatcgcgtatccctgaatcatagacaggacggtggtttatacaccgacgaagctgtcccagccttccagcctcataccggtagtctggttgcagtggcacccagcagacacccgcccagaaccgaaaaaaggaaacgtactttcttcccggagacttggatctggcattgtcttaacatttccgacccttcgggcgaggggacattatccgttaaagttcctgatagcatcaccagctgggtgggagaagcagtggcactttcaacctcacaaggactgggaatcgcggagccgtctcttcttaagacatttaaaccattttttgtggattttatgctacccgcattgatcatccgcggagaacaagttaaaatcccactttctgtctacaactacatgggcacctgtgccgaggtttatatgaagttgagtgttccaaagggcatccagttcgtcggtcacccagggaaaaggcacgttaccaagaagatgtgtgtggccccaggagaggcagaaccgatctgggtcgtcttatctttctcggatctcggtctaaataatatcaccgccaaggcgctcgcttatggagataccaattgctgccgagacggtcgttcctccaagcacccagaagagaatcacgccgacagacgtgtgccgattggagtggatcacgtacgacggtcagtaatggtagaggctgagggggtgcccagggcttacacctacagcgcctttttttgtccctcagaacgtgtgcacatcagcacccccaataagtacgagttccagtatgtgcagagaccccttcggttgacgcggttcgacgtcgcagtaagagcccacaatgatgctagggtcgccctgagctctgggcctcaggacacggcgggaatgatcgaaatagtactaggcgggcaccaaaatactcgctcatggatttctacctcaaaaatgggcgaacctgtcgcctcagcgcacaccgcgaaaattttaagttgggatgaattccgaactttctggatctcttggcgaggagggctgatccaggtcggacacggaccagaaccaagcaatgagtctgtgattgttgcatggacactgccacggcctcctgaagtccagtttattgggttttccaccggatggggaagcatgggagaatttagaatttggagaaaaatggaggtagacgaatcttactccgaagctttcaccctcggagtgccacacggggcgataccaggatccgaacgggccaccgcttccattatcggagacgtcatgggtcccacactgaatcatttgaataacttgctgcgactgccttttgggtgtggtgaacaaaatatgatacactttgccccaaacgttttcgtacttaagtatctccaaaaaactcagcaattgagcccagaagtggaacgcgagacgactgactacttggttcaaggatatcagaggcagttaacttataaaaggcaagacggctcctactccgcattcggcgagagggatgcttccggcagcatgtggctgacagcattcgtcctcaagtcatttgctcaggctagatcttttattttcgtggaccctagagaactggcggccgcaaagtcttggattattcagcagcaacaagcagatggttctttcctggcagtaggacgagttctgaacaaagatattcagggtggcatacacggtaccgtcccactgaccgcatatgtcgtcgtagcactgctcgaaactgggactgcgtcagaagaagagcgcgggtcaactgacaaagccagacattttttagaatctgctgccccgctggcaatggacccttattcttgcgccttgaccacatatgccctaaccctcctaagaagcccagcagcccccgaggcactgcgcaaacttcgatcgctcgccattatgcgggacggagtgacacattggtctctctcaaacagctgggacgtggacaaaggcacatttctaagcttcagtgaccgcgtgtctcagagtgtggtctccgcagaagtggaaatgacagcctacgccttgttgacatacacactgctgggagatgtcgcagcagctctgcccgtcgttaagtggctttcccaacaacggaatgcattaggcgggttttcttccactcaggatacatgcgtggccctccaggcgctcgctgagtatgccatactgagctacgctggcggtattaacttgacagtctcactagcctcaaccaatttggattatcaggaaacattcgagcttcataggactaatcagaaagtgctacaaaccgccgccattccaagtttacctactggactattcgttagtgccaaaggagatggttgttgcctaatgcagattgatgtcacttacaatgtgccagatcccgtggccaaaccagccttccagctcctggtgtctttgcaggaaccagaagcgcaggggagacctcctcctatgccggcctccgccgccgaaggatctagaggagattggccccccgctgatgacgacgaccccgcagccgaccagcatcatcaagagtataaggtaatgctggaagtttgcacacgctggctccacgctggcagctcaaacatggccgtcctggaagtccccttgctgagtggtttccgagctgacatcgagtcactagaacagttactgttggataaacacatgggcatgaagaggtacgaggttgccggccgaagggtcctgttttactttgatgaaataccaagccggtgcctgacctgtgtgaggttcagggcactcagagaatgcgtagtggggagaacgagcgcactgcccgtctcagtgtacgattactacgaacccgcgttcgaggccacacgcttttacaacgtttccacccattcaccacttgcacgtgaactttgcgcaggtcctgcatgcaacgaagtagagcgagcgcccgctcgcgggcccggttggttccccggcgaatccggacctgctgttgcacccgaggaaggagccgcaatagctcgctgcggctgcgaccatgactgcggcgcacaaggaaaccctgtgtgtgggagcgatggagttgtttatgcctccgcctgtaggctacgggaagccgcgtgccggcaagcagccccactggagcctgccccgccctcctgttgtgccctggagcagaggcttcccgcaagttccagcagtacatacggtgatgacctcgcatcggtagcacctggcccgctgcagcaggatgtaaagctgaatggagccgggttagaagttgaagactctgatccagagcccgaaggtgaagcagaggacagggttaccgcgggtccacgcccccctgtttcttccggtaacctcgagtctagcacgcagtctgccagtcccttccatcgatggggacagacccctgcacctcaacgccatagtggccgcgtcgtcggcgctcatcgtcctggactattaagccccgtcttcgtttattcacccgcttttcaatccgggggggaggaaggactttggatgtctaacacatgcaccctgcgatag

SEQ ID NO: 187830 - DNA, 5832 bp, Artificial Sequence
  derived and/or modified sequence
tgacccagcctggctggtcggggagcaggacgcatggctccaggggcactgagaggcgggtgcgaacagagagctccaggaggcggggcccgtacagctgctcttgggccgtggccttggccaagtcctgggcctgcaccttctcctggggccgcccccccacggtcaagaaagatgtcaggcgccctgctatggcctctgctaccgctcctgctactgcttttgtcagcgagagatggggtccgagcagcccaaccacaagctccaggttacctcatcgcagcccccagcgtcttccgggccggagtagaggaagttatctcagtgaccatatttaatagccctcgagaagtgactgtccaggctcagttagtggctcaaggcgaacccgtggtgcaatctcagggagcgatccttgacaaaggaactattaaactcaaagtcccgacaggcctgcgtggacaagctctgttgaaggtttggggcaggggatggcaggccgaagagggacctttgttccataatcagacttcagtgaccgttgacggccgcggcgctagtgtctttatccagaccgacaagccagtgtacagaccccagcatcgagtgctgatctccatttttactgtctctcctaatttacgacccgtcaacgagaaactcgaagcctacattcttgaccctcgaggctcacgtatgatcgagtggcgccaccttaaacccttctgttgtggcataaccaatatgtcctttccattgtccgatcaacctgtccttggcgagtggtttatattcgtagagatgcagggccatgcatataacaagtcattcgaggtacagaagtacgtgctgcccaaatttgaactgcttattgaccctccaagatacatacaagacctagacgcttgtgaaaccggtactgtgagggccagatacacattcggcaaaccagtggccggagcactgatgatcaatatgaccgtgaatggcgtgggctactacagccacgaagttgggaggccagtactgcgaactaccaaaattcttggctctcgagatttcgatatttgtgtaagggacatgatcccagccgacgttcctgagcacttccgcggaagggtatctatctgggctatggtcacctccgtagacgggtctcaacaagtcgcgtttgatgactccaccccggtgcagagacaacttgtggacatacgttattctaaagacacaagaaagcagttcaagccgggactcgcatatgtagggaaagtggagctatcttaccctgatggctcccctgctgaaggagttactgtgcaaatcaaggctgagctaacgccgaaggacaacatatatacgagcgaagtggtgagtcagcgaggtcttgtgggtttcgaaatccctagcatccctacgtctgcccagcacgtgtggttagagactaaagttatggcattgaatggaaaacccgtgggtgcgcaatatttgcccagttatctcagcctcggctcctggtatagccccagccaatgctatctgcaactgcagcctccatcacacccacttcaggttggagaagaggcctacttctcagtgaaatccacatgtccttgcaactttactctttattacgaagtggccgcgcgcggcaatatcgttctgagtggacagcagccagcccatactacgcagcagagatcaaaacgggccgcacctgcactagaaaagccaattcgactgacacacttatccgagacagaacctccaccggccccagaagcagaggtagatgtttgcgtaacatctctgcatctcgccgtgaccccatcaatggtgcccttgggcagattgcttgtcttttacgtgcgggaaaacggggaaggagtggccgatagtttacaattcgcagtggagaccttctttgagaatcaagttagcgtaacctactctgctaacgaaacccagcctggcgaggtggtggacctaaggatccgagccgcacgaggatcatgtgtctgtgtggctgcagtggacaagtcagtgtatcttttacgatccggtttccgactgacacccgctcaagtctttcaggaactggaggactatgacgtgagcgacagcttcggagttagcagagaagacggaccattttggtgggccggccttactgcacaaagacgaagaagatcaagcgtttttccttggccatggggaataacaaaagatagcggctttgcattcactgagaccggacttgttgtgatgacagaccgcgttagtcttaatcatcggcaggatgggggcctgtacactgacgaggccgtcccagccttccagccccacactggatctcttgttgcagttgctccctctagacatccaccccggacggaaaagcgtaaacgtactttctttcctgaaacctggatctggcactgcctgaacattagcgaccccagcggggaaggcacccttagtgtaaaagtgcccgactctatcacctcctgggtgggggaagccgtagccctcagtactagtcagggtcttggaatagctgaaccaagcctcctgaaaacgtttaagccctttttcgttgattttatgttgcccgcgctaatcatccgaggggaacaagtgaaaattcccttatctgtgtataactacatgggtacttgtgccgaggtgtatatgaaactgagcgtccctaaaggcatccagttcgtgggtcatcccggtaagagacatgtgaccaaaaaaatgtgcgttgccccaggcgaggccgaaccaatctgggtggtcttatccttcagcgatcttggacttaataatattaccgctaaggcccttgcctatggggacacaaactgctgtcgagacggtcgcagtagcaaacatccagaagaaaatcatgccgaccgcagagttcctatcggcgtagatcacgtacgaagatctgtaatggtagaagcagagggggtccctcgcgcttatacttatagcgcttttttttgcccttccgagcgcgtccacatatccactcccaacaaatacgagttccagtacgttcagagacccctgcgccttacccgatttgacgtcgcagttagggcccataatgatgcacgagtcgccctgtccagcggacctcaggatacagcaggaatgatcgagatagtcctggggggccatcagaacacacggtcctggatctcaacttccaaaatgggagaacctgtagccagtgcgcataccgccaaaatcttatcttgggatgaattcaggacattctggattagctggcgcggtggactcatccaggtgggccatggaccagaacccagcaatgagagcgtgatcgtagcttggaccctccctagacccccggaagtccagtttattggtttctccaccgggtggggctcaatgggagaattcagaatttggagaaagatggaagtcgacgaaagctatagtgaagcgtttacactaggagtaccccacggtgccatccccgggtcagaacgggctacagccagcattatcggcgatgtgatggggcccaccctcaatcacttgaacaatctgctcaggttgccattcggatgcggtgagcaaaatatgattcacttcgctcccaacgtgtttgtactcaagtatcttcagaagactcaacagcttagccctgaggtagagagagaaaccacagactacctggtccagggttatcagaggcagctcacttataagcgacaggatggctcctattctgcttttggagagagagacgcgtccggctctatgtggctgaccgcatttgtgttaaaatcattcgctcaagcacggtcatttatttttgtcgaccctcgagaactggctgcagctaagtcatggatcatccagcagcagcaagctgacggatcattcctcgccgtcggacgcgtgctgaacaaagacatacagggtggaattcacggtactgtgccgctaaccgcgtacgttgttgtcgccctgttggagactggcacagcttccgaagaagaacgtggatccaccgacaaggcgaggcactttttagagagtgcagctccgctggcgatggacccctattcctgcgcattaactacatacgctctcaccctcctacgttctcccgctgctcccgaagcacttagaaaactgagatcacttgcaattatgagggatggcgtaacccactggtccttaagtaactcctgggatgtggacaaaggaacatttctgagctttagcgaccgtgtctctcaatctgtcgtttcagccgaggtggagatgacagcctacgccttgctcacatacacactcctgggcgacgtggccgccgcactgccagtggttaagtggttgagtcagcaacgaaatgccttaggaggtttctcttctacccaagacacctgtgtggcccttcaggccctggccgagtatgcaattctgtcttacgctggcgggataaatctgactgtctccctggctagcacaaacctcgattaccaagagactttcgaattgcaccgcaccaaccagaaagttttacagaccgctgcgattccaagcctcccgaccggactgtttgtatctgcaaaaggagatggctgttgtttgatgcagattgatgtgacatataacgttccagatccagtggctaaaccagcttttcagctactagtttccctgcaagagccagaagcacagggtagaccacctcctatgcccgcttctgccgcagagggctctagaggagattggccccccgctgatgacgatgatcccgctgccgaccaacatcatcaggaatataaagtaatgctcgaggtctgcacaagatggctgcacgccggtagcagcaacatggcagtactggaagtgccactgctgtctggatttagagccgatatcgagagcctggagcagttgcttctggacaaacacatgggaatgaagcgatatgaggtggccggccgtagagtgctgttttactttgatgagattccaagccggtgtctgacctgcgtccgcttcagagccctaagagagtgtgttgtgggaagaacttccgcccttccagtgtcggtgtacgactactatgaacccgcgtttgaagctactcggttctataatgtatccacccacagcccgttggctcgggaactctgtgcaggcccagcgtgtaatgaggtcgaaagggcgccagctaggggacccgggtggttccccggtgagtcaggtcctgccgtcgcccctgaggagggggccgccatagccaggtgcggctgtgatcacgactgtggtgcgcaaggaaacccggtgtgtggctctgatggtgtcgtttatgccagcgcctgtcgccttagagaagcagcttgtcgccaggctgcaccgttggagcctgcgcctccttcctgctgtgccttagaacaaagactgcctgcaagctctagttcaacgtacggtgatgatctggcctcagtcgcacccggtccgcttcagcaagatgtgaaactgaatggggccggcctcgaggtcgaagattcggacccagaacctgaaggcgaagcggaggacagagttaccgccggcccgcggccccctgtatcttctggcaatcttgaatcatccacgcagagcgcatcaccttttcatcggtggggacaaacgcccgctccacagagacattcaggaagggttgtgggagctcaccggccagggcttctctccccagtgtttgtttatagtccagcgtttcagagtggtggcgaagaaggcctgtggatgtccaacacttgtactctgcggtag

SEQ ID NO: 187831 - DNA, 5985 bp, Artificial Sequence
  derived and/or modified sequence
gccccagcttggccgggcgcggagcggggcgcatggcgccgggcgcactgcgcgggggctgcgaacaaagggcccccggcggcggcgcgaggacggccgcgctcggaccctggccctggcccagccctggcccggccccctccccaggcgcggcgccccccaggagccgaaaaatgagcggcgccctgctctggccgttgctcccgctcctgctcctgctgctgtcggcgcgggacggcgtgcgcgccgcgcagcctcaggccccgggttacttgattgcagctccctctgtttttcgcgcgggcgtggaggaagtcatcagcgtgaccatctttaactctccaagggaagtcacggtccaggctcagctggtggcccagggtgagccggtggtgcagagccagggagccatcctggataaagggacaatcaaactcaaggtgcccacgggcctccggggccaagcgcttctgaaagtgtggggccgcggctggcaggcggaggaggggcccctctttcacaaccagacctcggtgaccgtggacggccggggcgcttctgtattcatccagacggacaagcctgtgtacagaccccagcaccgagtgctcataagcatcttcaccgtctctccaaatctgaggcctgtcaacgagaagctggaagcctacatcctggacccccgaggctctcggatgatagagtggagacacttaaagccgttctgctgcggcatcaccaacatgagcttccccttgtccgaccagcctgtgttgggagaatggttcatttttgttgaaatgcaaggccacgcgtacaacaagtcttttgaagttcagaagtatgtgttgcccaagtttgagcttctgattgacccgccccggtatatccaagacctggacgcctgtgagacaggcactgtgcgggccaggtatacctttgggaaacctgtggctggtgccttaatgatcaacatgactgttaatggtgtagggtactacagccacgaggtgggacgccctgtcctcagaacaaccaagatcctcggctcccgggacttcgacatctgcgtgagggacatgatcccagcggacgtccctgagcacttccggggcagggtcagcatctgggccatggtgaccagtgtggacgggagccagcaggtcgcgttcgatgactccacccccgtgcagaggcagctggtggacatccggtactccaaggacacgaggaagcagttcaagccgggcctggcctacgtggggaaggtggagctatcctaccccgatggcagcccagctgagggggtgacggtccagattaaggcagagctgacaccaaaggataacatctacaccagtgaagttgtgtcccagcgtggactagtggggtttgaaatcccctccatccccacgtcagcccagcacgtgtggctggagaccaaggtgatggcactgaacgggaagcctgtgggggctcagtacctgcccagctacctctccctcggcagctggtactcccccagccagtgctacctgcagctgcagccaccctcccacccactgcaggttggggaagaagcctatttttctgtgaagtccacatgtccctgcaactttaccctgtactacgaggtggctgcacggggcaatattgtgctatcgggccagcagcctgcccacaccacccagcagcgaagcaagcgggcggcccctgccctggagaaaccgattcgtttaacacacctttctgagacagagcccccaccagccccagaagctgaggtcgacgtgtgtgtgacctctcttcatctggccgtgacccccagcatggtcccccttggtcgcctgctggtcttctacgtcagggagaatggagaaggggtcgccgacagccttcagtttgcagtcgagaccttcttcgaaaaccaggtttcagtgacgtattcagcaaatgagacccaacctggggaggttgtcgacctgcggatcagggctgcaaggggcagctgtgtgtgcgtcgccgcagttgataagagtgtctacctgctcaggtctgggttccggctgactcctgcccaggttttccaggaactggaagattatgatgtttctgattcctttggcgtgtccagggaggatggtcctttttggtgggctgggctgacggcacaacgacgccggcgctcctctgtcttcccgtggccttggggcatcaccaaggactctgggtttgccttcaccgaaacgggactggtggtgatgaccgaccgagtgagcctgaaccaccggcaggacggtggcctctacaccgatgaggctgtccccgctttccagccccacacagggagcctggtggcagtggctccttccaggcacccccccagaacagagaagagaaaaaggactttcttccccgaaacatggatttggcattgtctcaacatcagtgacccatctggtgaggggacactcagtgtgaaggtcccggactccatcaccagctgggtgggtgaggccgtggccctgtccacctctcagggcttaggcatcgccgagccctccctgctgaagaccttcaagcccttcttcgtggacttcatgctccccgctctcatcatccgtggggagcaggtcaagatcccgctcagtgtctacaactacatgggcacctgcgctgaggtgtacatgaagctctcggttcccaagggcatccagtttgttgggcatcctggcaaacgccatgtgaccaagaagatgtgtgtggcccccggggaggctgagcccatctgggtcgttctgtccttcagcgacctgggactcaacaacatcacggccaaagcccttgcttacggagacacaaattgctgccgggatgggaggtccagcaaacaccctgaggagaatcacgccgacaggagggtccccatcggggtggatcacgtcaggcgcagtgtgatggttgaggcggaaggagtcccccgggcgtacacctacagcgcattcttctgtcccagtgagagagtccacatctccacccccaacaagtatgagttccagtatgtgcagcggccactgcgcctcacccgctttgatgtggctgtgcgagctcacaatgatgcccgtgtggccttgtcttctgggccccaggacacagcaggcatgatcgagatcgtcctgggggggcatcagaacaccaggtcatggatctccaccagcaagatgggagagcccgtggccagtgcacacacggccaagatcctctcctgggatgaattcagaacattctggatcagctggcgtggtggccttatccaggttggccatggtccagagccatccaatgagtctgtcattgtggcctggaccctcccgaggccaccagaggtccagttcattggcttttccaccggctggggctccatgggtgaattccgaatctggaggaagatggaggtggacgagagctacagcgaggccttcaccctgggggtcccacacggcgccatccctgggtctgagcgagccaccgcctccatcatcggggacgtcatggggccaaccctgaaccacctcaacaacctcctgcggctgccgtttggctgtggagagcagaacatgatccactttgcacccaacgtctttgtcttgaagtatcttcagaaaacccagcagctcagccctgaggtggagagagagaccaccgactacctagtacaaggctaccagcgccagctgacctacaagcgccaggatggctcctacagcgcgtttggggagcgggacgcatcggggagcatgtggctcacagcctttgtcctgaagtccttcgcacaggctcgcagctttatcttcgtggacccccgggagctggctgccgccaagagctggatcatccagcagcagcaggccgatggctccttcctggccgtgggcagggtcctgaacaaggacatccagggtgggatccacggcactgtcccgctgacagcctacgtggtggttgctctcctggaaacaggcacagcctcagaggaggagagaggctccactgacaaagcgaggcacttcctggagtctgctgcgcccctggccatggacccttatagctgtgccctgactacctacgcgctgaccctgctccgcagcccggcagcccctgaggcactgcgcaagctccgtagcctggccatcatgcgagatggggtcacccactggagcctgtcaaattcctgggacgtggacaagggcacattcttgagcttcagtgacagggtctctcagtcagtggtctcggccgaggtggaaatgacagcctacgcccttctgacctacactctgctgggtgacgtggctgccgccctgcctgtggtgaagtggctgtcccagcagcgaaatgcacttgggggcttctcctccactcaggacacctgcgtggctctgcaggccttggctgaatatgccatcttgtcctatgctggaggcatcaacctcactgtctccctggcctccaccaacctggactaccaggaaaccttcgagctgcacaggaccaaccagaaggttctgcagacagcagcgatccccagcctccccacggggctgtttgtgagtgccaagggggacggctgctgcctgatgcagattgatgtcacctacaatgtgcctgacccggtggccaagccagctttccagctgctcgtaagcctccaggagcctgaggcccagggacgcccgccccccatgcctgcctccgcagctgagggttcccgaggagactggcccccagctgacgatgatgacccagcggccgatcagcatcaccaggaatacaaggtgatgctggaggtgtgcaccaggtggctgcatgcagggtcttccaatatggctgtcctggaggtgcccctgctgtcaggcttccgggcagacatcgagagcctggagcagctgctccttgacaagcacatggggatgaagaggtatgaagtggctggacgccgagtgctcttctactttgatgagatccccagccggtgcctgacgtgcgtgcggttccgtgctctccgggagtgcgtggtgggcaggacgtcggcgctgccagtctccgtgtacgactactacgaacccgccttcgaggccactcgcttctacaacgtcagcacccacagcccactcgcccgggaactgtgcgccggacccgcgtgcaacgaagtggagcgcgcccctgcccggggcccgggctggttccccggcgagtcgggccctgccgtggcccctgaggagggggcggcgatcgcgcgatgcggctgcgaccacgactgcggcgcccaggggaacccggtgtgcggctccgacggggtggtctacgccagcgcctgccgcctgcgggaggccgcctgccgccaggccgcgcccctggagcccgcgcctcccagctgctgcgccctcgagcagcggctgccggcctcgtcgtcctccacctacggggatgacctggcttctgtggccccggggcctttacagcaggacgtgaagctgaatggagccggccttgaggtggaggactcagaccctgagcctgaaggggaggcggaggacagggtcacagccgggcctcggcctcctgtgagcagcgggaacctggaaagcagcacccagagcgccagcccgttccacagatggggccagactccggcccctcagagacatagtggccgggtggtgggggcccacaggccagggcttctgagccctgtcttcgtctacagcccagcctttcagagtggtggggaggagggtttatggatgtcaaacacctgcaccttgagataatcctacaaccacatgcagttgtgggaccgcagtttggtcctggggaccattcatacccacacacccagcttgtgcctgtggttaacatctcagaaaactctggtaaatgatcactccaggatattgacaagaatacacgttactgatcttactc

SEQ ID NO: 187832 - DNA, 5799 bp, Artificial Sequence
  derived and/or modified sequence
atggcccccggcgccctgagaggcggctgcgagcagagagcccccggcggcggcgccagaaccgccgccctgggcccctggccctggcccagccccggccccgcccccagccccggcgccgccccccccagaagcagaaagatgagcggcgccctgctgtggcccctgctgcccctgctgctgctgctgctgagcgccagagacggcgtgagagccgcccagccccaggcccccggctacctgatcgccgcccccagcgtgttcagagccggcgtggaggaggtgatcagcgtgaccatcttcaacagccccagagaggtgaccgtgcaggcccagctggtggcccagggcgagcccgtggtgcagagccagggcgccatcctggacaagggcaccatcaagctgaaggtgcccaccggcctgagaggccaggccctgctgaaggtgtggggcagaggctggcaggccgaggagggccccctgttccacaaccagaccagcgtgaccgtggacggcagaggcgccagcgtgttcatccagaccgacaagcccgtgtacagaccccagcacagagtgctgatcagcatcttcaccgtgagccccaacctgagacccgtgaacgagaagctggaggcctacatcctggaccccagaggcagcagaatgatcgagtggagacacctgaagcccttctgctgcggcatcaccaacatgagcttccccctgagcgaccagcccgtgctgggcgagtggttcatcttcgtggagatgcagggccacgcctacaacaagagcttcgaggtgcagaagtacgtgctgcccaagttcgagctgctgatcgacccccccagatacatccaggacctggacgcctgcgagaccggcaccgtgagagccagatacaccttcggcaagcccgtggccggcgccctgatgatcaacatgaccgtgaacggcgtgggctactacagccacgaggtgggcagacccgtgctgagaaccaccaagatcctgggcagcagagacttcgacatctgcgtgagagacatgatccccgccgacgtgcccgagcacttcagaggcagagtgagcatctgggccatggtgaccagcgtggacggcagccagcaggtggccttcgacgacagcacccccgtgcagagacagctggtggacatcagatacagcaaggacaccagaaagcagttcaagcccggcctggcctacgtgggcaaggtggagctgagctaccccgacggcagccccgccgagggcgtgaccgtgcagatcaaggccgagctgacccccaaggacaacatctacaccagcgaggtggtgagccagagaggcctggtgggcttcgagatccccagcatccccaccagcgcccagcacgtgtggctggagaccaaggtgatggccctgaacggcaagcccgtgggcgcccagtacctgcccagctacctgagcctgggcagctggtacagccccagccagtgctacctgcagctgcagccccccagccaccccctgcaggtgggcgaggaggcctacttcagcgtgaagagcacctgcccctgcaacttcaccctgtactacgaggtggccgccagaggcaacatcgtgctgagcggccagcagcccgcccacaccacccagcagagaagcaagagagccgcccccgccctggagaagcccatcagactgacccacctgagcgagaccgagcccccccccgcccccgaggccgaggtggacgtgtgcgtgaccagcctgcacctggccgtgacccccagcatggtgcccctgggcagactgctggtgttctacgtgagagagaacggcgagggcgtggccgacagcctgcagttcgccgtggagaccttcttcgagaaccaggtgagcgtgacctacagcgccaacgagacccagcccggcgaggtggtggacctgagaatcagagccgccagaggcagctgcgtgtgcgtggccgccgtggacaagagcgtgtacctgctgagaagcggcttcagactgacccccgcccaggtgttccaggagctggaggactacgacgtgagcgacagcttcggcgtgagcagagaggacggccccttctggtgggccggcctgaccgcccagagaagaagaagaagcagcgtgttcccctggccctggggcatcaccaaggacagcggcttcgccttcaccgagaccggcctggtggtgatgaccgacagagtgagcctgaaccacagacaggacggcggcctgtacaccgacgaggccgtgcccgccttccagccccacaccggcagcctggtggccgtggcccccagcagacacccccccagaaccgagaagagaaagagaaccttcttccccgagacctggatctggcactgcctgaacatcagcgaccccagcggcgagggcaccctgagcgtgaaggtgcccgacagcatcaccagctgggtgggcgaggccgtggccctgagcaccagccagggcctgggcatcgccgagcccagcctgctgaagaccttcaagcccttcttcgtggacttcatgctgcccgccctgatcatcagaggcgagcaggtgaagatccccctgagcgtgtacaactacatgggcacctgcgccgaggtgtacatgaagctgagcgtgcccaagggcatccagttcgtgggccaccccggcaagagacacgtgaccaagaagatgtgcgtggcccccggcgaggccgagcccatctgggtggtgctgagcttcagcgacctgggcctgaacaacatcaccgccaaggccctggcctacggcgacaccaactgctgcagagacggcagaagcagcaagcaccccgaggagaaccacgccgacagaagagtgcccatcggcgtggaccacgtgagaagaagcgtgatggtggaggccgagggcgtgcccagagcctacacctacagcgccttcttctgccccagcgagagagtgcacatcagcacccccaacaagtacgagttccagtacgtgcagagacccctgagactgaccagattcgacgtggccgtgagagcccacaacgacgccagagtggccctgagcagcggcccccaggacaccgccggcatgatcgagatcgtgctgggcggccaccagaacaccagaagctggatcagcaccagcaagatgggcgagcccgtggccagcgcccacaccgccaagatcctgagctgggacgagttcagaaccttctggatcagctggagaggcggcctgatccaggtgggccacggccccgagcccagcaacgagagcgtgatcgtggcctggaccctgcccagaccccccgaggtgcagttcatcggcttcagcaccggctggggcagcatgggcgagttcagaatctggagaaagatggaggtggacgagagctacagcgaggccttcaccctgggcgtgccccacggcgccatccccggcagcgagagagccaccgccagcatcatcggcgacgtgatgggccccaccctgaaccacctgaacaacctgctgagactgcccttcggctgcggcgagcagaacatgatccacttcgcccccaacgtgttcgtgctgaagtacctgcagaagacccagcagctgagccccgaggtggagagagagaccaccgactacctggtgcagggctaccagagacagctgacctacaagagacaggacggcagctacagcgccttcggcgagagagacgccagcggcagcatgtggctgaccgccttcgtgctgaagagcttcgcccaggccagaagcttcatcttcgtggaccccagagagctggccgccgccaagagctggatcatccagcagcagcaggccgacggcagcttcctggccgtgggcagagtgctgaacaaggacatccagggcggcatccacggcaccgtgcccctgaccgcctacgtggtggtggccctgctggagaccggcaccgccagcgaggaggagagaggcagcaccgacaaggccagacacttcctggagagcgccgcccccctggccatggacccctacagctgcgccctgaccacctacgccctgaccctgctgagaagccccgccgcccccgaggccctgagaaagctgagaagcctggccatcatgagagacggcgtgacccactggagcctgagcaacagctgggacgtggacaagggcaccttcctgagcttcagcgacagagtgagccagagcgtggtgagcgccgaggtggagatgaccgcctacgccctgctgacctacaccctgctgggcgacgtggccgccgccctgcccgtggtgaagtggctgagccagcagagaaacgccctgggcggcttcagcagcacccaggacacctgcgtggccctgcaggccctggccgagtacgccatcctgagctacgccggcggcatcaacctgaccgtgagcctggccagcaccaacctggactaccaggagaccttcgagctgcacagaaccaaccagaaggtgctgcagaccgccgccatccccagcctgcccaccggcctgttcgtgagcgccaagggcgacggctgctgcctgatgcagatcgacgtgacctacaacgtgcccgaccccgtggccaagcccgccttccagctgctggtgagcctgcaggagcccgaggcccagggcagacccccccccatgcccgccagcgccgccgagggcagcagaggcgactggccccccgccgacgacgacgaccccgccgccgaccagcaccaccaggagtacaaggtgatgctggaggtgtgcaccagatggctgcacgccggcagcagcaacatggccgtgctggaggtgcccctgctgagcggcttcagagccgacatcgagagcctggagcagctgctgctggacaagcacatgggcatgaagagatacgaggtggccggcagaagagtgctgttctacttcgacgagatccccagcagatgcctgacctgcgtgagattcagagccctgagagagtgcgtggtgggcagaaccagcgccctgcccgtgagcgtgtacgactactacgagcccgccttcgaggccaccagattctacaacgtgagcacccacagccccctggccagagagctgtgcgccggccccgcctgcaacgaggtggagagagcccccgccagaggccccggctggttccccggcgagagcggccccgccgtggcccccgaggagggcgccgccatcgccagatgcggctgcgaccacgactgcggcgcccagggcaaccccgtgtgcggcagcgacggcgtggtgtacgccagcgcctgcagactgagagaggccgcctgcagacaggccgcccccctggagcccgccccccccagctgctgcgccctggagcagagactgcccgccagcagcagcagcacctacggcgacgacctggccagcgtggcccccggccccctgcagcaggacgtgaagctgaacggcgccggcctggaggtggaggacagcgaccccgagcccgagggcgaggccgaggacagagtgaccgccggccccagaccccccgtgagcagcggcaacctggagagcagcacccagagcgccagccccttccacagatggggccagacccccgccccccagagacacagcggcagagtggtgggcgcccacagacccggcctgctgagccccgtgttcgtgtacagccccgccttccagagcggcggcgaggagggcctgtggatgagcaacacctgcaccctgagatag

SEQ ID NO: 187833 - DNA, 5832 bp, Artificial Sequence
  derived and/or modified sequence
tgacccagcctggccggcagaggcgccggcagaatggcccccggcgccctgagaggcggctgcgagcagagagcccccggcggcggcgccagaaccgccgccctgggcccctggccctggcccagccccggccccgcccccagccccggcgccgccccccccagaagcagaaagatgagcggcgccctgctgtggcccctgctgcccctgctgctgctgctgctgagcgccagagacggcgtgagagccgcccagccccaggcccccggctacctgatcgccgcccccagcgtgttcagagccggcgtggaggaggtgatcagcgtgaccatcttcaacagccccagagaggtgaccgtgcaggcccagctggtggcccagggcgagcccgtggtgcagagccagggcgccatcctggacaagggcaccatcaagctgaaggtgcccaccggcctgagaggccaggccctgctgaaggtgtggggcagaggctggcaggccgaggagggccccctgttccacaaccagaccagcgtgaccgtggacggcagaggcgccagcgtgttcatccagaccgacaagcccgtgtacagaccccagcacagagtgctgatcagcatcttcaccgtgagccccaacctgagacccgtgaacgagaagctggaggcctacatcctggaccccagaggcagcagaatgatcgagtggagacacctgaagcccttctgctgcggcatcaccaacatgagcttccccctgagcgaccagcccgtgctgggcgagtggttcatcttcgtggagatgcagggccacgcctacaacaagagcttcgaggtgcagaagtacgtgctgcccaagttcgagctgctgatcgacccccccagatacatccaggacctggacgcctgcgagaccggcaccgtgagagccagatacaccttcggcaagcccgtggccggcgccctgatgatcaacatgaccgtgaacggcgtgggctactacagccacgaggtgggcagacccgtgctgagaaccaccaagatcctgggcagcagagacttcgacatctgcgtgagagacatgatccccgccgacgtgcccgagcacttcagaggcagagtgagcatctgggccatggtgaccagcgtggacggcagccagcaggtggccttcgacgacagcacccccgtgcagagacagctggtggacatcagatacagcaaggacaccagaaagcagttcaagcccggcctggcctacgtgggcaaggtggagctgagctaccccgacggcagccccgccgagggcgtgaccgtgcagatcaaggccgagctgacccccaaggacaacatctacaccagcgaggtggtgagccagagaggcctggtgggcttcgagatccccagcatccccaccagcgcccagcacgtgtggctggagaccaaggtgatggccctgaacggcaagcccgtgggcgcccagtacctgcccagctacctgagcctgggcagctggtacagccccagccagtgctacctgcagctgcagccccccagccaccccctgcaggtgggcgaggaggcctacttcagcgtgaagagcacctgcccctgcaacttcaccctgtactacgaggtggccgccagaggcaacatcgtgctgagcggccagcagcccgcccacaccacccagcagagaagcaagagagccgcccccgccctggagaagcccatcagactgacccacctgagcgagaccgagcccccccccgcccccgaggccgaggtggacgtgtgcgtgaccagcctgcacctggccgtgacccccagcatggtgcccctgggcagactgctggtgttctacgtgagagagaacggcgagggcgtggccgacagcctgcagttcgccgtggagaccttcttcgagaaccaggtgagcgtgacctacagcgccaacgagacccagcccggcgaggtggtggacctgagaatcagagccgccagaggcagctgcgtgtgcgtggccgccgtggacaagagcgtgtacctgctgagaagcggcttcagactgacccccgcccaggtgttccaggagctggaggactacgacgtgagcgacagcttcggcgtgagcagagaggacggccccttctggtgggccggcctgaccgcccagagaagaagaagaagcagcgtgttcccctggccctggggcatcaccaaggacagcggcttcgccttcaccgagaccggcctggtggtgatgaccgacagagtgagcctgaaccacagacaggacggcggcctgtacaccgacgaggccgtgcccgccttccagccccacaccggcagcctggtggccgtggcccccagcagacacccccccagaaccgagaagagaaagagaaccttcttccccgagacctggatctggcactgcctgaacatcagcgaccccagcggcgagggcaccctgagcgtgaaggtgcccgacagcatcaccagctgggtgggcgaggccgtggccctgagcaccagccagggcctgggcatcgccgagcccagcctgctgaagaccttcaagcccttcttcgtggacttcatgctgcccgccctgatcatcagaggcgagcaggtgaagatccccctgagcgtgtacaactacatgggcacctgcgccgaggtgtacatgaagctgagcgtgcccaagggcatccagttcgtgggccaccccggcaagagacacgtgaccaagaagatgtgcgtggcccccggcgaggccgagcccatctgggtggtgctgagcttcagcgacctgggcctgaacaacatcaccgccaaggccctggcctacggcgacaccaactgctgcagagacggcagaagcagcaagcaccccgaggagaaccacgccgacagaagagtgcccatcggcgtggaccacgtgagaagaagcgtgatggtggaggccgagggcgtgcccagagcctacacctacagcgccttcttctgccccagcgagagagtgcacatcagcacccccaacaagtacgagttccagtacgtgcagagacccctgagactgaccagattcgacgtggccgtgagagcccacaacgacgccagagtggccctgagcagcggcccccaggacaccgccggcatgatcgagatcgtgctgggcggccaccagaacaccagaagctggatcagcaccagcaagatgggcgagcccgtggccagcgcccacaccgccaagatcctgagctgggacgagttcagaaccttctggatcagctggagaggcggcctgatccaggtgggccacggccccgagcccagcaacgagagcgtgatcgtggcctggaccctgcccagaccccccgaggtgcagttcatcggcttcagcaccggctggggcagcatgggcgagttcagaatctggagaaagatggaggtggacgagagctacagcgaggccttcaccctgggcgtgccccacggcgccatccccggcagcgagagagccaccgccagcatcatcggcgacgtgatgggccccaccctgaaccacctgaacaacctgctgagactgcccttcggctgcggcgagcagaacatgatccacttcgcccccaacgtgttcgtgctgaagtacctgcagaagacccagcagctgagccccgaggtggagagagagaccaccgactacctggtgcagggctaccagagacagctgacctacaagagacaggacggcagctacagcgccttcggcgagagagacgccagcggcagcatgtggctgaccgccttcgtgctgaagagcttcgcccaggccagaagcttcatcttcgtggaccccagagagctggccgccgccaagagctggatcatccagcagcagcaggccgacggcagcttcctggccgtgggcagagtgctgaacaaggacatccagggcggcatccacggcaccgtgcccctgaccgcctacgtggtggtggccctgctggagaccggcaccgccagcgaggaggagagaggcagcaccgacaaggccagacacttcctggagagcgccgcccccctggccatggacccctacagctgcgccctgaccacctacgccctgaccctgctgagaagccccgccgcccccgaggccctgagaaagctgagaagcctggccatcatgagagacggcgtgacccactggagcctgagcaacagctgggacgtggacaagggcaccttcctgagcttcagcgacagagtgagccagagcgtggtgagcgccgaggtggagatgaccgcctacgccctgctgacctacaccctgctgggcgacgtggccgccgccctgcccgtggtgaagtggctgagccagcagagaaacgccctgggcggcttcagcagcacccaggacacctgcgtggccctgcaggccctggccgagtacgccatcctgagctacgccggcggcatcaacctgaccgtgagcctggccagcaccaacctggactaccaggagaccttcgagctgcacagaaccaaccagaaggtgctgcagaccgccgccatccccagcctgcccaccggcctgttcgtgagcgccaagggcgacggctgctgcctgatgcagatcgacgtgacctacaacgtgcccgaccccgtggccaagcccgccttccagctgctggtgagcctgcaggagcccgaggcccagggcagacccccccccatgcccgccagcgccgccgagggcagcagaggcgactggccccccgccgacgacgacgaccccgccgccgaccagcaccaccaggagtacaaggtgatgctggaggtgtgcaccagatggctgcacgccggcagcagcaacatggccgtgctggaggtgcccctgctgagcggcttcagagccgacatcgagagcctggagcagctgctgctggacaagcacatgggcatgaagagatacgaggtggccggcagaagagtgctgttctacttcgacgagatccccagcagatgcctgacctgcgtgagattcagagccctgagagagtgcgtggtgggcagaaccagcgccctgcccgtgagcgtgtacgactactacgagcccgccttcgaggccaccagattctacaacgtgagcacccacagccccctggccagagagctgtgcgccggccccgcctgcaacgaggtggagagagcccccgccagaggccccggctggttccccggcgagagcggccccgccgtggcccccgaggagggcgccgccatcgccagatgcggctgcgaccacgactgcggcgcccagggcaaccccgtgtgcggcagcgacggcgtggtgtacgccagcgcctgcagactgagagaggccgcctgcagacaggccgcccccctggagcccgccccccccagctgctgcgccctggagcagagactgcccgccagcagcagcagcacctacggcgacgacctggccagcgtggcccccggccccctgcagcaggacgtgaagctgaacggcgccggcctggaggtggaggacagcgaccccgagcccgagggcgaggccgaggacagagtgaccgccggccccagaccccccgtgagcagcggcaacctggagagcagcacccagagcgccagccccttccacagatggggccagacccccgccccccagagacacagcggcagagtggtgggcgcccacagacccggcctgctgagccccgtgttcgtgtacagccccgccttccagagcggcggcgaggagggcctgtggatgagcaacacctgcaccctgagatag

SEQ ID NO: 187834 - DNA, 5799 bp, Artificial Sequence
  derived and/or modified sequence
atggctcctggcgcattacggggcggctgtgagcagagggccccgggcgggggtgcccgcactgccgccctaggtccttggccctggccatcacccggtccagccccaagcccaggcgctgctccacccaggtcaagaaaaatgtcgggtgcgcttctatggcctctgctgccgctgctccttctgcttttgtcagctagagatggagtccgggctgcccaaccccaggccccagggtacctcatcgccgctccaagtgtgttcagggcaggcgtggaggaagtaattagcgttactatcttcaatagccccagagaagtcacggttcaggcacagcttgtggctcagggtgaacctgtagtacagtcccagggggctattcttgataagggcacaataaagctgaaggtgcctaccggactcagaggtcaagccctgctgaaagtgtggggaagagggtggcaagccgaggaggggccactgttccataatcagacatctgtgacggttgacgggaggggagccagcgtttttattcagacggataaacccgtctacaggccacagcatcgcgtgctgatctccatctttacagtgtcccctaacctccggcctgtgaacgagaagctcgaggcctacatcctagaccctcgtgggtccagaatgattgagtggagacatctcaaacccttttgttgcggcatcacgaatatgtcctttccactgagtgatcagccggttctgggcgagtggtttatctttgtggagatgcagggccatgcatataacaagtcatttgaggtacagaagtatgtcctgcccaagttcgagctgctaatagatcctccacgctatatccaggatctggacgcatgcgaaacaggaactgtccgcgccagatacacatttggaaaacccgtagcaggggcacttatgatcaacatgactgtcaatggcgtaggctattacagccatgaagtgggtcggcccgtactccggaccaccaagatcctgggaagccgcgattttgacatctgtgtgagagacatgattccagcagacgtacctgagcatttccgggggcgggtctccatttgggcgatggtgacttccgttgacgggtctcagcaggtggccttcgatgattcaacccccgtgcagcggcagctcgttgatatacgttactctaaggatacccgaaaacagtttaagccaggactggcctatgtaggtaaggtcgagctatcttaccccgacgggtcccccgccgaaggcgtgaccgtgcaaatcaaagcagagttgaccccgaaagataatatctacacatctgaggtcgtgtcacagcgcgggctggtgggtttcgaaatcccctccatcccaacatccgctcagcatgtctggctcgagaccaaggtaatggcactcaacggaaagccagtgggcgctcaatacctcccgtcatatctgtcactgggtagctggtacagtccttcccagtgctacctccagctccagcctccatcacatcctttgcaagtgggcgaggaggcatacttctctgtgaaaagcacttgcccttgtaatttcaccttgtactacgaggtggccgcccgcggcaatattgtactctcagggcagcaacctgcccacacaacccagcagcgttccaagcgtgcagctcctgccctcgaaaaacccataaggctgacacacctgtctgaaaccgaaccaccacccgccccagaagccgaggttgatgtctgtgttacttccttacacctggccgtgactccatccatggtccctcttggcagactgctggttttttatgtgcgagaaaacggagagggcgttgctgatagtctgcagttcgctgtcgagactttcttcgagaaccaagtatctgtgacctattctgccaacgagacacaacctggcgaagtggtggatctgcgtatccgcgcggcccgtggcagttgcgtgtgtgtggctgcggtcgacaaatccgtatacctcctgagaagtgggttcaggttgacgcctgcccaagtgtttcaagagctcgaggactacgatgtatctgacagctttggagtcagcagagaggacgggcctttctggtgggcgggactcactgcacaacgcagaaggagatcatcagtgttcccatggccctggggcatcactaaagactctggcttcgcattcacggaaactgggctcgtcgttatgacagaccgggtgagccttaatcaccgtcaagacggaggcctgtacacggatgaggcagtgcctgctttccagccccacactggaagtctggttgctgtcgcaccctctaggcacccgccgaggaccgagaaacggaagcgaacatttttcccagagacctggatctggcattgcctgaacataagcgacccttcaggagaggggaccctgtctgtgaaggtcccggactcaatcacttcctgggtgggtgaggcagttgcattatctacttcacagggtctaggcatcgctgagcccagtctcttgaagaccttcaaaccctttttcgtcgatttcatgctcccagctttaataattcgcggagaacaggtgaaaatccctctgtcagtgtacaactatatgggtacctgtgccgaggtgtacatgaagttgtcagtgccgaagggaatacagttcgtcggtcaccccggcaaacggcacgttactaagaagatgtgtgtggcacccggcgaggcggaacctatttgggtcgtactctccttttctgacctggggcttaacaacattaccgccaaagccttagcatacggcgatacaaattgttgtagggatggtcggagcagcaagcatcccgaggaaaaccatgctgataggcgggtgccaatcggagttgaccatgttcgacgatccgtgatggttgaggcagagggggtccctcgcgcctatacatacagcgccttcttttgtcctagcgagagagtccatatttcaacccccaataaatacgagttccagtacgtccagaggccgctgaggttgactagatttgacgtggccgtgagggcccacaacgacgctcgggtggccttaagtagtggcccacaggatacagcagggatgatcgagatagtgctgggggggcatcagaatacacgttcatggatttcaacgtccaaaatgggggaacccgtagcctccgcccacacagccaaaatactcagctgggatgagtttcggaccttttggatttcctggagaggaggcctgattcaggtgggccacgggcccgaaccgagcaacgaatctgtgattgtagcatggaccctgcctagaccccccgaggtgcaatttattggcttctctacagggtgggggagtatgggagagtttaggatttggcggaagatggaagtggacgaatcctatagcgaagcgtttacattgggcgtgccccacggggcaatacctgggagcgaaagagctactgcctccatcattggtgacgtgatgggcccaacactcaatcatttgaacaatttgctgcgactgcctttcgggtgcggagaacagaacatgattcattttgcccctaacgtgttcgtcctgaagtacctgcagaagactcagcagttatctccagaagtggagcgagagactacagactacttggtgcagggctaccagagacagttgacgtacaagcggcaggacggatcatatagcgccttcggtgagcgggatgccagcggcagcatgtggctgactgcttttgtgctcaagtctttcgcccaagcgcgctcgttcatctttgtggacccaagggaattggcggcagctaaatcctggataattcagcagcagcaggctgatggtagctttctggccgtaggccgcgtgctgaacaaggacatccagggcggaatccacgggacagtgccccttaccgcatacgtggtggttgcactgcttgagacaggaacagcttccgaagaagaacgcggctccacggacaaagctaggcactttcttgaaagtgccgcgcctctggcaatggatccttactcctgcgccctgactacctacgctctgaccttacttcggagcccagctgcacctgaggcattgcgcaagctgcgcagtctggcgataatgagggatggtgtcactcactggtctttgtctaactcatgggacgtggacaaggggaccttcctgtctttttccgaccgggtgagccagagtgtggtgtccgcagaagtggaaatgactgcatatgcacttctcacatacaccctgcttggcgatgtcgccgcggccctacccgtggtaaaatggctcagccaacagagaaatgcccttggcgggttttcaagcacacaggatacctgtgtcgctctgcaagccctcgccgaatacgcgatcctcagttatgctggtgggatcaatctcacagtgagcttggcgagcacgaatcttgattaccaagagacatttgaactccaccggacaaaccagaaggtcctccagaccgccgctattccatccctgcctactgggctgtttgtgagcgcaaaaggcgacgggtgttgcttgatgcaaattgacgtgacttataatgtgcctgacccagtcgcgaagcctgcctttcaactgcttgtgtcactccaggagccagaggcccagggaaggccacctccgatgccagcctccgccgcagaaggatctagaggtgactggcccccggccgacgacgacgaccccgccgccgaccagcaccaccaggagtacaaggttatgctggaagtctgcaccaggtggcttcatgcgggatcctccaacatggccgtcctcgaagtgccattgctgtccggcttcagggccgatatcgaatctctggaacaattgctgctggataagcacatgggcatgaaaagatacgaagttgctggaaggcgcgtgctgttttactttgacgaaatcccctctcgttgtctgacttgcgttagatttcgggctttgagggagtgcgtagtgggccggacatctgcactccctgtgtccgtatacgactactacgagcctgctttcgaggccaccagattttacaatgtatctacgcactccccattagccagggagctctgtgcaggacctgcctgtaacgaagtagagcgagcaccagctcgcggtccaggctggttcccaggtgagagtggaccagccgtggcccctgaggaaggtgccgctattgctagatgtggctgcgatcatgactgcggtgcacaggggaacccggtgtgtggatctgacggggtggtctatgccagtgcctgtcggttacgagaggctgcctgccgccaagcggcaccgctagaacctgcaccaccgtcttgttgtgccctggaacagcgactccctgccagtagttcatctacatacggcgatgacctcgcctcggtggccccaggaccccttcagcaggatgttaagcttaacggtgctggcctagaggtggaggattccgatcctgagcctgagggcgaggccgaggacagagttacggcagggcctagaccccccgtatccagcgggaacctggaatcatcaacgcagagcgcttcgccttttcacagatggggccagacacccgccccacaacggcactccggcagagtagtgggggctcaccgccctggactgctgagccccgtgttcgtctactcacccgcctttcagagcggtggtgaggagggcctttggatgtccaatacgtgtactttgcgctag

SEQ ID NO: 187835 - DNA, 5832 bp, Artificial Sequence
  derived and/or modified sequence
tgaccgagtctcgcgggcagaggagctggacgaatggctccaggggccctgagggggggctgcgaacaaagagctccaggcgggggagcccgaaccgcagccctgggcccgtggccgtggccaagcccaggcccagcgcctagtcctggcgctgctcccccccggagccggaaaatgagcggcgctctgctgtggccactgcttccactcctccttctgctgctctccgcgagggacggcgttagggccgcacaaccccaggcccccggttacctgatcgcagcacctagtgttttccgggcaggcgtggaggaagtgattagcgtaacaatattcaattcacctcgtgaggtcactgtgcaagcccagctggtcgcacaaggggaacctgtggtgcagtcgcagggtgctatcctggacaagggcacaatcaagctgaaggtcccaactggcctgcgcggacaagccctcctgaaggtctggggcagaggatggcaggccgaagaaggtccactgtttcacaaccagacatccgtcaccgtagatggccgtggagcctctgttttcatacaaaccgataagcctgtgtaccggccacagcacagagtgctgatcagtatctttaccgtatcacctaacctgagaccagtcaatgagaagcttgaggcgtatattcttgatcctagggggtcacggatgatcgaatggcgccacctcaaaccattttgctgtggcatcactaacatgtcattccctctctccgaccagcctgttctgggggagtggtttatcttcgtggagatgcagggacatgcttacaataagtccttcgaggtgcaaaagtacgtcttacccaagttcgaactgctcatcgaccccccacgctacatccaagacctcgatgcctgtgagactggcacagtcagagctagatatactttcgggaaaccggttgctggcgctctgatgatcaatatgactgttaacggagttgggtattacagtcatgaggttggccgacccgttctgaggaccaccaaaatactcggaagtagagacttcgatatctgcgtcagagacatgatacccgctgacgtacctgagcactttagaggcagagtctccatttgggccatggtgacttcagtcgatgggtcacagcaggtggccttcgatgactcgactccagtgcagaggcaactggtcgatatccggtattctaaggacactagaaaacaatttaagccagggctggcatacgtgggtaaagtcgaactcagctaccccgacggttcacccgccgaaggagtcacagtgcaaattaaagccgaactcaccccgaaggataatatttataccagcgaggtggtttctcagcggggactggttggcttcgaaattccttcaatacctaccagcgcacagcacgtgtggctggagacaaaggtgatggctctgaacggtaagcccgtaggtgctcagtatctgccttcatacctgagcttggggtcctggtactcgccgtctcaatgttacctccagctgcagcccccaagccacccacttcaagtcggcgaggaagcttatttcagtgttaagtccacatgtccctgtaatttcacactgtattacgaagtggctgctagggggaacatcgtgctttccggtcaacagcctgctcacaccactcagcagcgttctaaaagggctgctccagctctcgagaaacccattcgactcacccacctgagtgagacggaacctcctcccgctcctgaagctgaagtggatgtgtgtgttacttccctgcatctcgccgtaactccttcaatggtgcctctggggcggctgttagtcttctatgtgcgggagaacggcgaaggagtggcagattccctccagttcgccgtggaaacctttttcgagaatcaggtttctgtaacctattcagcaaatgagacccagccaggcgaggtggtggacttacgcattagggccgccagggggtcatgcgtgtgcgtcgccgcggtcgacaaaagtgtctacctgttgcgctcagggtttcgactcacacctgcccaggtgttccaggagctggaggactacgacgtcagcgactccttcggggtcagtcgcgaagacggaccattttggtgggctggactaacagcccagagaagacggaggagctccgtgttcccttggccctggggtataacaaaggattccggcttcgcctttaccgaaaccgggctggtcgtaatgaccgaccgggtctccctcaatcatcgacaggacggtggtctgtacacagatgaagccgtacccgcgttccagccacacaccggttctctggttgccgtagctccctctagacatcctccacgcacggaaaaacgcaagagaactttcttccctgagacctggatatggcactgcctcaatattagcgatccaagcggtgaagggacgctgagcgtgaaggtgcctgacagtattacatcatgggtgggcgaggccgtggcgctaagtactagtcagggcttgggcattgccgaaccaagtctcctgaaaacttttaagccctttttcgtggacttcatgctgccagcgctgatcatcagaggagagcaggtcaagatccccttgagcgtgtataattatatgggtacatgtgccgaggtgtatatgaagttaagtgtaccgaagggaatccagttcgttggccacccaggaaagagacatgtgacaaagaaaatgtgcgtcgcacccggggaggccgaacccatttgggtggtcctgtctttttctgacctaggcttgaataatatcacggcgaaggcactggcttatggagatactaattgttgccgcgatgggcggtcatcaaagcatcccgaagagaaccacgcagaccgacgggtacccattggcgtggaccacgtaaggagatcagtgatggtcgaagccgaaggcgtgcctagagcatacacttacagtgccttcttttgcccctctgagcgggtgcacatctctacgcccaacaaatacgaattccagtatgtgcaaaggcctctccggcttacccgctttgatgtggctgtgcgcgcccataacgatgctagagtggctctaagctctggaccacaggataccgctggaatgatcgaaatcgtactcggaggccatcagaatacccgctcctggatctcgacaagcaaaatgggtgagccagtggccagtgcccacactgctaaaatcttgtcctgggacgagtttcgtacattttggatttcgtggcgaggggggttaattcaggtcgggcatgggccggaaccaagtaacgagtctgtcatcgtagcttggacccttcctcgtccacctgaggtccagttcatcggcttctctaccggctgggggtcaatgggcgaatttcgaatctggcgtaagatggaagtggacgagtcttactcagaagcctttaccctgggggtgccccatggcgctatcccaggaagcgaacgcgcgaccgcttccatcattggggatgttatgggcccgacccttaatcacttgaacaatctgttgagattaccctttgggtgtggggagcagaatatgatccactttgccccaaatgtgtttgttctcaagtatttacagaagactcaacagctctctcccgaagtggaacgagagaccacagattaccttgttcagggctatcagaggcagcttacctataagcgacaggatggctcttacagtgcttttggagagcgcgacgctagcgggagcatgtggctcaccgctttcgtcctgaaatcgtttgcacaagcccgatcttttatcttcgtggacccccgtgagctcgccgccgccaagtcttggatcatccagcaacagcaagctgacggaagctttctagctgtcggacgtgtcttaaacaaggacattcagggcggtattcacggtaccgtacctctcactgcatatgttgtggtggcgttgctcgagaccgggaccgcctctgaggaggagcggggatctactgataaggccagacactttctggaatcagctgccccgctggcaatggatccttatagctgcgccttgacgacgtacgctttgacactacttcggtcaccagcagcccctgaagcgctgaggaagttgagatccctagctatcatgcgggacggcgtgacccactggagcctctccaattcttgggatgttgacaaggggacattcctctcgttttccgatagagtatcacagagcgtggtctccgccgaggtcgaaatgacggcatacgctctgttgacctacaccctcctcggtgacgtggccgccgctctcccggtcgtgaagtggttaagtcaacagcggaacgcgctcggtgggtttagtagtacacaagatacgtgcgtggcacttcaagcattagcagaatatgctatcctaagctatgctggagggattaacctgaccgtgagcctagcgtctacaaatctggattatcaagagaccttcgagctgcatcggaccaaccagaaagtactgcagacagccgccatccctagcctgcctacaggactgtttgtctctgctaagggggacggatgctgtctgatgcagattgatgtgacatacaatgtccccgatcctgtggctaagccagccttccagctgttagtctctctccaggagcctgaggcgcaggggcggccaccacctatgcccgccagcgcagccgagggtagccggggcgattggccgcccgctgacgatgacgatccagccgcagatcagcaccatcaggagtataaggtcatgctggaagtctgtacaaggtggctgcacgccggcagctcaaacatggccgtgttagaagtccctcttctgagcggattccgagccgatatagaatctttagaacagctcctattagacaagcatatgggaatgaagcgctatgaggttgccggacggcgggtcttgttttacttcgacgaaattcctagccgttgcttgacctgcgtgagattcagagcactgcgtgagtgcgtcgtggggaggactagtgcccttcccgtgtccgtgtacgattactacgagcccgcttttgaagcaacccggttctataacgtctccacgcactctcccctggcgagagaactgtgtgctggccccgcctgcaacgaagtggaacgcgctccggctaggggccccgggtggttccctggtgaaagcggccctgcggtggctcccgaagagggcgccgccatagctcgctgtggatgcgatcacgattgcggcgcccagggtaatcccgtgtgtgggagtgatggagtcgtgtacgccagcgcctgtcgactgagagaagccgcttgtcgccaggcagcacccctggagcctgctccaccgtcgtgctgtgcactggagcagaggctgcctgcgtctagcagctctacttacggagacgatctagcatccgttgcacctggacctctgcaacaggacgtgaagcttaatggcgccggtctagaggtggaagacagtgaccctgagccagagggggaggctgaggaccgggtgactgctgggcctagacctccagttagtagcggcaacctggagagctcgacacagtcagcatcacccttccaccgctgggggcagacgcccgcaccgcaaagacattccggtcgcgtggtaggcgcacatcggcctgggctcctgtcccctgtgttcgtttattctcccgccttccagtctgggggggaggagggcctctggatgagtaacacatgcactttgcgctag

SEQ ID NO: 187836 - DNA, 5799 bp, Artificial Sequence
  derived and/or modified sequence
atggcccctggggccctgcggggcggctgtgagcagagggcccctgggggcggggccaggacagctgccctgggcccctggccctggcccagccctggccctgcccccagccctggggccgccccacccaggagcaggaagatgtctggggccctgctgtggcccctgctgcccctgctgctgctgctgctgagcgccagagatggagtgcgggccgcccagccccaggcccctggctacctgattgctgcccccagcgtcttccgggccggcgtggaggaggtgatctctgtgaccatcttcaacagcccccgggaggtgacagtgcaggcccagctggtggcccagggcgagcctgtggtgcagagccagggcgccatcctggacaagggcaccatcaagctgaaggtgcccaccggcctgcggggccaggccctgctgaaggtgtggggccggggctggcaggccgaggagggccccctcttccacaaccagacctctgtgacagtggatggccgcggggccagcgtcttcatccagacagacaagcctgtgtaccggccccagcaccgggtgctgatcagcatcttcaccgtgagccccaacctgcggcctgtgaatgagaagctggaggcctacatcctggacccccggggcagcaggatgattgagtggaggcacctgaagcccttctgctgcggcatcaccaacatgtccttccccctgagtgaccagcctgtgctgggggagtggttcatctttgtggagatgcagggccacgcctacaacaagagctttgaggtgcagaagtatgtgctgcccaagtttgagctgctgattgaccccccacgctacatccaggacctggatgcctgtgagaccggcaccgtgcgggcccgctacaccttcggcaagcctgtggccggggccctgatgatcaacatgacagtgaatggagtgggctactacagccatgaggtgggccggcctgtgctgcggaccaccaagatcctgggcagccgggactttgacatctgtgtgcgggacatgatcccagcagatgtgcctgagcacttccggggccgggtgtccatctgggccatggtgacctctgtggatggcagccagcaggtggcctttgatgacagcacccctgtgcagaggcagctggtggacatccgctacagcaaggacaccaggaagcagttcaagccaggcctggcctacgtgggcaaggtggagctgagctacccagatggcagccctgctgagggcgtgacagtgcagatcaaggccgagctgacccccaaggacaacatctacaccagcgaggtggtgtcccagaggggcctggtgggctttgagatccccagcatccccaccagcgcccagcacgtgtggctggagaccaaggtgatggccctgaatggcaagcctgtgggcgcccagtacctgcccagctacctgagcctgggctcctggtacagccccagccagtgctacctgcagctgcagccccccagccaccccctgcaggtgggggaggaggcctacttctctgtgaagagcacctgcccctgcaacttcaccctgtactatgaggtggccgcccggggcaacatcgtgctgagcggccagcagcctgcccacaccacccagcagaggagcaagagagctgccccagccctggagaagcccatccggctgacccacctgtctgaaacagagcccccaccagcccctgaggccgaggtggatgtgtgtgtgaccagcctgcacctggccgtgacccccagcatggtgcccctgggccgcctgctggtgttctacgtgagagaaaatggagaaggagtggccgacagcctgcagtttgctgtggagaccttctttgagaaccaggtgtctgtgacctacagcgccaatgagacccagcctggagaggtggtggacctgcgcatccgggccgcccggggcagctgtgtgtgtgtggccgctgtggacaagtctgtgtacctgctgcggagcggcttccggctgaccccagcccaggtgttccaggagctggaggactatgatgtgtctgacagctttggagtgtcccgggaggatggccccttctggtgggccggcctgacagcccagaggagaagaagaagcagcgtcttcccctggccctggggcatcaccaaggacagcggctttgccttcacagaaacaggcctggtggtgatgacagacagagtgtccctgaaccaccggcaggacggcggcctgtacacagatgaagctgtgcctgccttccagccccacacaggcagcctggtggccgtggcccccagccgccacccccccaggacagagaagaggaagaggaccttcttccctgagacctggatctggcactgcctgaacatcagtgaccccagcggggagggcaccctgtctgtgaaggtgcctgacagcatcacctcctgggtgggggaggccgtggccctgagcaccagccagggcctgggcattgctgagcccagcctgctgaagaccttcaagcccttctttgtggacttcatgctgcctgccctgatcatccggggggagcaggtgaagatccccctgtctgtgtacaactacatgggcacctgtgccgaggtgtacatgaagctgtctgtgcccaagggcatccagtttgtgggccaccctgggaagagacatgtgaccaagaagatgtgtgtggcccctggagaggccgagcccatctgggtggtgctgtccttcagtgacctgggcctgaacaacatcacagccaaggccctggcctacggggacaccaactgctgcagagatggccgcagcagcaagcacccagaagaaaatcatgctgaccggcgggtgcccatcggcgtggaccacgtgcggcgctctgtgatggtggaggccgagggcgtgccccgggcctacacctacagcgccttcttctgccccagcgagcgggtgcacatcagcacccccaacaagtatgagttccagtatgtgcagaggcccctgcggctgaccaggtttgatgtggccgtgcgggcccacaatgatgcccgggtggccctgagcagcggcccccaggacacagctggcatgattgaaattgtgctgggcggccaccagaacaccaggtcctggatcagcaccagcaagatgggagagcctgtggccagcgcccacacagccaagatcctgtcctgggatgagttccgcaccttctggatctcctggaggggcggcctcatccaggtgggccacggccctgagcccagcaatgaatctgtcatcgtggcctggaccctgccccggcccccagaggtgcagttcatcggcttcagcacaggctggggctccatgggagagttccgcatctggaggaagatggaggtggatgagagctacagcgaggccttcaccctgggcgtgccccacggggccatccctggcagcgagcgggccacagccagcatcattggagatgtgatgggccccaccctgaaccacctgaacaacctgctgcggctgcccttcggctgtggggagcagaacatgatccactttgcccccaacgtgtttgtgctgaagtacctgcagaagacccagcagctgagccctgaggtggagcgggagaccacagactacctggtgcagggctaccagaggcagctgacctacaagaggcaggacggcagctacagcgcctttggagagagagatgccagcggctccatgtggctgacagcctttgtgctgaagagctttgcccaggcccgctccttcatctttgtggacccccgggagctggccgccgccaagtcctggatcatccagcagcagcaggctgatggcagcttcctggccgtgggccgggtgctgaacaaggacatccagggcggcatccatggaacagtgcccctgacagcctacgtggtggtggccctgctggagactggaacagccagcgaggaggagcggggcagcacagacaaggcccggcacttcctggagagcgctgcccccctggccatggacccctacagctgtgccctgaccacctacgccctgaccctgctgcggagccctgctgcccctgaggccctgaggaagctgcggagcctggccatcatgagagatggagtgacccactggagcctgagcaacagctgggatgtggacaagggcaccttcctgtccttcagtgacagagtgtcccagagcgtggtgtctgctgaggtggagatgacagcctatgccctgctgacctacaccctgctgggagatgtggccgccgccctgcctgtggtgaagtggctgagccagcagagaaatgccctgggcggcttcagcagcacccaggacacctgtgtggccctgcaggccctggccgagtatgccatcctgtcctatgctgggggcatcaacctgactgtgtccctggccagcaccaacctggactaccaggagacctttgagctgcacaggaccaaccagaaggtgctgcagacagctgccatccccagcctgcccaccggcctgtttgtgtctgccaagggagatggctgctgcctgatgcagattgatgtgacctacaacgtgcctgaccctgtggccaagccagccttccagctgctggtgtccctgcaggagcctgaggcccagggccggcccccacccatgcctgccagcgctgctgagggcagcagaggagactggcccccagcagatgatgatgatcctgctgctgaccagcaccaccaggagtacaaggtgatgctggaggtgtgcacccgctggctgcatgctggcagcagcaacatggctgtgctggaggtgcccctgctgagcggcttccgggctgacatcgagagcctggagcagctgctgctggacaagcacatgggcatgaagagatatgaggtggccggcagaagagtgctcttctactttgatgagatccccagccgctgcctgacctgtgtgcgcttccgggccctgagagaatgtgtggtgggccgcaccagcgccctgcctgtgtctgtgtatgactactatgagcccgcctttgaggccacccgcttctacaacgtgtccacccacagccccctggcccgggagctgtgtgccggccctgcctgcaatgaggtggagcgggccccagcccggggccctggctggttccctggagagagcggccctgctgtggcccctgaggagggcgccgccatcgcccgctgtggctgtgaccatgactgtggggcccagggcaaccctgtgtgtggcagtgatggagtggtgtatgccagcgcctgccgcctgcgggaggccgcctgccggcaggccgcccccctggagcccgccccacccagctgctgtgccctggagcagaggctgcctgccagcagcagcagcacctatggagatgacctggcctctgtggcccctggccccctgcagcaggatgtgaagctgaatggagctggcctggaggtggaggacagcgaccctgagcctgagggggaggccgaggacagagtgacagctggccccaggcctcctgtgagcagcggcaacctggagagcagcacccagagcgccagccccttccaccgctggggccagaccccagccccccagaggcacagcggccgggtggtgggcgcccaccggcccggcctgctgagccctgtgtttgtgtacagccctgccttccagagcggcggggaggagggcctgtggatgagcaacacctgcaccctgaggtag

SEQ ID NO: 187837 - DNA, 5832 bp, Artificial Sequence
  derived and/or modified sequence
tgacccagcctggccggcagaggagctggccgcatggcccctggggccctgcggggcggctgtgagcagagggcccctgggggcggggccaggacagctgccctgggcccctggccctggcccagccctggccctgcccccagccctggagctgccccacccaggagcaggaagatgtctggggccctgctgtggcccctgctgcccctgctgctgctgctgctgagcgccagagatggagtgcgggccgcccagccccaggcccctggctacctgattgctgcccccagcgtcttccgggccggcgtggaggaggtgatctctgtgaccatcttcaacagcccccgggaggtgacagtgcaggcccagctggtggcccagggcgagcctgtggtgcagagccagggcgccatcctggacaagggcaccatcaagctgaaggtgcccaccggcctgcggggccaggccctgctgaaggtgtggggccggggctggcaggccgaggagggccccctcttccacaaccagacctctgtgacagtggatggccgcggggcctctgtgttcatccagacagacaagcctgtgtaccggccccagcaccgggtgctgatcagcatcttcaccgtgagccccaacctgcggcctgtgaatgagaagctggaggcctacatcctggacccccggggcagcaggatgattgagtggaggcacctgaagcccttctgctgcggcatcaccaacatgtccttccccctgagtgaccagcctgtgctgggggagtggttcatctttgtggagatgcagggccacgcctacaacaagagctttgaggtgcagaagtatgtgctgcccaagtttgagctgctgattgatcctccccgctacatccaggacctggatgcctgtgaaacaggaacagtgcgggcccgctacaccttcggcaagcctgtggccggggccctgatgatcaacatgacagtgaatggagtgggctactacagccatgaggtgggccggcctgtgctgcggaccaccaagatcctgggcagccgggactttgacatctgtgtgcgggacatgatcccagcagatgtgcctgagcacttccggggccgggtgtccatctgggccatggtgacctctgtggatggcagccagcaggtggcctttgatgacagcacccctgtgcagaggcagctggtggacatccgctacagcaaggacaccaggaagcagttcaagccaggcctggcctacgtgggcaaggtggagctgagctacccagatggcagccctgctgagggcgtgacagtgcagatcaaggccgagctgacccccaaggacaacatctacaccagcgaggtggtgtcccagaggggcctggtgggctttgagatccccagcatccccaccagcgcccagcacgtgtggctggagaccaaggtgatggccctgaatggcaagcctgtgggcgcccagtacctgcccagctacctgagcctgggctcctggtacagccccagccagtgctacctgcagctgcagccccccagccaccccctgcaggtgggggaggaggcctacttctctgtgaagagcacctgcccctgcaacttcaccctgtactatgaggtggccgcccggggcaacatcgtgctgagcggccagcagcctgcccacaccacccagcagaggagcaagagagctgccccagccctggagaagcccatccggctgacccacctgtctgaaacagagcccccaccagcccctgaggccgaggtggatgtgtgtgtgaccagcctgcacctggccgtgacccccagcatggtgcccctgggccgcctgctggtgttctacgtgcgggagaatggagagggcgtggccgacagcctgcagtttgctgtggagaccttctttgagaaccaggtgtctgtgacctacagcgccaatgagacccagcccggggaggtggtggacctgcgcatccgggccgcccggggcagctgtgtgtgtgtggccgctgtggacaagtctgtgtacctgctgcggagcggcttccggctgaccccagcccaggtgttccaggagctggaggactatgatgtgtctgacagctttggagtgtccagagaagatggccccttctggtgggccggcctgacagcccagaggagaagaagaagctctgtgttcccctggccctggggcatcaccaaggacagcggctttgccttcacagagaccggcctggtggtgatgacagacagagtgtccctgaaccaccggcaggacggcggcctgtacacagatgaggccgtgcctgccttccagccccacacaggcagcctggtggccgtggcccccagccgccacccccccaggacagagaagaggaagaggaccttcttccctgagacctggatctggcactgcctgaacatcagtgaccccagcggggagggcaccctgtctgtgaaggtgcctgacagcatcacctcctgggtgggggaggccgtggccctgagcaccagccagggcctgggcattgctgagcccagcctgctgaagaccttcaagcccttctttgtggacttcatgctgcctgccctgatcatccggggggagcaggtgaagatccccctgtctgtgtacaactacatgggcacctgtgccgaggtgtacatgaagctgtctgtgcccaagggcatccagtttgtgggccaccctgggaagagacatgtgaccaagaagatgtgtgtggcccctggagaggccgagcccatctgggtggtgctgtccttcagtgacctgggcctgaacaacatcacagccaaggccctggcctatggagacaccaactgctgcagagatggccgcagcagcaagcaccctgaggagaaccacgccgacagaagagtgcccatcggcgtggaccacgtgagaagatctgtgatggtggaggccgagggcgtgccccgggcctacacctacagcgccttcttctgccccagcgagcgggtgcacatcagcacccccaacaagtatgagttccagtatgtgcagaggcccctgcggctgaccaggtttgatgtggccgtgcgggcccacaatgatgcccgggtggccctgagcagcggcccccaggacacagctggcatgattgagatcgtgctgggcggccaccagaacaccaggtcctggatcagcaccagcaagatgggagagcctgtggccagcgcccacacagccaagatcctgtcctgggatgagttccgcaccttctggatctcctggaggggcggcctcatccaggtgggccacggccctgagcccagcaatgaatctgtgattgtggcctggaccctgcccaggcctcctgaggtgcagttcatcggcttcagcacaggctggggctccatgggagagttccgcatctggaggaagatggaggtggatgagagctacagcgaggccttcaccctgggcgtgccccatggagccatccctggcagcgagcgggccacagccagcatcattggagatgtgatgggccccaccctgaaccacctgaacaacctgctgcggctgcccttcggctgtggggagcagaacatgatccactttgccccaaatgtgtttgtgctgaagtacctgcagaagacccagcagctgagccctgaggtggagcgggagaccacagactacctggtgcagggctaccagaggcagctgacctacaagaggcaggacggcagctacagcgccttcggggagagagatgccagcggctccatgtggctgacagcctttgtgctgaagagctttgcccaggcccggagcttcatctttgtggacccccgggagctggccgccgccaagtcctggatcatccagcagcagcaggctgatggcagcttcctggccgtgggccgggtgctgaacaaggacatccagggcggcatccacggcaccgtgcccctgacagcctacgtggtggtggccctgctggagaccggcacagccagcgaggaggagcggggcagcacagacaaggcccggcacttcctggagagcgctgcccccctggccatggacccctacagctgtgccctgaccacctacgccctgaccctgctgcggagccctgctgcccctgaggccctgaggaagctgcggagcctggccatcatgagagatggagtgacccactggagcctgagcaacagctgggatgtggacaagggcaccttcctgtccttcagtgacagagtgtcccagagcgtggtgtctgctgaggtggagatgacagcctatgccctgctgacctacaccctgctgggagatgtggccgccgccctgcctgtggtgaagtggctgagccagcagagaaatgccctgggcggcttcagcagcacccaggacacctgtgtggccctgcaggccctggccgagtatgccatcctgtcctatgccggcggcatcaacctgactgtgtccctggccagcaccaacctggactaccaggagacctttgagctgcacaggaccaaccagaaggtgctgcagacagctgccatccccagcctgcccaccggcctgtttgtgtctgccaagggagatggctgctgcctgatgcagattgatgtgacctacaacgtgcctgaccctgtggccaagccagccttccagctgctggtgtccctgcaggagcctgaggcccagggccggcccccacccatgcctgccagcgctgctgagggcagcagaggagactggcccccagcagatgatgatgatcctgctgctgaccagcaccaccaggagtacaaggtgatgctggaggtgtgcacccgctggctgcacgccggcagcagcaacatggctgtgctggaggtgcccctgctgagcggcttccgggctgacatcgagagcctggagcagctgctgctggacaagcacatgggcatgaagagatatgaggtggccggccggcgggtgctcttctactttgatgagatccccagccgctgcctgacctgtgtgcgcttccgggccctgcgggagtgtgtggtgggccgcaccagcgccctgcctgtgtctgtgtatgactactatgagcccgcctttgaggccacccgcttctacaacgtgtccacccacagccccctggcccgggagctgtgtgccggccctgcctgcaatgaggtggagcgggccccagcccggggccctggctggttccctggagagagcggccctgctgtggcccctgaggagggcgccgccatcgcccgctgtggctgtgaccatgactgtggggcccagggcaaccctgtgtgtggcagtgatggagtggtgtatgccagcgcctgccgcctgcgggaggccgcctgccggcaggccgcccccctggagcccgccccacccagctgctgtgccctggagcagaggctgcctgccagcagcagcagcacctatggagatgacctggcctctgtggcccctggccccctgcagcaggatgtgaagctgaatggagctggcctggaggtggaggacagcgaccctgagcctgagggggaggctgaagatagagtgacagctggcccccggccccctgtgagcagcggcaacctggagagcagcacccagagcgccagccccttccaccgctggggccagaccccagccccccagaggcacagcggccgggtggtgggcgcccacaggcctggcctgctgagccctgtgtttgtgtacagccctgccttccagagcggcggggaggagggcctgtggatgagcaacacctgcaccctgaggtag

SEQ ID NO: 187838 - DNA, 5799 bp, Artificial Sequence
  derived and/or modified sequence
atggcccccggcgccctgcggggcggctgcgagcagcgggcccccggtgggggcgctcgcactgctgctttaggcccatggccgtggcctagtcctgggccagccccctccccaggtgctgcaccacccagaagcagaaagatgagtggagcattgctgtggcccctgctgcctctgcttttgctgctgctcagcgcccgcgacggcgtgcgggccgcccagcctcaggcgcctggttacttgatcgcagccccgagcgtgttcagagcaggagtagaggaggtcattagcgtcaccattttcaattctcctagagaggtgacagtccaggcccagctggtggcgcaaggagaaccggtggtacagagccagggggctatacttgacaaggggacgattaaactgaaagtgcctaccggtctgcgcggccaggccctccttaaggtttggggaaggggatggcaggccgaggaaggtccactgtttcataatcagacctcagtgacagtcgacgggagaggcgctagtgtttttatccaaaccgacaagcctgtgtacaggccccagcatcgggtactgatctccatctttaccgtgagtcccaacctgcggccagtcaacgaaaagcttgaggcttacattctcgacccccgcggctcaaggatgattgaatggagacacctgaaaccgttttgctgcgggatcaccaatatgtccttccctttgtctgatcagcccgtgctgggcgaatggttcatattcgtagagatgcaggggcacgcttataacaaaagtttcgaagtgcagaaatatgttctgccaaagttcgaactgcttattgatcccccccgctacatccaggatctagatgcgtgcgaaaccggcacggtgcgggctagatacactttcggaaagcccgtggctggcgcactcatgattaacatgaccgttaatggtgttggttattatagccatgaggtggggcgtccagtgttgcggactacgaaaatcctaggctctagggactttgatatttgtgtgcgggacatgattccagcagatgttcctgagcatttccgtggtcgtgtgagcatctgggccatggtgactagtgtggacgggtcccagcaggtggcttttgatgactcgactcccgtgcaacggcagcttgtagatatccgctattctaaagacacacggaaacagtttaaacctggactcgcctacgtcggcaaggtggagctgagctatcccgacggttcccctgcagaaggtgtgactgtgcagattaaggccgagctcacaccgaaggataatatatacacgtctgaagtggttagccagcggggtttggttggatttgagatcccttccattcctacttccgcccagcacgtgtggctggagacaaaggtcatggccctcaacggtaaacctgtgggcgcacagtaccttccatcttacttgagtcttgggtcctggtactcaccctcccagtgttacctgcaactccagccaccctcccaccccctgcaggttggtgaggaagcttacttttctgtgaaatctacctgcccctgtaacttcaccctgtactatgaggttgcagctaggggtaatatagtgctctctgggcagcagccagctcacaccacccagcagcgcagcaagagagctgccccagcactagaaaagcctatacggcttacacatctgtccgagacagagccccctcctgcccccgaggccgaggttgatgtatgcgttacttcactgcatctggcggtaacaccgtcgatggtacctttaggtcgtctgctagtgttctacgtccgcgaaaacggagagggagtggcagacagccttcaatttgcagtggagacattctttgaaaatcaggtctcagtgacctactccgccaacgaaactcaaccgggtgaagtggtggatcttagaatacgggcggcccgtggtagttgcgtgtgtgtcgcagccgtcgataagagtgtgtacctccttaggtcaggctttagactgacaccagctcaggtgtttcaagaactggaggactacgatgtgagcgactcttttggggtgtcccgagaggacgggccgttctggtgggccggactcactgcccagagaaggagacgatcaagcgtgtttccttggccttggggaattacaaaagattccggctttgcctttacagagacaggtctcgtcgtgatgaccgatagggtcagcctcaatcacaggcaggatgggggcctctatacggatgaagcggtccccgctttccagccacatacggggtcacttgtggctgtcgctccctctcggcaccctccaagaacagagaagcggaagaggactttcttccccgagacctggatctggcactgtctgaatatcagtgacccttcaggcgaagggactctatcagtcaaggtgcccgactctattacctcctgggtaggcgaagctgtcgcactgagcacgagtcagggactcggcattgcggagccttctctgcttaagacttttaaacccttttttgtagacttcatgctgcctgccctgattattaggggagagcaggtcaagattcctctgtcagtgtacaattatatgggcacttgcgcagaagtgtacatgaaactctcagtgcctaaaggcatccaatttgtcgggcatccaggaaagaggcacgtcacaaagaagatgtgcgtggcacccggggaggccgaaccaatctgggtggtcctcagtttctcggacctgggactcaacaacataactgcaaaggccttggcctacggagatactaattgctgtcgcgatggacgaagttctaaacaccccgaggagaaccacgcagataggcgcgtgccaatcggggtcgatcacgtcaggcggagtgtgatggttgaggccgagggggtcccccgagcttacacctacagcgcattcttttgcccaagcgaaagggtacatattagcacccctaataaatacgaattccagtacgtccaaaggcctttgcggctgacccggttcgatgtggctgttagagcacacaacgacgcaagagtcgccctgtcaagcgggccccaagacactgccggcatgatcgagatcgtgctgggcggccaccagaacacccgctcgtggattagtactagcaaaatgggtgagcctgtcgcatccgcccacaccgcgaagatattgtcatgggacgagtttcggacattttggattagctggcgtgggggattaatccaggtcggtcatggccctgagcctagtaacgagtcagttattgtggcgtggacactcccacgccccccagaagtgcagttcattggattttcaaccggatggggaagtatgggagagttcagaatttggaggaagatggaggttgacgagtcctattccgaggcctttactctgggtgtcccacacggagctatccccgggtctgaacgggccaccgcttccataataggggacgtgatgggccccactctgaaccatctgaataatcttttgcggctgccatttgggtgcggggaacaaaatatgatccactttgcccccaacgtgttcgttttgaaatatttgcaaaaaactcagcagctgtccccggaagtggaacgcgaaaccactgattatctggtgcagggataccagagacagctgacctacaagcgacaggatggctcttactccgcttttggagagcgtgacgcaagcggctctatgtggctcaccgccttcgttctgaaatcattcgcacaagcaagatcattcatctttgtagaccccagagagctggccgcggccaagtcgtggatcatccaacagcagcaggccgacgggtcattcttggctgtgggcagggtccttaataaagacattcaaggaggcattcatggtaccgtcccgctcacagcctatgtcgtcgtggctcttctggaaacaggcactgcatcagaagaagagagagggtctacagataaggcccgacatttccttgaaagcgctgcccccctcgcgatggatccttattcgtgcgccctcacaacctatgcactgactcttttgaggtctccagctgctccggaggcattacggaagcttcgctcattggctatcatgcgcgacggcgtgacccattggtccctgagcaacagctgggacgtggataaaggaaccttcttatcattttccgaccgggttagccaaagcgtcgtatctgccgaagttgaaatgaccgcctacgcactccttacttatacactcctaggcgatgtggccgcagcgctgccggtggtaaaatggctttcccagcagcgcaacgctttgggcggttttagcagtacacaagatacttgtgtagctctgcaagccctggccgagtacgctattctgtcctatgctggaggcatcaatctgacagtttctctggcgtctaccaatttggactatcaggagacgttcgagctgcacaggaccaatcaaaaggtgcttcagaccgccgccatcccaagccttcctacaggtctctttgtgtcagccaagggcgacggctgttgcctcatgcaaatcgacgtaacatacaacgtccccgacccagtggcgaaaccggccttccaactactcgtcagtctgcaggagccggaggcccaagggagaccccctccaatgcccgcttctgctgctgaaggctccagaggagactggcctccagccgatgacgacgatccagccgctgaccagcaccatcaggagtataaggtcatgctggaggtgtgtactcgttggctgcacgctggaagctcaaacatggccgtcttagaggttcccctgctgagtgggtttcgagctgatattgagtccctcgagcagctgctgttagataagcacatgggaatgaagagatacgaagtggctgggaggcgcgtgctcttctactttgatgagatcccctcaaggtgcttgacctgtgtgcgatttcgagccttgagggagtgtgtggttggccgaaccagtgcactgcccgtttcagtttatgactactacgaaccagcattcgaggctaccaggttctataatgtgagcacacatagcccgttagcacgcgagctctgcgctggtcctgcctgtaatgaagtggaaagagctcctgctcggggcccaggatggtttcctggcgagtctggccccgccgtcgcccctgaagagggcgcagcaatagctcgatgcggatgtgaccacgactgtggggcacagggcaatccagtctgtggtagcgatggggtcgtttacgcctcagcctgccggcttcgggaggcagcgtgtaggcaggctgcgcccctggaaccagcacctccaagttgttgtgccctggaacagaggctcccggcctcttcatcttcaacttatggagatgacctggcctctgtggctcccggacctctgcagcaggacgttaaactcaatggggctggtcttgaggtggaggattctgaccccgagcccgaaggagaggcagaggatcgggtgacagccggtcctaggcctccagtgagttcgggtaacctggagtcatccacacagagtgcaagtcccttccaccgctgggggcagactccagctccacagcgtcactccggaagagtggtaggggcccacagacccggactgctgagtccggtgttcgtttatagccccgcctttcagtcaggcggggaagaaggtctctggatgagcaatacctgcacactgcgttag

SEQ ID NO: 187839 - DNA, 5832 bp, Artificial Sequence
  derived and/or modified sequence
tgacccagcctggccggccggggcgccggccggatggcccccggcgccctccgaggtggctgcgagcagcgcgctcccggggggggggcaaggaccgctgcccttggcccatggccatggccctcccccggcccagcaccgtcccctggggcggccccaccccggagccgtaaaatgtcaggagcactcttatggcccctgctccctctgctgctactgttactgtccgctagggacggagtgcgcgctgctcagccccaggccccgggttatctgattgccgcgccatcagtattcagggcaggtgttgaggaagtgatctccgtcactatttttaattccccaagggaagtgacagttcaagcgcaactggtagcccagggggaacctgttgtacagagccaaggcgctatcctggacaagggaactatcaagctgaaagtaccgaccggcttacgagggcaggcactcttaaaggtatggggtcgcggatggcaggctgaggagggtcccctttttcacaaccagacatccgttacggtcgacgggcgcggtgcaagtgtttttatccaaaccgacaagcctgtgtaccgcccccagcatcgagtactgatttctatcttcacggtgagcccgaatctcaggcctgtgaacgagaagttggaagcctacatcctggaccctagggggagtcgaatgatagagtggaggcatttgaagcccttctgctgcggtattacaaatatgtctttccctctctcggaccaaccggttctcggggaatggttcattttcgtggagatgcagggtcacgcatataataagtcctttgaagtgcagaagtacgtgctgccaaagtttgaactgctcatcgacccaccgcgatacatccaggatctagacgcatgcgagactggcaccgtccgcgcacggtacaccttcggcaaacccgtggccggagccttaatgatcaatatgactgtaaacggagtgggctattatagccacgaggtggggagacctgtgctgagaaccaccaagattctgggatccagggatttcgatatctgtgtcagggacatgatccccgctgacgtgcctgagcattttagggggagggttagcatctgggcgatggtaacgagcgttgatggatcccagcaagtagccttcgacgactcgaccccagttcagcgccaactcgtggatatcagatacagcaaggataccagaaaacagtttaaaccgggactcgcctatgttggtaaagtagagctaagctacccagacgggtccccagccgagggtgtaaccgtgcaaataaaggcggagttgacacctaaggacaatatctatacatcagaagtggtgtcacaaaggggcctggtgggttttgaaatcccatcgatcccaacgagcgctcagcatgtatggctggaaacaaaagttatggcgctcaacggaaaacctgtgggagcccagtatctgcccagctacctcagtttaggttcctggtattctccttcccaatgctacctgcagctccagccaccctcccatcctctccaggtgggagaagaggcttacttttccgttaagtccacgtgcccctgcaactttacactatactacgaagtggctgctcggggaaatattgttttaagtggacagcagcccgcacacacgacgcaacaacgcagtaaacgggctgctccagcactggaaaagcctatccgcttgacccatttgtcagaaaccgagcccccgcccgcccctgaagccgaagtggacgtctgtgtgacttctcttcatctggctgttactccaagtatggtgcctctgggccggttgctggtgttttatgtaagagagaatggtgagggggtcgcagattctctgcagtttgcagttgagacatttttcgagaatcaggtcagtgtgacttactcagcgaatgagactcagcccggtgaggtagttgatctgcgcatacgggctgccaggggctcctgtgtctgcgtggctgctgtagacaaatctgtgtacttgcttcgcagcgggttccggttaacccccgcccaggtgtttcaggaactggaggactacgatgtatcggactcatttggcgtgagccgggaggatggtcctttctggtgggcaggtctcactgcccagaggaggaggagaagtagtgtgtttccgtggccctgggggatcacaaaggattcaggttttgctttcacggagactgggctcgtggtaatgaccgacagggtctcactgaaccatcgacaagacggagggctttacacagacgaggctgtgccagcctttcagccccatacaggctccctagtggcagtagctccttcccggcaccctccacggacagagaagcggaagcgtaccttctttcctgagacttggatttggcactgcctcaatatcagtgacccctcgggtgagggaaccctttcagtcaaagttcctgattccattacctcatgggtgggtgaagccgtggccctaagcacctcacaaggcttgggcattgcagagcccagcctcttaaagacatttaagccattttttgtagactttatgctgccagccttaattatacgtggcgaacaggtcaagattccactgtccgtttataattatatgggaacatgtgcggaagtgtatatgaagctttccgtgcctaagggtatacagttcgtcggacatccagggaagaggcacgtcactaagaagatgtgtgtagctccgggggaagcggaacccatttgggtcgttctgagtttcagcgacttgggcctgaataacatcaccgccaaagccctcgcctacggtgatacaaactgctgtcgagacggtaggtcttctaagcaccccgaggagaatcacgccgacagaagggtccctattggcgtcgatcatgtgaggagatctgtcatggtagaggccgaaggggtgccccgcgcatatacatatagcgcctttttctgcccatcggagcgcgtgcatatttctactccaaataaatacgagttccagtacgtccagagaccactccgactgactcgatttgacgtggctgtaagagcacataatgacgcccgcgtggcactgagtagcgggccacaagacaccgctgggatgattgagattgttctcgggggccatcagaacacccggtcttggatctctacttccaagatgggcgaacccgtcgcatctgctcataccgctaagatcctgtcgtgggacgagttcagaactttctggatcagttggcgtggcggactgatacaggtaggacatgggcccgaaccgtcaaacgaatcggttatcgttgcatggaccctgcctaggccccccgaggtgcagtttatcggcttttcaaccgggtgggggtctatgggggaatttagaatttggcgaaaaatggaggttgacgaaagttactcggaagctttcaccctcggggtgccccacggggctatcccaggttctgaacgggcaacagcttctataatcggagacgtgatgggtccaacactgaatcaccttaataaccttctgagactgcctttcggttgtggggagcagaacatgatccacttcgcacccaatgtgttcgtacttaagtatctacagaaaacccaacagctctctccagaagtggagagggagactacagactatctggtgcaaggatatcagcgccagctcacatacaagaggcaagacggctcttacagcgccttcggcgagcgggacgcctcgggttccatgtggctgacagcctttgtactgaaatccttcgcacaggctagaagctttatcttcgtggatccccgcgagctcgctgctgccaagagctggattatccagcagcaacaggccgatgggtcattcttagccgtgggtcgggtcctgaacaaggacatccagggaggtatccacgggactgtgcctctaaccgcttatgttgtggtagctttgctggaaactggcacagccagtgaggaagagcgtgggagcaccgacaaggctcgacatttcttagagagtgcggctcccctggccatggacccttactcatgtgctctaactacgtacgccctgaccttgttaaggtcccccgccgcccctgaggctctccgcaagctcaggagtttggccattatgagagacggtgtgacacattggtcgctctctaacagttgggacgttgacaaaggtacatttttgtccttcagcgatcgagtcagtcaaagcgtggtctcggccgaggtggagatgactgcgtacgctctcctaacctacacactcctgggtgatgtggccgcagctctgccggtagtaaaatggctgagccaacagaggaatgccctagggggcttttcctccacacaagatacatgcgtggcgctccaggccctggcagagtacgcgattctctcctacgctgggggtataaatttgacagtcagcctggcgtccactaatctggattaccaggagacatttgaactacaccggaccaaccagaaggtcctgcaaactgcagccattccttccctcccaactgggctgttcgtgtctgccaagggtgatggatgttgtctaatgcaaatcgacgtcacctacaatgttcccgacccagttgccaaacctgcatttcagctcctggtctcactgcaggagccagaagctcaggggcgcccaccacctatgcctgctagtgccgccgagggatccagaggggactggccacctgctgatgacgacgaccccgcggctgaccagcatcaccaggaatataaggtgatgctggaggtgtgcaccagatggctacacgccggctcctcaaatatggccgtgttggaggtacccttactgtctgggttccgagctgacatcgagtctcttgaacagctgctgctagataagcacatgggcatgaaacgctacgaagtggcagggaggagggtgcttttctactttgacgaaatccccagccgctgtttgacctgtgttagatttagagcattgcgtgaatgcgttgtcggccgcacctctgcgttgccagtgtctgtttatgactactacgagcctgcattcgaggccacacgcttctacaatgtgagcacacacagccccctcgctagagagctgtgcgcaggaccagcatgtaatgaggtcgagagagccccggctcgaggacctggctggttccccggagagagcggacccgctgtagctccggaggagggcgctgcaattgcccggtgcgggtgcgaccacgactgtggagcccaaggcaaccccgtatgcggttctgacggcgtggtctatgctagcgcttgtcggctgagagaagcagcatgcaggcaagccgcccctctggaacccgccccaccatcttgctgcgctcttgagcagagactcccagcatctagtagttctacctacggagacgatctggctagcgttgcaccaggacctttacagcaggacgtgaagctcaatggagcaggattggaggttgaggattccgatccagagccagaaggcgaggctgaagatcgagttaccgccgggccccggcctcctgtgtccagtggaaatctggagagctcaactcagtctgcatctccctttcaccgatggggtcagactcctgcacctcagcggcattctggaagggtggtgggggctcacaggcccggcttgctgtcaccagtatttgtctactccccagctttccaaagcggcggggaggagggtttgtggatgagcaacacctgtacgctgagatag

SEQ ID NO: 187840 - RNA, 5799 nt, Artificial Sequence
  derived and/or modified sequence
auggcaccuggcgcucugcgaggagggugugaacagcgcgcccccggcggcggagcccgaacugcagcccuggguccuuggccuuggccaagucccggcccugcgccuucaccaggcgccgcuccuccccguucgcgcaaaaugagcggcgcccuguuauggccucucuuaccccuucugcugcuccugcuaagcgcccgcgacggagugcgcgccgcucagccccaagcuccaggcuaccugauagccgccccauccguguuuagagccggcguugaagaggugaucucagucacaaucuuuaauagcccgagagagguuaccgugcaagcgcagcugguggcgcaaggagagccagugguucaaagucagggggcaaucuuggauaaagggaccaucaagcucaagguaccuacuggauuacgaggacaagcccuguuaaaaguaugggggcggggauggcaggccgaagagggaccacucuuucacaaccaaacaagcgucacggucgacggccgcggggcuuccgucuucauucagaccgacaagccuguauacagaccucagcauagaguccuuauaucaaucuuuacaguuagucccaaccugaggccaguuaacgagaagcucgaagcguauauucuggaucccagagggucgaggaugauugaauggagacaccuuaagccguuuuguugugguaucacaaauaugucauucccuuuguccgaccagcccgugcucggagaaugguuuaucuucguugagaugcaggggcacgcguauaauaaaaguuuugaagugcagaaguacgugcugccuaaguuugaguugcucauugacccuccucgguauauucaagaucuggacgcaugcgaaacgggcacagugcgugcaagguacacguucggaaaacccgucgcgggcgcucucaugauaaauaugacugugaauggggugggauauuacucccacgagguugguaggcccguacuucggacuacuaagauccuggguucgagggauuuugauaucugugugagagauaugauuccugccgaugugcccgagcauuuuagaggacggguuuccauaugggcuauggugacgucugucgaugggucucagcaaguugcuuuugacgacagcacccccguccagcggcagcugguggacauccguuacuccaaagacacacguaagcaguuuaaaccgggccuggcuuacgucggaaaaguggaacucucuuacccagacgguucccccgccgagggcguaacugugcaaauuaaagcugaacugacucccaaggauaacauuuacacuuccgaggucgugagucagcgcggucugguuggauuugaaauuccuucgauccccaccagcgcccagcacguauggcucgagacgaaggugauggcucugaacgggaagcccgugggugcacaguaccucccuucauaccugucucuggguucgugguauagcccaagucaaugcuaucuccaguuacagccaccaagccauccacugcaggucggugaagaggccuacuucagugugaagucuacuuguccuugcaauuucaccuuguacuaugaaguggccgcuagggggaacauuguauuaaguggacagcagccagcucacacuacgcagcagcgcuccaagagggcggcaccagcauuggaaaaaccgaucagacugacccaccugagcgaaaccgagccuccucccgcucccgaggcagagguagacgugugugugacgucccuccaucuggcugugacacccucuauggugccacuggggagacuccugguguuuuacgugagagagaauggugaggggguugccgacagccugcaguuugcaguggagaccuucuucgagaaucaagucuccgucaccuacagugccaaugaaacacagcccggagaaguaguggaucugcggauccgcgccgcccguggcaguugcgucugcguugcugcugucgauaagucuguguaucuucuaagguccggauuuagacuaacuccagcacagguauuccaagaauuagaagauuacgaugucucggacuccuuuggggucucaagagaggacggaccauuuuggugggcuggccucacggcccaaaggagaagacgcaguucaguguuuccuuggccuuggggaaucaccaaggauaguggguuugccuuuaccgaaaccggcuugguaguaaugacagacagggucucccugaaccaucggcaagacgguggccuuuacaccgacgaggccgugccugcguuccagccucacacugguucccugguugcuguugcaccaucacggcacccucccagaacggagaagcggaagcggacuuucuucccagagacuuggauauggcauugccuaaacauuucagaccccagcggagaggggacucugucaguuaaggugccggacaguauuacguccugggugggcgaggcuguggcucugagcacuagccagggacucggaaucgcugagccuucucuccugaaaaccuuuaaaccauuuuucguggauuuuauguugccugcccucaucauucggggugagcaggugaagaucccccucuccguguauaauuacauggggacaugcgcagaaguuuauaugaagcucagugugccuaaaggaauccaguuugucggucacccugguaagcgccacgucacaaaaaagaugugcguagccccaggugaggcugaaccaauaugggucguccucucuuuuucugaucuugggcugaacaacauuaccgcuaaggcgcuggcuuacggcgacacaaacuguuguagggauggacggucguccaagcacccggaggaaaaccacgcugauaggagggucccuauuggggucgaucaugugaggagaucagucauggucgaagcugagggcguaccacgugccuacacauacagugccuuuuuuugucccagugaacgggugcauaucuccacaccgaacaaauaugaauuucaguauguucagcguccacugagacuuacacgguucgauguagccgugcgggcccacaacgaugcucggguugcacuuaguuccgggccccaggacacugcuggaaugauagaaauuguccugggcgggcaucagaauacacgcaguuggaucagcaccucuaagaugggugaaccugucgccagugcccauaccgccaagaucuuaucgugggacgaguuuaggacauuuuggaucuccuggagggguggacucauucaaguagggcacggccccgagccuaguaacgaaucaguuaucguggcauggacccuuccacgaccaccugagguccaguuuauuggauuuucuacuggauggggaucaaugggcgaguuuagaauuuggaggaaaauggaaguggacgaauccuacagcgaagcuuuuacucucgggguuccccacggggcgauuccgggaucugagcgcgcaacagccucaaucauuggggaugugaugggcccaacacuaaaccacuuaaacaaccugcugcgguuaccuuuuggaugcggagaacagaacaugauucauuucgcccccaauguguucgugcugaaguaccugcagaagacccaacagcugucucccgaaguugaaagggagacaaccgauuacuugguccaaggauaucagcggcaacugaccuauaagcggcaggacggcucauauucagccuuuggggagcgggaugcaucugguuccaugugguugacugccuucguguuaaaaucuuuugcucaggcucggaguuucaucuucgucgauccucgcgagcucgcugcugcaaaaucuuggauuauccagcaacaacaagcagauggcagcuuccuggcagugggacgcgugcuuaauaaagauauucaggggggaauccacgguacugugccauugaccgccuacgucgugguugcacuuuuggaaaccggcacugcaagcgaagaagaacggggaagcacugauaaagcaagacacuucuuggaaucagccgccccucuggcaauggaccccuacagcugcgccuugaccaccuaugcacugacccuacucagaucaccugccgccccagaggcucucaggaaacuccguuccuuggccauaaugcgcgauggaguaacccacuggucucugagcaauucuugggacgucgacaagggcacauuucucucauucucagaucgcgugucucaguccguagucagcgcugagguagaaaugaccgcuuacgcccuccuaacauacacgcugcugggcgacguugccgcugcgcuacccguggugaagugguugucucagcagcgaaacgcccucggaggcuucucaucgacucaggacacuugcguggcucuccaggcccuugcagaauaugccauucugaguuacgccggcgguauuaaccugaccgugagucuggcauccacuaaucuggauuaccaagagacauuugaacuccauaggacuaaccaaaagguccuucaaaccgcagcaaucccuagucugccaacuggucuguucgucucugccaaaggugauggaugcugucucaugcagaucgacgucaccuacaacgugccggacccugucgcuaaaccugcuuuucaguuacucgugucccuccaggaaccagaagcccaggggcgcccuccgccaaugcccgcguccgccgcugaagguucccgaggugacuggcccccugccgaugaugacgacccugccgcagaccagcaccaccaagaauauaagguaaugcucgaaguuuguacucgauggcuccaugcgggcucuagcaacauggcuguucuggaagucccuuugcugagcgguuuccgggcggacaucgagucuuuggagcagcugcuguuggacaagcacaugggaaugaaaagauaugaggucgcuggacgaagagugcuguuuuauuuugaugagauccccagucgaugucucaccugugugagguucagggcacugcgagaauguguggucggaagaaccagcgcacugcccguauccguguacgacuauuacgagccagcauuugaagccacgagguucuacaacgucagcacucacagcccacuggcaagagaauugugugccggaccugcaugcaaugaggucgagcgcgcaccugccagaggcccuggaugguucccuggggagaguggaccagccguagccccggaagagggcgcggcaauagccagaugcgggugugaucacgacuguggugcacagggcaacccaguguguggcucagacggcguggucuaugccagcgcgugucggcuuagagaggcagccugcagacaagcagccccccuagaacccgccccaccgagcuguugugcgcuagaacagcggcucccugccucaucuaguucaacguacggggaugaccuggccucagucgcacccggaccccuccaacaggacguuaagcuuaacggcgccggccuggagguggaggauucugacccugagcccgaaggugaggcagaagaucgcgugacagcagggccccgcccaccggugucaaguggcaaccuugagucuucgacccagagcgccuccccguuccauagguggggccagacucccgcgccacagagacacagcggucgaguuguuggugcccaccggcccgggcuucugucccccguauuuguguacucgccggcuuuucagucaggcggagaagaaggauuauggaugucuaacacuuguaccuugcgcuag

SEQ ID NO: 187841 - RNA, 5832 nt, Artificial Sequence
  derived and/or modified sequence
ugaccuagucuggcuggacggggggcagggaggauggccccuggcgcucuccgcggagguugugaacagcgagcuccagggggcggagcuaggacggccgcgcugggaccuuggcccuggccaucacccgggccggcacccucucccggcgcugcccccccacggucccgaaagaugaguggcgcguuacuguggccauuacuuccauugcugcuucuguugcugucggcccgugaugguguccgcgccgcccaaccccaggcccccgguuaccugauagcugccccuucaguauucagagcagggguagaggaggucauuagcgugaccaucuucaacucucccagggaggucacaguacaggcucagcugguugcccaaggagaaccugucguucagucccaaggugcaauucuggauaagggaaccaucaaacuuaaagucccaacaggucucaggggccaggcucuccugaagguguggggucggggauggcaggccgaagaggggccuuuguuccacaaucagaccucagugacuguugacgggcgcggcgccucuguguuuauucagacggacaaacccguguauagaccucagcaccgcguucucaucucaauuuuuaccgugucaccgaauuugagacccgugaaugaaaaguuggaggcuuacauacuugacccacggggaucucgcaugauugaguggaggcaccuuaagccuuuuugcugcggcauuaccaauaugucauucccccucagcgaucagccugugcugggagagugguuuauauuuguugagaugcaggggcacgcuuacaacaaaucauucgagguacagaaguauguucugccaaaguucgaacugcugaucgacccgccucgcuacauccaggaccucgaugcaugugagacugggacugugcgagcaagguacacguuugggaaaccaguggccggcgcccuuaugaucaacaugaccguaaauggugucggguauuauucucacgaaguggguaggccaguacugagaacuaccaaaauauuagggagccgggacuucgacauuugcgugcgcgacaugauucccgcagacgugcccgagcauuuccgcggucggguuucaaucugggcaauggugacguccgucgauggaucccagcaggucgcuuuugaugauagcacacccguacagagacaacugguagauauucgguauuccaaggauacgagaaagcaguuuaagccaggccucgcguaugucgggaaaguugagcugucuuauccugacggcucgccagcggaggggguuaccgugcagauaaaagcugagcuuacaccuaaagacaauauuuacaccucagaagucgugagccagaggggccuggugggguucgaaaucccaucuaucccaacguccgcucaacacguguggcuggagacaaagguuauggcucucaacggcaaaccagugggcgcucaguaucugcccagcuaccucagccuugguaguugguauagucccucucaguguuaccugcaguugcagccuccaucacauccuuugcaggugggagaggaagccuacuuuuccgugaaaaguacuugcccauguaauuucacccuguauuacgaaguggcugcuagagggaauauugugcuguccgggcagcaaccggcgcacacuacucagcaaaggagcaagagagccgcgcccgccuuggaaaagcccauuagacugacucaccugagcgaaacagagccucccccagccccagaagcugaagucgacguuugcgugacaucucuccaccuggcggucacccccaguauggugccacucggccgccuacucguguuuuaugugcgggaaaauggcgaaggugucgcugacagucuccaguuugcagucgagaccuuuuuugaaaaccagguguccgugacguauucagcgaaugagacucaaccaggagaagucgucgaccugcgaauuagagcugcaagagggucuuguguuugcguggcggccguggauaagagcgucuaccugcuuaggagcgguuucagacugaccccagcccagguguuccaggaauuggaagacuaugacgugucugacucuuuuggugugaguagggaggauggcccuuuuuggugggccgguuuaaccgcacagaggcguaggcgaagcaguguguuuccuuggccguggggaauaacuaaagacucuggguucgcuuucacggagaccggccugguggugaugacugaucgggucucgcucaaccaucggcaggauggcggauuauacaccgacgaggcagugcccgccuuucagccgcacaccgggagucugguugcagucgcaccuucucggcacccucccaggacagagaagcgcaaaagaacauuuuucccugagacuuggauuuggcauugucugaacaucagugacccuagcggcgagggaacgcucaguguuaaagugcccgauuccaucacuucauggguaggcgaggccgucgcacucucaaccagccagggguugggcaucgccgaacccagcuuguuaaaaaccuuuaaacccuuuuucgucgauuuuaugcugccugcccuuauuauucgcggcgaacaggugaaaauacccuuauccgucuauaacuauaugggcacuugcgcugaaguuuacaugaaguugagcguacccaaaggaauacaguucgugggucauccuggaaagagacacgugacuaagaagaugugcguugcacccggggaagccgagcccauuugggucguccugucguucagcgauuugggguugaauaauaucacugccaaggcuuuggcuuacggcgauacgaacuguugccgagacgggagaucuagcaagcacccagaagagaaccaugccgacagaagagugccuaucggugucgaccaugugcggcgcaguguuauggucgaggcggaaggcgucccaagagcauacacauacuccgcguucuucuguccgucagagaggguacauaucuccacccccaacaaguaugaauuccaauacgugcagcgaccccucaggcuuacccgcuucgacgucgcuguuagggcgcacaaugacgcucguguugcucugagcagcggcccccaggacaccgcgggcaugauagaaaucguucuuggcgggcaccaaaauacccggucuuggaucucaacaucuaagaugggagagcccguagccagcgcacauacggccaagauccugucgugggacgaguuccguaccuuuuggauuucuuggcggggcggucucauccaggugggccauggacccgaaccuuccaacgagucagugaucguggccuggaccuuacccaggcccccugagguucaauucauagguuucagcacuggauggggguccaugggagaguuucggauauggaggaagauggaaguggacgaauccuauucggaggcuuucacgcucgguguuccccacggcgcaauuccagggucugagagggccacugcauccauuauuggagaugugaugggcccuacccuaaaucaccucaacaaucugcuacgucugccuuuuggcugcggggagcagaauaugauacacuucgcgcccaacguguucguccugaaguaccugcagaagacccagcagcugaguccugagguggagcgggagacaacagauuaccuugugcagggguaucagagacaacugacguacaaacgccaggacggcucguacucagcauuuggcgaacgggaugcaagcgggagcaugugguuaacggcuuucguauuaaaguccuuugcccaggcuagaagcuuuaucuucguagacccacgggagcuggccgcugccaaaagcuggauuauccagcagcagcaagcugacggaucauuccucgccgucggacgcgugcugaacaaagacauacaggguggaauucacgguacugugccgcuaaccgcguacguuguugucgcccuguuggagacuggcacagcuuccgaagaagaacguggauccaccgacaaggcgaggcacuuuuuagagagugcagcuccgcuggcgauggaccccuauuccugcgcauuaacuacauacgcucucacccuccuacguucucccgcugcucccgaagcacuuagaaaacugagaucacuugcaauuaugagggacggagugacgcauuggagccugagcaauuccugggacguagacaaagguacguuccugaguuucucugaccgcgucucucagucuguggucucagccgaaguggaaaugaccgccuaugcacuacugacuuacacucugcucggcgauguugcggccgccuugcccgucguuaaauggcugagucagcagaggaacgcucucggaggcuucuccuccacacaggacaccugcguugcccugcaggcuuuggcugaauacgcuauucucucuuaugcuggcggcaucaaucugaccgucucucuggcgucaacuaaccuggacuaccaggagacuuucgaacuccacagaaccaaucagaagguauuacagacugccgccauuccuucacucccaaccggcuuauucguuagugccaaaggcgaugggugcugccugaugcaaauugaugucaccuacaaugugccggauccuguggcuaagccagcuuuccaguugcuggugucacuccaggaaccugaggcccaaggccggccuccccccaugccugccagugcugcugaggguucccgaggagacuggccaccggccgacgacgacgaccccgcggccgaucaacaccaccaagaguauaagguuaugcuggaggugugcacccgcuggcuccacgcaggcucauccaauauggcagugcuggaggugccucuguugaguggcuucagagccgacaucgagucccuugaacagcuccugcuggacaaacauauggggaugaaacgcuacgagguggccgguagaagagugcucuuuuauuuugacgagaucccuagucgcugucuuacuugcguucgauuuagagcauuacgcgaaugcguagucggccgaacuuccgcccuccccguuuccguuuacgacuauuaugagccagccuucgaggcuaccagauuuuauaacgucuccacucacuccccucuggcacgcgagcugugugcaggcccagccuguaaugagguggaacgcgcaccugcacguggcccagggugguuuccuggagagucaggccccgccguggccccagaagaaggagcagcuauugcacggugcggcugcgaccaugauugcggagcccaggggaacccugugugugggagcgacggagucguguacgcgucugccugccgccugcgugaagcagccugccgccaggcugcaccguuggagccugcgccuccuuccugcugugccuuagaacaaagacugccugcaagcucuaguucaacguacggugaugaucuggccucagucgcacccgguccgcuucagcaagaugugaaacugaauggggccggccucgaggucgaagauucggacccagaaccugaaggcgaagcggaggacagaguuaccgccggcccgcggcccccuguaucuucuggcaaucuugaaucauccacgcagagcgcaucaccuuuucaucgguggggacaaacgcccgcuccacaacgacauucaggcagaguggugggagcucaucgacccggacugcucaguccuguuuucguauacagucccgcuuuccagagugggggagaagaaggacuguggaugaguaauaccuguacgcuacgguag

SEQ ID NO: 187842 - RNA, 5799 nt, Artificial Sequence
  derived and/or modified sequence
auggcuccaggagccuugcgugggggcugcgaacagcgcgcuccuggugggggugccagaacagcggcacucggcccguggccauggccuuccccagggccagcuccuagccccggagccgccccuccccgcucuagaaagaugucuggggcccucuuauggcccuuacuuccauugcuuuugcugcuccugagcgcccgcgacggugucagggcugcccaaccacaagcacccggcuacuugaucgccgcacccucuguuuucagggccggaguugaagaagugaucucagucacgauuuucaauucacccagggaagucaccguucaagcucagcugguggcccagggagagcccgucgugcaaucacagggcgccauucuugauaaagguaccaucaagcuuaagguucccacuggacugcguggacaggcacugcucaaggugugggguagagguuggcaagccgaggagggcccccuuuuucauaaccaaacauccgugaccguggacgggagaggugccucggucuuuauucaaacagacaagccagucuauaggccacagcacagagugcucaucuccauuuuuaccguguccccuaaccuccgaccggucaaugagaaacucgaagccuacauacuggaucccagaggaagucggaugauugaauggcgacaccuaaaacccuuuugcuguggcauuaccaacaugagcuuccccuuaucugaccagccaguacugggcgagugguuuaucuucguugaaaugcaaggccaugcuuauaacaaaagcuucgaaguacagaaauacguucuaccuaaguuugaguuacugaucgauccaccacgauauauccaggaccucgaugccugcgaaacaggcaccgugcgcgccagauacacauuuggcaagccaguugcaggggcucuuaugauaaacaugacaguaaacggggucggcuauuacagucacgaagucggcaggccgguccugcguaccacaaagauacuaggcucuagggauuuugauauuugugugagagacaugaucccagccgaugugccagaacauuucagaggccgggucuccaucugggcgauggucaccucuguugauggcucacagcagguagcauucgacgacucaaccccagugcagcgccaauuggucgacaucagauacucuaaggauaccaggaagcaauucaaacccggccucgccuacguuggaaaagucgaguugagcuaccccgauggguccccugccgaaggcguaaccguucagaucaaagcagaacucaccccaaaggacaacaucuauaccuccgaaguugugucucaaagaggcuuagugggcuucgaaaucccaaguaucccuacuagcgcccagcacgugugguuagagacaaaaguuauggcgcucaaugguaagccugugggcgcccaauaccugccaucauaucugucuuugggaucaugguacagcccuagccaguguuaucuucagcuacagccaccuucccacccucugcagguaggugaggaggccuacuucagcguuaagucuacuugcccauguaauuucacccucuacuaugagguugcugcucgagguaauauuguacuaucuggccaacagcccgcccauacuacacaacaaaggucaaagcgcgccgcacccgcacuagagaagccaaucagacugacucaccugagcgaaacagagccuccuccagcaccagaggccgagguugaugugugugugacaucccugcacuuggccgugaccccuuccauggugccacuggguaggcugcucguguuuuacguccgcgaaaauggggagggaguugccgacagucugcaguuugcuguggagacuuucuuugagaaccaagugagugugaccuacucugccaacgaaacccagcccggggagguggucgaucuccgaauuagggcagcuagagggagcugcgugugcguggccgcugucgauaaaagugucuaucugcucagauccggauuuagacugacaccagcucaggucuuucaagaacuagaagauuaugacguuuccgacuccuuuggcguuagucgcgaggaugguccuuucuggugggccggauuaaccgcucagaggcgaagacgcucuagcguuuucccguggcccugggguauaacuaaagauaguggauuugccuuuacugagaccggccugguuguaaugaccgaucgcguaucccugaaucauagacaggacggugguuuauacaccgacgaagcugucccagccuuccagccucauaccgguagucugguugcaguggcacccagcagacacccgcccagaaccgaaaaaaggaaacguacuuucuucccggagacuuggaucuggcauugucuuaacauuuccgacccuucgggcgaggggacauuauccguuaaaguuccugauagcaucaccagcugggugggagaagcaguggcacuuucaaccucacaaggacugggaaucgcggagccgucucuucuuaagacauuuaaaccauuuuuuguggauuuuaugcuacccgcauugaucauccgcggagaacaaguuaaaaucccacuuucugucuacaacuacaugggcaccugugccgagguuuauaugaaguugaguguuccaaagggcauccaguucgucggucacccagggaaaaggcacguuaccaagaagauguguguggccccaggagaggcagaaccgaucugggucgucuuaucuuucucggaucucggucuaaauaauaucaccgccaaggcgcucgcuuauggagauaccaauugcugccgagacggucguuccuccaagcacccagaagagaaucacgccgacagacgugugccgauuggaguggaucacguacgacggucaguaaugguagaggcugagggggugcccagggcuuacaccuacagcgccuuuuuuugucccucagaacgugugcacaucagcacccccaauaaguacgaguuccaguaugugcagagaccccuucgguugacgcgguucgacgucgcaguaagagcccacaaugaugcuagggucgcccugagcucugggccucaggacacggcgggaaugaucgaaauaguacuaggcgggcaccaaaauacucgcucauggauuucuaccucaaaaaugggcgaaccugucgccucagcgcacaccgcgaaaauuuuaaguugggaugaauuccgaacuuucuggaucucuuggcgaggagggcugauccaggucggacacggaccagaaccaagcaaugagucugugauuguugcauggacacugccacggccuccugaaguccaguuuauuggguuuuccaccggauggggaagcaugggagaauuuagaauuuggagaaaaauggagguagacgaaucuuacuccgaagcuuucacccucggagugccacacggggcgauaccaggauccgaacgggccaccgcuuccauuaucggagacgucaugggucccacacugaaucauuugaauaacuugcugcgacugccuuuuggguguggugaacaaaauaugauacacuuugccccaaacguuuucguacuuaaguaucuccaaaaaacucagcaauugagcccagaaguggaacgcgagacgacugacuacuugguucaaggauaucagaggcaguuaacuuauaaaaggcaagacggcuccuacuccgcauucggcgagagggaugcuuccggcagcauguggcugacagcauucguccucaagucauuugcucaggcuagaucuuuuauuuucguggacccuagagaacuggcggccgcaaagucuuggauuauucagcagcaacaagcagaugguucuuuccuggcaguaggacgaguucugaacaaagauauucaggguggcauacacgguaccgucccacugaccgcauaugucgucguagcacugcucgaaacugggacugcgucagaagaagagcgcgggucaacugacaaagccagacauuuuuuagaaucugcugccccgcuggcaauggacccuuauucuugcgccuugaccacauaugcccuaacccuccuaagaagcccagcagcccccgaggcacugcgcaaacuucgaucgcucgccauuaugcgggacggagugacacauuggucucucucaaacagcugggacguggacaaaggcacauuucuaagcuucagugaccgcgugucucagaguguggucuccgcagaaguggaaaugacagccuacgccuuguugacauacacacugcugggagaugucgcagcagcucugcccgucguuaaguggcuuucccaacaacggaaugcauuaggcggguuuucuuccacucaggauacaugcguggcccuccaggcgcucgcugaguaugccauacugagcuacgcuggcgguauuaacuugacagucucacuagccucaaccaauuuggauuaucaggaaacauucgagcuucauaggacuaaucagaaagugcuacaaaccgccgccauuccaaguuuaccuacuggacuauucguuagugccaaaggagaugguuguugccuaaugcagauugaugucacuuacaaugugccagaucccguggccaaaccagccuuccagcuccuggugucuuugcaggaaccagaagcgcaggggagaccuccuccuaugccggccuccgccgccgaaggaucuagaggagauuggccccccgcugaugacgacgaccccgcagccgaccagcaucaucaagaguauaagguaaugcuggaaguuugcacacgcuggcuccacgcuggcagcucaaacauggccguccuggaaguccccuugcugagugguuuccgagcugacaucgagucacuagaacaguuacuguuggauaaacacaugggcaugaagagguacgagguugccggccgaaggguccuguuuuacuuugaugaaauaccaagccggugccugaccugugugagguucagggcacucagagaaugcguaguggggagaacgagcgcacugcccgucucaguguacgauuacuacgaacccgcguucgaggccacacgcuuuuacaacguuuccacccauucaccacuugcacgugaacuuugcgcagguccugcaugcaacgaaguagagcgagcgcccgcucgcgggcccgguugguuccccggcgaauccggaccugcuguugcacccgaggaaggagccgcaauagcucgcugcggcugcgaccaugacugcggcgcacaaggaaacccugugugugggagcgauggaguuguuuaugccuccgccuguaggcuacgggaagccgcgugccggcaagcagccccacuggagccugccccgcccuccuguugugcccuggagcagaggcuucccgcaaguuccagcaguacauacggugaugaccucgcaucgguagcaccuggcccgcugcagcaggauguaaagcugaauggagccggguuagaaguugaagacucugauccagagcccgaaggugaagcagaggacaggguuaccgcggguccacgccccccuguuucuuccgguaaccucgagucuagcacgcagucugccagucccuuccaucgauggggacagaccccugcaccucaacgccauaguggccgcgucgucggcgcucaucguccuggacuauuaagccccgucuucguuuauucacccgcuuuucaauccgggggggaggaaggacuuuggaugucuaacacaugcacccugcgauag

SEQ ID NO: 187843 - RNA, 5832 nt, Artificial Sequence
  derived and/or modified sequence
ugacccagccuggcuggucggggagcaggacgcauggcuccaggggcacugagaggcgggugcgaacagagagcuccaggaggcggggcccguacagcugcucuugggccguggccuuggccaaguccugggccugcaccuucuccuggggccgcccccccacggucaagaaagaugucaggcgcccugcuauggccucugcuaccgcuccugcuacugcuuuugucagcgagagaugggguccgagcagcccaaccacaagcuccagguuaccucaucgcagcccccagcgucuuccgggccggaguagaggaaguuaucucagugaccauauuuaauagcccucgagaagugacuguccaggcucaguuaguggcucaaggcgaacccguggugcaaucucagggagcgauccuugacaaaggaacuauuaaacucaaagucccgacaggccugcguggacaagcucuguugaagguuuggggcaggggauggcaggccgaagagggaccuuuguuccauaaucagacuucagugaccguugacggccgcggcgcuagugucuuuauccagaccgacaagccaguguacagaccccagcaucgagugcugaucuccauuuuuacugucucuccuaauuuacgacccgucaacgagaaacucgaagccuacauucuugacccucgaggcucacguaugaucgaguggcgccaccuuaaacccuucuguuguggcauaaccaauauguccuuuccauuguccgaucaaccuguccuuggcgagugguuuauauucguagagaugcagggccaugcauauaacaagucauucgagguacagaaguacgugcugcccaaauuugaacugcuuauugacccuccaagauacauacaagaccuagacgcuugugaaaccgguacugugagggccagauacacauucggcaaaccaguggccggagcacugaugaucaauaugaccgugaauggcgugggcuacuacagccacgaaguugggaggccaguacugcgaacuaccaaaauucuuggcucucgagauuucgauauuuguguaagggacaugaucccagccgacguuccugagcacuuccgcggaaggguaucuaucugggcuauggucaccuccguagacgggucucaacaagucgcguuugaugacuccaccccggugcagagacaacuuguggacauacguuauucuaaagacacaagaaagcaguucaagccgggacucgcauauguagggaaaguggagcuaucuuacccugauggcuccccugcugaaggaguuacugugcaaaucaaggcugagcuaacgccgaaggacaacauauauacgagcgaaguggugagucagcgaggucuuguggguuucgaaaucccuagcaucccuacgucugcccagcacgugugguuagagacuaaaguuauggcauugaauggaaaacccgugggugcgcaauauuugcccaguuaucucagccucggcuccugguauagccccagccaaugcuaucugcaacugcagccuccaucacacccacuucagguuggagaagaggccuacuucucagugaaauccacauguccuugcaacuuuacucuuuauuacgaaguggccgcgcgcggcaauaucguucugaguggacagcagccagcccauacuacgcagcagagaucaaaacgggccgcaccugcacuagaaaagccaauucgacugacacacuuauccgagacagaaccuccaccggccccagaagcagagguagauguuugcguaacaucucugcaucucgccgugaccccaucaauggugcccuugggcagauugcuugucuuuuacgugcgggaaaacggggaaggaguggccgauaguuuacaauucgcaguggagaccuucuuugagaaucaaguuagcguaaccuacucugcuaacgaaacccagccuggcgaggugguggaccuaaggauccgagccgcacgaggaucaugugucuguguggcugcaguggacaagucaguguaucuuuuacgauccgguuuccgacugacacccgcucaagucuuucaggaacuggaggacuaugacgugagcgacagcuucggaguuagcagagaagacggaccauuuuggugggccggccuuacugcacaaagacgaagaagaucaagcguuuuuccuuggccauggggaauaacaaaagauagcggcuuugcauucacugagaccggacuuguugugaugacagaccgcguuagucuuaaucaucggcaggaugggggccuguacacugacgaggccgucccagccuuccagccccacacuggaucucuuguugcaguugcucccucuagacauccaccccggacggaaaagcguaaacguacuuucuuuccugaaaccuggaucuggcacugccugaacauuagcgaccccagcggggaaggcacccuuaguguaaaagugcccgacucuaucaccuccugggugggggaagccguagcccucaguacuagucagggucuuggaauagcugaaccaagccuccugaaaacguuuaagcccuuuuucguugauuuuauguugcccgcgcuaaucauccgaggggaacaagugaaaauucccuuaucuguguauaacuacauggguacuugugccgagguguauaugaaacugagcgucccuaaaggcauccaguucgugggucaucccgguaagagacaugugaccaaaaaaaugugcguugccccaggcgaggccgaaccaaucuggguggucuuauccuucagcgaucuuggacuuaauaauauuaccgcuaaggcccuugccuauggggacacaaacugcugucgagacggucgcaguagcaaacauccagaagaaaaucaugccgaccgcagaguuccuaucggcguagaucacguacgaagaucuguaaugguagaagcagagggggucccucgcgcuuauacuuauagcgcuuuuuuuugcccuuccgagcgcguccacauauccacucccaacaaauacgaguuccaguacguucagagaccccugcgccuuacccgauuugacgucgcaguuagggcccauaaugaugcacgagucgcccuguccagcggaccucaggauacagcaggaaugaucgagauaguccuggggggccaucagaacacacgguccuggaucucaacuuccaaaaugggagaaccuguagccagugcgcauaccgccaaaaucuuaucuugggaugaauucaggacauucuggauuagcuggcgcgguggacucauccaggugggccauggaccagaacccagcaaugagagcgugaucguagcuuggacccucccuagacccccggaaguccaguuuauugguuucuccaccggguggggcucaaugggagaauucagaauuuggagaaagauggaagucgacgaaagcuauagugaagcguuuacacuaggaguaccccacggugccauccccgggucagaacgggcuacagccagcauuaucggcgaugugauggggcccacccucaaucacuugaacaaucugcucagguugccauucggaugcggugagcaaaauaugauucacuucgcucccaacguguuuguacucaaguaucuucagaagacucaacagcuuagcccugagguagagagagaaaccacagacuaccugguccaggguuaucagaggcagcucacuuauaagcgacaggauggcuccuauucugcuuuuggagagagagacgcguccggcucuauguggcugaccgcauuuguguuaaaaucauucgcucaagcacggucauuuauuuuugucgacccucgagaacuggcugcagcuaagucauggaucauccagcagcagcaagcugacggaucauuccucgccgucggacgcgugcugaacaaagacauacaggguggaauucacgguacugugccgcuaaccgcguacguuguugucgcccuguuggagacuggcacagcuuccgaagaagaacguggauccaccgacaaggcgaggcacuuuuuagagagugcagcuccgcuggcgauggaccccuauuccugcgcauuaacuacauacgcucucacccuccuacguucucccgcugcucccgaagcacuuagaaaacugagaucacuugcaauuaugagggauggcguaacccacugguccuuaaguaacuccugggauguggacaaaggaacauuucugagcuuuagcgaccgugucucucaaucugucguuucagccgagguggagaugacagccuacgccuugcucacauacacacuccugggcgacguggccgccgcacugccagugguuaagugguugagucagcaacgaaaugccuuaggagguuucucuucuacccaagacaccuguguggcccuucaggcccuggccgaguaugcaauucugucuuacgcuggcgggauaaaucugacugucucccuggcuagcacaaaccucgauuaccaagagacuuucgaauugcaccgcaccaaccagaaaguuuuacagaccgcugcgauuccaagccucccgaccggacuguuuguaucugcaaaaggagauggcuguuguuugaugcagauugaugugacauauaacguuccagauccaguggcuaaaccagcuuuucagcuacuaguuucccugcaagagccagaagcacaggguagaccaccuccuaugcccgcuucugccgcagagggcucuagaggagauuggccccccgcugaugacgaugaucccgcugccgaccaacaucaucaggaauauaaaguaaugcucgaggucugcacaagauggcugcacgccgguagcagcaacauggcaguacuggaagugccacugcugucuggauuuagagccgauaucgagagccuggagcaguugcuucuggacaaacacaugggaaugaagcgauaugagguggccggccguagagugcuguuuuacuuugaugagauuccaagccggugucugaccugcguccgcuucagagcccuaagagaguguguugugggaagaacuuccgcccuuccagugucgguguacgacuacuaugaacccgcguuugaagcuacucgguucuauaauguauccacccacagcccguuggcucgggaacucugugcaggcccagcguguaaugaggucgaaagggcgccagcuaggggacccgggugguuccccggugagucagguccugccgucgccccugaggagggggccgccauagccaggugcggcugugaucacgacuguggugcgcaaggaaacccgguguguggcucugauggugucguuuaugccagcgccugucgccuuagagaagcagcuugucgccaggcugcaccguuggagccugcgccuccuuccugcugugccuuagaacaaagacugccugcaagcucuaguucaacguacggugaugaucuggccucagucgcacccgguccgcuucagcaagaugugaaacugaauggggccggccucgaggucgaagauucggacccagaaccugaaggcgaagcggaggacagaguuaccgccggcccgcggcccccuguaucuucuggcaaucuugaaucauccacgcagagcgcaucaccuuuucaucgguggggacaaacgcccgcuccacagagacauucaggaaggguugugggagcucaccggccagggcuucucuccccaguguuuguuuauaguccagcguuucagagugguggcgaagaaggccuguggauguccaacacuuguacucugcgguag

SEQ ID NO: 187844 - protein, 942 aa, Artificial Sequence
  derived and/or modified sequence
MASVASCDSRPSSDELPGDPSSQEEDEDYDFEDRVSDSGSYSSASSDYDDLEPEWLDSVQKNGELFYLELSEDEEESLLPETPTVNHVRFSENEIIIEDDYKERKKYEPKLKQFTKILRRKRLLPKRCNKKNSNDNGPVSILKHQSNQKTGVIVQQRYKDVNVYVNPKKLTVIKAKEQLKLLEVLVGIIHQTKWSWRRTGKQGDGERLVVHGLLPGGSAMKSGQVLIGDVLVAVNDVDVTTENIERVLSCIPGPMQVKLTFENAYDVKRETSHPRQKKTQSNTSDLVKLLWGEEVEGIQQSGLNTPHIIMYLTLQLDSETSKEEQEILYHYPMSEASQKLKSVRGIFLTLCDMLENVTGTQVTSSSLLLNGKQIHVAYWKESDKLLLIGLPAEEVPLPRLRNMIENVIQTLKFMYGSLDSAFCQIENVPRLDHFFNLFFQRALQPAKLHSSASPSAQQYDASSAVLLDNLPGVRWLTLPLEIKMELDMALSDLEAADFAELSEDYYDMRRLYTILGSSLFYKGYLICSHLPKDDLIDIAVYCRHYCLLPLAAKQRIGQLIIWREVFPQHHLRPLADSSTEVFPEPEGRYFLLVVGLKHYMLCVLLEAGGCASKAIGSPGPDCVYVDQVKTTLHQLDGVDSRIDERLASSPVPCLSCADWFLTGSREKTDSLTTSPILSRLQGTSKVATSPTCRRTLFGDYSLKTRKPSPSCSSGGSDNGCEGGEDDGFSPHTTPDAVRKQRESQGSDGLEESGTLLKVTKKKSTLPNPFHLGNLKKDLPEKELEIYNTVKLTSGPENTLFHYVALETVQGIFITPTLEEVAQLSGSIHPQLIKNFHQCCLSIRAVFQQTLVEEKKKGLNSGDHSDSAKSVSSLNPVKEHGVLFECSPGNWTDQKKAPPVMAYWVVGRLFLHPKPQELYVCFHDSVTEIAIEIAFKLFFGLTL

SEQ ID NO: 187845 - DNA, 2829 bp, Artificial Sequence
  derived and/or modified sequence
atggcaagtgtagcttcttgcgactcccgcccctccagcgacgagttgcccggcgatccaagcagtcaagaggaggacgaagactacgactttgaggacagggtgtctgacagcggcagctattcatccgcctcctctgactacgacgatctcgagccagagtggctcgattctgttcagaaaaatggcgaactgttctatctcgaactgtctgaggatgaggaagaatccttgcttcccgagacacctaccgtgaaccatgtgaggttctccgagaatgagataattatcgaggatgactacaaggaacggaagaagtacgagccaaagttgaagcagttcaccaaaatcctgagaaggaagcggttgctgcctaaaagatgcaataagaagaactccaatgacaacgggcccgttagcatcctcaaacatcaatccaaccagaagacaggagtgatagtgcagcagcggtataaggatgtaaacgtgtatgtcaatcctaagaagctgacagttattaaagccaaggagcagcttaaacttttagaggtcctagtgggcatcatccaccagacgaaatggagttggagaagaacgggtaagcaaggcgatggagagcgtttagtcgtacatggcttgctaccaggaggaagcgccatgaagagcggccaggttctgatcggcgatgtgctggttgccgtgaatgacgtcgatgtgaccacagagaatattgagcgggtcctgtcttgcatcccagggcccatgcaggtgaagctcacctttgaaaacgcctatgacgtgaagcgggagacatcccatccaaggcagaagaaaacacagagtaatacttccgatctggtcaaattactttggggtgaagaggtggaagggattcaacagagcgggttgaataccccgcacattatcatgtatctcacgctccagctggactcggagacttcgaaagaggagcaagagatactctaccactatcccatgtccgaggcatcacagaaactaaaatcagtgcgcgggatcttcctgaccctgtgcgacatgctcgagaacgtcaccggcacccaagttacttctagcagtctcctcttaaatgggaagcagattcacgtcgcatattggaaagaaagtgataagctattgcttattgggcttcctgctgaggaagttccgctgccgaggctacgaaacatgatagagaacgtaatccagactctgaaattcatgtatggaagtctcgactctgccttctgtcaaatcgaaaatgttccaagacttgaccatttctttaacctcttttttcaaagagctctccagcctgcaaaactgcactccagcgcttcacccagcgcccaacagtacgacgcttcttctgctgtactgctggataaccttcctggcgtccgatggctgactcttcccctcgagatcaaaatggagctagatatggcactgtccgaccttgaagccgctgatttcgcagagctgtcagaagactactacgacatgcgcagattgtatacaatcctcggatctagtctcttttataagggatatctcatttgtagccatctccctaaagatgatctcatagacatcgctgtgtattgtaggcattactgtcttctgccactggctgccaagcagcgcatcggccagttgataatctggcgcgaggtgtttccacaacatcatttgcgccccctagctgactcatcgacagaagtttttcccgagccggaaggcaggtattttctgctggtcgtgggactgaagcactacatgctgtgtgtactcttagaggccggaggatgtgcgtctaaggccattggctcccccggccccgactgcgtctacgtagatcaggtgaaaactacgcttcaccaactggacggggtggatagcagaattgatgagcgcctagccagctcacccgtaccatgcctctcgtgcgccgactggtttctgactggatctagagagaaaacagatagcctaactaccagcccaatcctctcccggctccagggcacctcaaaggtcgcaacatcccccacgtgcagacgcacactcttcggcgactacagtctgaaaacacgtaaaccctctccctcctgttcttcaggtgggtccgataatggatgcgaaggcggtgaggacgacgggttctccccacatactactcccgatgcggttaggaaacagcgcgagagtcagggcagtgacggcctggaggaatcaggcactctgctcaaggtcacaaagaaaaagagcactctgcctaatcctttccacctgggcaatctaaagaaggatctgcccgagaaagaactagagatctacaatacagttaagttaactagcggacccgagaacacgctgtttcattatgtcgcactggaaacggtacaggggatcttcatcacccccactctcgaggaagtcgcccagctgtccggctcaattcacccgcaactcataaaaaactttcatcagtgttgtctgagcattcgggccgttttccagcagaccctggtcgaggagaaaaagaaaggcctgaacagcggggatcactcagattccgccaaaagcgtgagctccctgaatcccgtgaaagagcacggcgtgttgttcgaatgtagtccgggcaactggactgaccagaagaaagcacctcccgtgatggcctactgggtggttggcaggctgttcctgcacccaaagcctcaggaactatacgtctgcttccacgacagcgtgaccgagatcgctattgagattgcgtttaaacttttttttggactcactctgtag

SEQ ID NO: 187846 - DNA, 3141 bp, Artificial Sequence
  derived and/or modified sequence
acatggcctctgccccttcccaagcagaggcaacatggcggccttagcaagctatagctgcgagatttgaattactccactcgtagctattgcattcctgacgatggcctctgtggcttcgtgcgattcgcgtccgagctcagacgagctccctggagacccctcttcacaagaagaagatgaggactatgattttgaagatcgggtcagcgactcgggttcatattcctcagcgagtagcgattatgatgatcttgagcctgaatggctggacagtgtgcagaaaaatggagagctgttttatttggaattgagtgaggatgaagaagaaagcctccttcctgagacaccaactgtgaaccatgtcaggttcagtgaaaatgagattatcattgaagatgactacaaagaaagaaaaaagtatgaacccaaactcaagcagtttaccaaaattttaagaaggaaaagacttttacccaagcgctgcaataaaaaaaatagcaatgacaatggaccagtatccattctaaagcatcagtccaatcagaagacaggagtcattgtccaacagcgatacaaagatgtgaatgtttatgtaaaccccaaaaagctaactgttatcaaagccaaagagcagctcaagcttctggaagtgctggttggaattattcatcagaccaagtggagctggagaagaaccggaaagcagggtgatggagagaggcttgtggttcatggcctgctgccagggggatctgctatgaagagcggtcaggtactcattggtgatgtccttgttgctgtgaatgatgtcgatgttactactgaaaacatcgagagagttctgtcttgcattcctggacctatgcaggtgaaactgacatttgaaaatgcatatgatgtgaaaagggagacgtcccatccaagacagaaaaagacacagtccaacacaagtgatttagtcaagcttctctggggagaagaggttgaaggtatccagcagagtggcctaaacactcctcatatcattatgtatctcacactacagctcgactcagaaacctcaaaggaagagcaggaaattctttatcattatccaatgtctgaagcatctcagaaacttaaaagtgtgagagggatttttctcacactctgtgacatgctggaaaacgtaactgggacacaagttactagttcatccctccttttaaatggaaaacaaattcatgtggcttattggaaagaatctgacaagttgttgctaattggcctgcctgctgaagaagttcctcttcctcgtctaaggaacatgatagaaaatgtcatccaaaccttaaaatttatgtatggttctttagatagtgccttttgccagattgagaatgttcctcgtttggatcatttttttaacttgttctttcaaagagcacttcagcctgcgaaactgcattccagcgccagtcccagtgctcagcagtacgatgcttccagtgcagtacttttagacaacctccctggagtccggtggctcacacttccactggaaatcaagatggaattagacatggcattaagtgacttggaggctgcagattttgcagaactgtccgaggattactatgacatgaggcggctgtatacaattttggggtcttctctattttacaagggttatttgatatgcagtcatttgcccaaggatgatcttattgatattgccgtatactgtcgccactattgcctgctgcctttagcagcaaaacaaagaattggtcagttgatcatatggagagaagtgtttcctcagcatcacctccgacctttggcagactcaagcactgaagtctttccggaacctgaaggaagatattttttgctagttgttggcttgaaacattatatgctatgtgtactattagaagctggaggttgcgcatccaaagctattgggagtcctggaccagactgtgtatatgtggatcaagtcaaaacaactcttcaccagctggatggagtagattctcgcatagatgaacggctagcatcttctccagtcccctgtttgtcttgtgctgactggttccttactggatcacgtgaaaaaacagatagcttgaccacttcgcctattctcagtaggctacaaggtacttccaaagtagcaacttctccaacatgcagaagaacgctttttggtgactattccttaaagacacgcaagcctagtccttcctgtagtagtggaggatctgacaatggttgtgaaggtggagaagatgatggctttagcccccatactacaccggatgcagtacggaagcaaagagaatctcagggctctgatggtttagaagaaagtgggaccttgcttaaggtcactaaaaagaagtctactcttccaaatccatttcatttgggaaacttgaaaaaggaccttccagaaaaagaattagaaatatataacacagtgaaactgacatctggtcctgagaacacacttttccactacgttgccttagaaacagtgcaaggaatctttattactcctacccttgaagaggtggcacagctaagtggctctatccaccctcagctaataaagaatttccatcagtgttgtctttccattcgtgcagttttccaacagacattggtggaagagaaaaagaaaggactaaatagtggagaccattcagattctgcaaagtcagtgtcttctcttaaccctgttaaagaacatggtgtgttgtttgaatgttcacctggaaactggactgatcagaaaaaagcaccaccagttatggcttactgggtagtagggagactttttcttcatccaaaacctcaagaactttatgtctgttttcatgactcagtcacagaaattgccattgaaatagcttttaaattgttctttgggttaaccttgtagctgtgctttcttgatgcgtagaaacacgtgcatggaggatcaaacactgtcagaattgctgaaatcaatacacaaagagataaagtttagcttctttttactattcaatattgaacataatattgttaaatattgagatgaaatgctgttggatttgatacattaaatcttaatgtaatattgtaagacttttgagaatatacttgatt

SEQ ID NO: 187847 - DNA, 2829 bp, Artificial Sequence
  derived and/or modified sequence
atggcctctgtggccagctgtgacagccggcccagcagtgatgagctgcccggggaccccagcagccaggaggaggatgaagattatgactttgaggacagagtgtctgacagcggcagctacagcagcgccagcagtgactatgatgacctggagcctgagtggctggacagcgtgcagaagaatggagagctgttctacctggagctgtctgaagatgaggaggagagcctgctgcctgagacccccaccgtgaaccacgtgcgcttctctgaaaatgagatcatcattgaagatgactacaaggagaggaagaagtatgagcccaagctgaagcagttcaccaagatcctgcggaggaagaggctgctgcccaagcgctgcaacaagaagaacagcaatgacaatggacctgtgtccatcctgaagcaccagagcaaccagaagacaggagtgattgtgcagcagcgctacaaggatgtgaatgtgtatgtgaaccccaagaagctgaccgtcatcaaggccaaggagcagctgaagctgctggaggtgctggtgggcatcatccaccagaccaagtggagctggaggagaacaggcaagcagggagatggagagcggctggtggtgcacggcctgctgcccggcggcagcgccatgaagagcggccaggtgctgattggagatgtgctggtggccgtgaatgatgtggatgtgaccacagagaacatcgagcgggtgctgagctgcatccctggccccatgcaggtgaagctgacctttgaaaatgcctatgatgtgaagcgggagaccagccacccccggcagaagaagacccagagcaacaccagtgacctggtgaagctgctgtggggcgaggaggtggagggcatccagcagagcggcctgaacaccccccacatcatcatgtacctgaccctgcagctggacagcgagaccagcaaggaggagcaggagatcctgtaccactaccccatgtctgaggccagccagaagctgaagtctgtgcggggcatcttcctgaccctgtgtgacatgctggagaatgtgacaggcacccaggtgaccagcagcagcctgctgctgaatggcaagcagatccacgtggcctactggaaggagagtgacaagctgctgctgattggcctgcctgctgaggaggtgcccctgccccggctgaggaacatgattgaaaatgtcatccagaccctgaagttcatgtatggcagcctggacagcgccttctgccagattgaaaatgtgccccggctggaccacttcttcaacctcttcttccagagggccctgcagcctgccaagctgcacagcagcgccagccccagcgcccagcagtatgatgccagcagcgctgtgctgctggacaacctgcccggggtgcgctggctgaccctgcccctggagatcaagatggagctggacatggccctgagtgacctggaggccgctgactttgctgagctgtctgaggactactatgacatgagaagactctacaccatcctgggcagcagcctcttctacaagggctacctgatctgcagccacctgcccaaggatgacctgattgatattgctgtgtactgccgccactactgcctgctgcccctggccgccaagcagagaattggccagctgatcatctggagggaggtgttcccccagcaccacctgcggcccctggccgacagcagcacagaggtgtttcctgagcctgagggccgctacttcctgctggtggtgggcctgaagcactacatgctgtgtgtgctgctggaggccggcggctgtgccagcaaggccatcggcagccctggccctgactgtgtgtatgtggaccaggtgaagaccaccctgcaccagctggatggagtggacagcagaattgatgagcggctggccagcagccctgtgccctgcctgagctgtgccgactggttcctgaccggcagccgggagaagacagacagcctgaccaccagccccatcctgagccggctgcagggcaccagcaaggtggccaccagccccacctgcaggaggaccctgtttggagactacagcctgaagaccaggaagcccagccccagctgcagcagcggcggcagtgacaatggctgtgagggcggggaggatgatggcttcagcccccacaccaccccagatgctgtgaggaagcagcgggagagccagggcagtgatggcctggaggagagcggcaccctgctgaaggtgaccaagaagaagagcaccctgcccaaccccttccacctgggcaacctgaagaaggacctgcctgagaaggagctggagatctacaacacagtgaagctgaccagcggccctgagaacaccctcttccactacgtggccctggagaccgtgcagggcatcttcatcacccccaccctggaggaggtggcccagctgagcggcagcatccacccccagctgatcaagaacttccaccagtgctgcctgagcatccgggctgtgttccagcagaccctggtggaggagaagaagaagggcctgaacagcggggaccacagcgacagcgccaagtctgtgagcagcctgaaccctgtgaaggagcacggcgtgctgtttgagtgcagccctggcaactggacagaccagaagaaggcccctcctgtgatggcctactgggtggtgggccgcctcttcctgcaccccaagccccaggagctgtatgtgtgcttccatgacagcgtgacagagatcgccatcgagatcgccttcaagctgttcttcggcctgaccctgtag

SEQ ID NO: 187848 - DNA, 2829 bp, Artificial Sequence
  derived and/or modified sequence
atggccagcgtggccagctgcgacagccggcccagcagcgacgagctccctggggatccctcctctcaagaagaagatgaagactatgattttgaggaccgtgtctccgatagtggatcatactcgagcgcatcttccgactatgacgacttagaaccagagtggttggattctgtgcaaaaaaatggcgagctcttctacctggaactctctgaagacgaggaagaatccctgctcccggaaactcccacggtgaatcatgtgcgattttcagagaatgagatcatcattgaggacgactataaggaacggaaaaagtatgagccaaaactcaagcaatttaccaagattttgcgtcggaagaggctactgcccaaacgctgtaacaagaagaatagcaacgacaacgggcccgtatccattctgaaacaccagtctaaccaaaaaacgggagtcattgtccagcagcggtacaaggatgtgaatgtgtacgtaaatccaaagaagctcacagtcataaaagccaaggagcagctcaagctcctggaagtgctggtgggtatcatccatcaaactaaatggtcttggaggcgaactggtaagcagggtgatggcgaacgactagtggttcacgggctcctgccaggcgggtccgctatgaagtcgggccaggtgttgatcggggatgtgctggtggcagtgaatgacgttgacgttacaactgagaatatagagagagtcctctcgtgtattcccggccctatgcaggttaaattgacattcgagaacgcatacgacgtaaaacgagagactagtcacccacgtcagaagaaaacccagagcaacacttcagacctagtgaagctgttgtggggagaagaggtggagggtatccagcaatctggtttaaacactccgcatattatcatgtatctcaccctgcaactggacagtgagacctccaaggaggagcaagaaatcctatatcattaccccatgagtgaggcttctcagaaacttaagtcggtgaggggtattttcctgactctgtgcgacatgctcgagaacgtgaccggcactcaggtgacctcatcctccctgctacttaatggcaagcagatccacgtagcatactggaaggagagcgacaagctgcttctcatcggattaccagcagaggaggtcccacttcctcgcttaagaaacatgatcgaaaacgtgatacaaaccttaaaattcatgtacgggtctctcgacagtgcattttgtcaaattgagaacgtccctagacttgaccacttttttaatttgttttttcaacgcgccctccagcctgctaagttacactcaagcgcaagtcctagcgcgcaacagtacgatgcctcaagcgccgttcttctagataacttgcccggcgttcgttggctgactctccccctagagataaagatggagctggatatggctctgtcagatctcgaggccgccgactttgccgagctgagtgaagactattacgatatgagaaggctctacactattttggggtcgagcctgttctataagggttacctcatttgttctcaccttccaaaagatgatctgatcgatatagcggtgtactgtcggcattattgtctgctgcctctggccgctaaacagagaattggacagctgatcatttggcgggaagtgtttcctcaacaccatctgaggcctctcgcagactcaagtacggaggtgttccctgagcccgaagggaggtacttcctcctcgtcgtcggcctgaaacattatatgctgtgtgtgctgctggaggcaggaggctgtgccagtaaggccatcgggtcccccggtccagattgcgtctacgtagatcaggtgaagaccacactgcatcagctcgatggtgtagatagcagaatagatgaaaggctggctagctctcccgtgccgtgcctgtcatgtgcggactggttcctcaccggctcacgcgaaaagacagactcattgacaacgtcccccattttaagtcggctgcaaggaaccagcaaagttgcgacttcgccaacttgtcgccgaaccttgtttggagattacagcctgaaaacaaggaagccatcaccatcctgttctagcggtggttcagacaatgggtgtgaggggggtgaagacgacggctttagcccacacacaactccagatgcagttagaaagcagcgagaaagccaggggtccgacggcctggaagaatcaggaaccctgcttaaggtaacaaaaaagaaaagcactctccctaaccctttccacctggggaatctcaaaaaggatttgcccgagaaagagctggagatttacaatactgtcaagctgacatccggaccagaaaatactctttttcattacgtggctcttgagaccgtccaggggatttttattacccccacattggaagaggtggcacaactttccggttctatccaccctcagctgattaaaaattttcaccagtgctgcctgtccatccgagctgtgttccagcagactctcgtggaagagaagaaaaaagggctgaactctggtgatcactctgatagcgccaagagcgtgagtagcctgaatcccgtgaaggagcacggcgtccttttcgagtgcagccccggaaactggacagatcagaaaaaagcacctcccgtgatggcttactgggttgtaggcaggctgttcttacaccccaaaccccaagagttgtatgtctgcttccacgattctgtgactgaaatcgcaatcgagatcgcctttaaactgttcttcggactcaccctctag

SEQ ID NO: 187849 - DNA, 2829 bp, Artificial Sequence
  derived and/or modified sequence
atggctagcgtggccagctgtgattcccgcccatcatcggatgagttgccaggagacccctcctcacaggaagaagacgaggactacgatttcgaggatagggtatccgatagcggctcctactctagcgcaagctcggactatgacgacctagagcctgagtggttggactcagtacagaagaacggagagcttttctatcttgaactcagtgaagatgaggaggagagcctattacccgagactccaactgtgaaccacgtgagatttagtgagaatgaaatcattattgaggacgattacaaggagcgtaaaaaatacgaacctaaactcaaacagtttacgaagatactacgaagaaaaagactactgcctaagaggtgcaacaaaaagaattcaaatgacaatggaccggtctctattctgaagcaccaaagtaatcagaaaactggtgtgatcgttcaacaaagatataaagacgtcaacgtgtatgtgaatccaaagaagcttaccgtgataaaggccaaggaacagttaaagctgctcgaagttctagtaggcatcattcaccagaccaaatggagttggaggcggaccggaaagcaaggcgacggagaaagactagtggtgcacggccttcttcccggtggatccgctatgaagtccgggcaagtcctcatcggcgatgtcctcgtggcggttaatgacgtggacgttacgacagagaacatagaacgcgtgctctcttgtataccagggccaatgcaggtcaagctcacctttgagaacgcatacgatgtgaaaagagagaccagtcacccaagacagaagaagacacagagcaatactagcgacctcgtaaagttgctgtggggggaagaagtggaaggcattcagcagagtgggctgaatacgccccatataattatgtacttgacactacagcttgactccgaaacttcgaaggaggaacaggaaattctctatcactatccaatgtccgaagcttcgcagaaactaaagagcgtaagaggtatctttttgactttgtgtgatatgctggagaacgtcacaggtactcaggtgacctccagctctctactcctgaacgggaaacagattcacgtagcctattggaaagagagcgacaaactgctgttgatcgggctccctgcagaggaggtcccgctcccaagactgcgaaacatgatagagaacgtaatccaaacgctcaaatttatgtatggtagtctcgacagcgctttctgccagatagagaatgtccctcgactagatcacttttttaatctcttcttccagcgggctctgcagccagccaagctgcacagttccgccagcccctccgcccagcagtatgatgctagctctgcagtgttactcgacaacttgccgggagttaggtggctgactcttcccctagagattaagatggagctggacatggccttgtcagacctggaggcagcagattttgccgagctgtctgaggattattatgacatgcggaggctctacacaatcctaggctcttcgctcttctataaagggtaccttatctgctctcacttaccaaaagacgatctgattgacatcgcggtgtactgtcggcactactgtctgctccctctcgccgcaaaacagagaatcgggcagttgattatctggagggaggtctttccacagcaccacttgcgccctttagctgactcctcgacagaagttttcccagagccagagggtcgctacttcctgctcgtagtgggcctgaagcactatatgctctgtgtcctgttagaagccggagggtgcgcctctaaagccattggcagcccaggaccagattgcgtgtatgtggatcaggtgaagacgactctgcaccaactggatggggtggactccagaatcgatgagcggctcgcctccagccccgtgccatgtctttcatgcgccgattggttcctgaccggctctagagagaaaactgactctttgactacttcaccgatcttgtcaaggctgcagggcacgtctaaggtcgctacatcacccacctgtagacgcactctgttcggggattactccttaaaaacaaggaaaccaagcccctcctgttcctcaggcggaagcgacaatggttgtgaagggggtgaggacgacggcttttccccccataccaccccagatgccgtgagaaagcagcgtgagtctcaaggaagcgatggccttgaggagagcggaacgctattaaaagtcacaaaaaagaaaagcacactcccgaacccttttcatctgggaaacctgaagaaggatctccctgaaaaggaactcgagatttacaatactgtgaagcttacctctggacctgaaaataccctgtttcactatgttgcactcgagacagtccagggcatattcatcacgcctaccctggaagaagtcgcacagctgagcggcagcattcaccctcagttaatcaagaactttcaccagtgctgtctttcaatcagagcggttttccagcagacccttgtggaggagaagaagaagggtctgaactccggcgatcatagcgatagtgctaaaagcgtaagtagccttaaccctgtaaaggagcacggcgtgctgttcgagtgcagccctggtaactggaccgaccagaaaaaggcgccacccgttatggcctactgggttgtcggccgactgtttctgcaccctaaaccacaggagctgtacgtgtgttttcatgattcagttaccgagattgctatcgaaatcgccttcaaactctttttcggactgacactgtag

SEQ ID NO: 187850 - DNA, 2829 bp, Artificial Sequence
  derived and/or modified sequence
atggccagcgtggccagctgcgacagcagacccagcagcgacgagctgcccggcgaccccagcagccaggaggaggacgaggactacgacttcgaggacagagtgagcgacagcggcagctacagcagcgccagcagcgactacgacgacctggagcccgagtggctggacagcgtgcagaagaacggcgagctgttctacctggagctgagcgaggacgaggaggagagcctgctgcccgagacccccaccgtgaaccacgtgagattcagcgagaacgagatcatcatcgaggacgactacaaggagagaaagaagtacgagcccaagctgaagcagttcaccaagatcctgagaagaaagagactgctgcccaagagatgcaacaagaagaacagcaacgacaacggccccgtgagcatcctgaagcaccagagcaaccagaagaccggcgtgatcgtgcagcagagatacaaggacgtgaacgtgtacgtgaaccccaagaagctgaccgtgatcaaggccaaggagcagctgaagctgctggaggtgctggtgggcatcatccaccagaccaagtggagctggagaagaaccggcaagcagggcgacggcgagagactggtggtgcacggcctgctgcccggcggcagcgccatgaagagcggccaggtgctgatcggcgacgtgctggtggccgtgaacgacgtggacgtgaccaccgagaacatcgagagagtgctgagctgcatccccggccccatgcaggtgaagctgaccttcgagaacgcctacgacgtgaagagagagaccagccaccccagacagaagaagacccagagcaacaccagcgacctggtgaagctgctgtggggcgaggaggtggagggcatccagcagagcggcctgaacaccccccacatcatcatgtacctgaccctgcagctggacagcgagaccagcaaggaggagcaggagatcctgtaccactaccccatgagcgaggccagccagaagctgaagagcgtgagaggcatcttcctgaccctgtgcgacatgctggagaacgtgaccggcacccaggtgaccagcagcagcctgctgctgaacggcaagcagatccacgtggcctactggaaggagagcgacaagctgctgctgatcggcctgcccgccgaggaggtgcccctgcccagactgagaaacatgatcgagaacgtgatccagaccctgaagttcatgtacggcagcctggacagcgccttctgccagatcgagaacgtgcccagactggaccacttcttcaacctgttcttccagagagccctgcagcccgccaagctgcacagcagcgccagccccagcgcccagcagtacgacgccagcagcgccgtgctgctggacaacctgcccggcgtgagatggctgaccctgcccctggagatcaagatggagctggacatggccctgagcgacctggaggccgccgacttcgccgagctgagcgaggactactacgacatgagaagactgtacaccatcctgggcagcagcctgttctacaagggctacctgatctgcagccacctgcccaaggacgacctgatcgacatcgccgtgtactgcagacactactgcctgctgcccctggccgccaagcagagaatcggccagctgatcatctggagagaggtgttcccccagcaccacctgagacccctggccgacagcagcaccgaggtgttccccgagcccgagggcagatacttcctgctggtggtgggcctgaagcactacatgctgtgcgtgctgctggaggccggcggctgcgccagcaaggccatcggcagccccggccccgactgcgtgtacgtggaccaggtgaagaccaccctgcaccagctggacggcgtggacagcagaatcgacgagagactggccagcagccccgtgccctgcctgagctgcgccgactggttcctgaccggcagcagagagaagaccgacagcctgaccaccagccccatcctgagcagactgcagggcaccagcaaggtggccaccagccccacctgcagaagaaccctgttcggcgactacagcctgaagaccagaaagcccagccccagctgcagcagcggcggcagcgacaacggctgcgagggcggcgaggacgacggcttcagcccccacaccacccccgacgccgtgagaaagcagagagagagccagggcagcgacggcctggaggagagcggcaccctgctgaaggtgaccaagaagaagagcaccctgcccaaccccttccacctgggcaacctgaagaaggacctgcccgagaaggagctggagatctacaacaccgtgaagctgaccagcggccccgagaacaccctgttccactacgtggccctggagaccgtgcagggcatcttcatcacccccaccctggaggaggtggcccagctgagcggcagcatccacccccagctgatcaagaacttccaccagtgctgcctgagcatcagagccgtgttccagcagaccctggtggaggagaagaagaagggcctgaacagcggcgaccacagcgacagcgccaagagcgtgagcagcctgaaccccgtgaaggagcacggcgtgctgttcgagtgcagccccggcaactggaccgaccagaagaaggccccccccgtgatggcctactgggtggtgggcagactgttcctgcaccccaagccccaggagctgtacgtgtgcttccacgacagcgtgaccgagatcgccatcgagatcgccttcaagctgttcttcggcctgaccctgtag

SEQ ID NO: 187851 - protein, 328 aa, Artificial Sequence
  derived and/or modified sequence
MLGSRAAGFARGLRAVALAWLPGWRGRSFALARAAGAPHGGDLQPPACPEPRGRQLSLSAAAVVDSAPRPLQPYLRLMRLDKPIGTWLLYLPCTWSIGLAAEPGCFPDWYMLSLFGTGAILMRGAGCTINDMWDQDYDKKVTRTANRPIAAGDISTFQSFVFLGGQLTLALGVLLCLNYYSIALGAGSLLLVITYPLMKRISYWPQLALGLTFNWGALLGWSAIKGSCDPSVCLPLYFSGVMWTLIYDTIYAHQDKRDDVLIGLKSTALRFGENTKPWLSGFSVAMLGALSLVGVNSGQTAPYYAALGAVGAHLTHQKWGLEILPRLV

SEQ ID NO: 187852 - protein, 421 aa, Artificial Sequence
  derived and/or modified sequence
MTPISQVRMRKGSAHTAAQPGRLGLHPAGATAHACRGMTSIRARPGLTSAMLGSRAAGFARGLRAVALAWLPGWRGRSFALARAAGAPHGGDLQPPACPEPRGRQLSLSAAAVVDSAPRPLQPYLRLMRLDKPIGTWLLYLPCTWSIGLAAEPGCFPDWYMLSLFGTGAILMRGAGCTINDMWDQDYDKKVTRTANRPIAAGDISTFQSFVFLGGQLTLALGVLLCLNYYSIALGAGSLLLVITYPLMKRISYWPQLALGLTFNWGALLGWSAIKGSCDPSVCLPLYFSGVMWTLIYDTIYAHQDKRDDVLIGLKSTALRFGENTKPWLSGFSVAMLGALSLVGVNSGQTAPYYAALGAVGAHLTHQIYTLDIHRPEDCWNKFISNRTLGLIVFLGIVLGNLWKEKKTDKTKKGIENKIEN

SEQ ID NO: 187853 - protein, 384 aa, Artificial Sequence
  derived and/or modified sequence
MTSIRARPGLTSAMLGSRAAGFARGLRAVALAWLPGWRGRSFALARAAGAPHGGDLQPPACPEPRGRQLSLSAAAVVDSAPRPLQPYLRLMRLDKPIGTWLLYLPCTWSIGLAAEPGCFPDWYMLSLFGTGAILMRGAGCTINDMWDQDYDKKVTRTANRPIAAGDISTFQSFVFLGGQLTLALGVLLCLNYYSIALGAGSLLLVITYPLMKRISYWPQLALGLTFNWGALLGWSAIKGSCDPSVCLPLYFSGVMWTLIYDTIYAHQDKRDDVLIGLKSTALRFGENTKPWLSGFSVAMLGALSLVGVNSGQTAPYYAALGAVGAHLTHQIYTLDIHRPEDCWNKFISNRTLGLIVFLGIVLGNLWKEKKTDKTKKGIENKIEN

SEQ ID NO: 187854 - DNA, 987 bp, Artificial Sequence
  derived and/or modified sequence
atgcttggttctagggccgccggctttgcgagaggactgcgcgcagtcgcactggcctggctgcctggttggcggggtcgatcgttcgcccttgcacgcgccgcaggcgctcctcatggcggcgaccttcagccaccagcctgccccgagccgcgggggcgacagctgtcccttagcgccgcagccgtggtggacagcgctcctcgcccccttcagccttacttgcggctcatgaggctggacaagccgattggcacttggttgttatacttaccatgtacctggtcgattggcttggcggcagagcccggatgtttcccagactggtacatgctaagtctcttcgggaccggagccattctgatgaggggcgctggctgtactattaatgacatgtgggatcaagactacgacaaaaaagttactaggacagcgaacagacccattgctgccggtgacatctcgacctttcagagttttgtgtttttaggcggacagttaactcttgccttgggggttttgctttgcctgaactattatagcattgctctaggtgccggctctctcttactggttatcacatacccactgatgaaacgcatcagctattggcctcagctggctctgggcctcacgttcaattggggggcccttctgggctggagcgctatcaagggaagttgcgacccatccgtgtgtcttcctctttatttctctggcgtgatgtggacgctgatctacgacaccatttatgcccatcaggacaaaagggacgacgtcctgattgggcttaagagcacagcattgagattcggagagaataccaagccctggctttcaggtttttcggtcgcgatgctgggggccctgtctctggtgggggttaattccgggcagacagcgccttactacgcagcgcttggggccgtgggcgcccatttgacccaccagaaatggggactggagattctgcccaggctggtgtag

SEQ ID NO: 187855 - DNA, 1266 bp, Artificial Sequence
  derived and/or modified sequence
atgacccccatttcccaggtccgcatgaggaaggggagtgctcataccgctgcgcagcccggacgattgggcctacaccccgctggagcgacagcacatgcatgcagagggatgacatcaattcgggctcgccccggactcactagcgccatgctcggaagtcgcgccgcaggtttcgcccgggggctccgggccgtggctcttgcctggctgcctggctggcgaggacgatcatttgccctggccagagccgcaggcgccccccatggaggagacctgcagcccccggcctgccctgaaccacggggtcgacaactatcactatccgctgctgctgtggtggattccgcccccaggcctttgcagccctacttacggctgatgcgtctcgataagcccatagggacttggctgctgtatctcccctgtacttggtccatcgggttggccgcagagcctgggtgcttccccgactggtatatgttgtcattgttcggaaccggcgctattctgatgaggggggcaggctgtacgatcaatgacatgtgggaccaggattacgacaagaaggttactcggaccgctaatagaccgattgcagccggagatatctctactttccaatcctttgtcttcctcggaggccagctcactctggccctgggggtgcttctctgcctaaattattatagcatcgcactgggggccggatctctcctacttgtaatcacatacccactgatgaaacggatttcctattggccgcaactcgccttgggtctgacattcaattggggggcgctgttaggatggtccgcaatcaagggatcctgcgaccccagcgtatgtctccccctgtacttttcgggcgtgatgtggacactgatttatgataccatttacgcgcatcaagataagcgcgatgatgtgctgattggactgaaatcaacagccctgaggtttggcgagaacactaagccctggctgtctggtttctccgtcgcgatgctgggagcactgtccttggtaggcgtgaatagcggtcagaccgctccatattatgctgccttgggcgccgtgggggctcatctgacacatcagatttacactctcgatattcacaggcccgaagattgctggaacaagtttatatctaatcgaacacttggtctgatcgttttcctgggaatagttctaggcaatctctggaaggagaaaaagaccgacaagactaaaaaaggaatcgagaataagattgagaattag

SEQ ID NO: 187856 - DNA, 1155 bp, Artificial Sequence
  derived and/or modified sequence
atgacctcgatcagggccaggccaggcttgacaagcgcaatgcttggctcacgcgcagccggctttgccaggggtctccgggccgtagcgctcgcttggcttccaggctggcgaggtagatctttcgctttggcacgagccgccggagctccccacgggggagacttgcagccgcctgcctgccctgaacctagggggcggcaactttccctgtcagccgcagcggtggtcgattcagcgccacggccacttcagccgtacctgagactgatgcgcctggacaagcccatcgggacatggctgctgtatttgccatgcacatggtccattggcctcgcagcagagcctgggtgcttccctgactggtacatgctcagtctgttcggaacaggggccatactgatgcgcggggccggctgcaccataaacgatatgtgggaccaagactacgataaaaaagtgactcggacggctaataggcccatagccgccggagatatttccacctttcaaagctttgtgtttctcggcggacagctgaccctcgccttgggagttctgttgtgtcttaactactactccatcgcactaggggctggttccctcctgctcgtgataacatacccgctaatgaagaggatctcatactggccgcagctggctcttggcctgacctttaactggggggcgctattaggctggagcgctatcaaaggcagttgcgatccgtcagtgtgcctgccactttacttctctggagtcatgtggactctgatctacgataccatctacgcccatcaggataaacgggacgatgtgttaattggtctgaagtctactgctcttcgtttcggagagaataccaaaccgtggctcagcggctttagcgtagctatgctgggcgccctaagcctggtgggggtgaactccgggcagaccgccccatattatgccgccctgggcgccgtcggtgctcatctgactcaccagatatacacattggatatccatagacccgaggactgttggaataagtttatcagtaaccggacccttggcctgatcgtcttcctcggtatcgttttaggtaacctgtggaaggagaaaaagacggataaaacaaaaaaaggaattgaaaataaaattgaaaattag

SEQ ID NO: 187857 - DNA, 987 bp, Artificial Sequence
  derived and/or modified sequence
atgctgggcagcagagctgctggctttgcccggggcctgcgggctgtggccctggcctggctgcccggctggaggggccgcagctttgccctggcccgggctgctggggcccctcatggaggagacctgcagcccccagcctgcccagagccccggggccggcagctgagcctgtctgctgctgctgtggtggacagcgccccccggcccctgcagccctacctgcggctgatgaggctggacaagcccatcggcacctggctgctgtacctgccctgcacctggagcatcggcctggccgctgagcccggctgcttcccagactggtacatgctgagcctgtttggaactggagccatcctgatgagaggagctggctgcaccatcaatgacatgtgggaccaggactatgacaagaaggtgaccaggacagccaaccggcccatcgctgctggggacatcagcaccttccagagctttgtgttcctgggcggccagctgaccctggccctgggcgtgctgctgtgcctgaactactacagcatcgccctgggcgccggcagcctgctgctggtgatcacctaccccctgatgaagaggatctcctactggccccagctggccctgggcctgaccttcaactggggcgccctgctgggctggagcgccatcaagggcagctgtgaccccagcgtgtgcctgcccctgtacttctctggagtgatgtggaccctcatctatgacaccatctatgcccaccaggacaagagagatgatgtgctgattggcctgaagagcacagccctgcgctttggagagaacaccaagccctggctgagcggcttctctgtggccatgctgggcgccctgagcctggtgggcgtgaacagcggccagacagccccctactatgctgccctgggcgctgtgggcgcccacctgacccaccagaagtggggcctggagatcctgccccggctggtgtag

SEQ ID NO: 187858 - DNA, 1266 bp, Artificial Sequence
  derived and/or modified sequence
atgacccccatcagccaggtgaggatgaggaaaggaagtgcccacacagctgcccagcccggccgcctgggcctgcaccctgctggggccacagcccacgcctgccggggcatgaccagcatccgggcccggcccggcctgaccagcgccatgctgggcagcagagctgctggctttgcccggggcctgcgggctgtggccctggcctggctgcccggctggaggggccgcagctttgccctggcccgggctgctggggcccctcatggaggagacctgcagcccccagcctgcccagagccccggggccggcagctgagcctgtctgctgctgctgtggtggacagcgccccccggcccctgcagccctacctgcggctgatgaggctggacaagcccatcggcacctggctgctgtacctgccctgcacctggagcatcggcctggccgctgagcccggctgcttcccagactggtacatgctgagcctgtttggaactggagccatcctgatgagaggagctggctgcaccatcaatgacatgtgggaccaggactatgacaagaaggtgaccaggacagccaaccggcccatcgctgctggggacatcagcaccttccagagctttgtgttcctgggcggccagctgaccctggccctgggcgtgctgctgtgcctgaactactacagcatcgccctgggcgccggcagcctgctgctggtgatcacctaccccctgatgaagaggatctcctactggccccagctggccctgggcctgaccttcaactggggcgccctgctgggctggagcgccatcaagggcagctgtgaccccagcgtgtgcctgcccctgtacttctctggagtgatgtggaccctcatctatgacaccatctatgcccaccaggacaagagagatgatgtgctgattggcctgaagagcacagccctgcgctttggagagaacaccaagccctggctgagcggcttctctgtggccatgctgggcgccctgagcctggtgggcgtgaacagcggccagacagccccctactatgctgccctgggcgctgtgggcgcccacctgacccaccagatctacaccctggacatccacaggcctgaggactgctggaacaagttcatcagcaacagaaccctgggcctcatcgtgttcctgggcatcgtgctgggcaacctgtggaaggagaagaagacagacaagaccaagaagggcatcgagaacaagattgagaactag

SEQ ID NO: 187859 - DNA, 1155 bp, Artificial Sequence
  derived and/or modified sequence
atgaccagcatccgggcccggcccggcctgaccagcgccatgctgggcagcagagctgctggctttgcccggggcctgcgggctgtggccctggcctggctgcccggctggaggggccgcagctttgccctggcccgggccgccggggccccccacggcggggacctgcagcccccagcctgcccagagccccggggccggcagctgagcctgtctgctgctgctgtggtggacagcgccccccggcccctgcagccctacctgcggctgatgaggctggacaagcccatcggcacctggctgctgtacctgccctgcacctggagcatcggcctggccgctgagcccggctgcttcccagactggtacatgctgagcctgtttggcaccggggccatcctgatgagaggagctggctgcaccatcaatgacatgtgggaccaggactatgacaagaaggtgaccaggacagccaaccggcccatcgccgccggggacatcagcaccttccagagctttgtgttcctgggcggccagctgaccctggccctgggcgtgctgctgtgcctgaactactacagcatcgccctgggcgccggcagcctgctgctggtgatcacctaccccctgatgaagaggatctcctactggccccagctggccctgggcctgaccttcaactggggcgccctgctgggctggagcgccatcaagggcagctgtgaccccagcgtgtgcctgcccctgtacttcagcggcgtgatgtggaccctcatctatgacaccatctatgcccaccaggacaagagagatgatgtgctgattggcctgaagagcacagccctgcgctttggagagaacaccaagccctggctgagcggcttctctgtggccatgctgggcgccctgagcctggtgggcgtgaacagcggccagacagccccctactatgctgccctgggcgctgtgggcgcccacctgacccaccagatctacaccctggacatccacaggcctgaggactgctggaacaagttcatcagcaacagaaccctgggcctgattgtgttcctgggcatcgtgctgggcaacctgtggaaggagaagaagacagacaagaccaagaagggcatcgagaacaagattgaaaattag

SEQ ID NO: 187860 - DNA, 987 bp, Artificial Sequence
  derived and/or modified sequence
atgctgggcagccgggccgccggcttcgcccggggcctgcgggccgtcgccttggcctggcttccaggatggcgaggcaggtcattcgcccttgcacgcgcagctggggcaccccacggtggggatctccaaccgcctgcgtgccccgagcctagaggccggcagctgtcactctccgcagcagccgtggtcgactccgctcctcgccctctccagccttacttgcgcctgatgaggctcgacaagcccatcggaacctggcttctgtacttaccctgtacatggtcgattggattggcagctgaacccggatgctttccagactggtacatgctgtcactctttgggactggtgcaatcttaatgcgaggcgcagggtgcactatcaacgatatgtgggatcaagattacgacaagaaagtcaccagaacagctaaccgtcccatagccgctggcgacatatctacttttcagagttttgtattccttgggggacagttgactcttgctctgggggtcctcctgtgcttgaattactatagcattgccctgggcgccggcagcttactcttggtaattacctaccctctgatgaaacggatttcctattggccccagctggctctggggctgactttcaactggggagcactcctggggtggtccgctatcaaagggagttgcgaccctagtgtttgcctccccctgtactttagtggcgtaatgtggacactgatctacgatacaatttacgctcatcaggacaagagggatgacgtcctgatcggcttgaagtccacagctctgagattcggtgagaatactaagccgtggctctcaggctttagcgtagccatgttgggtgccctgagcctcgtgggcgttaacagcgggcagacggcgccctattatgcggctcttggagctgtgggcgctcacctcactcaccagaaatggggcctggagatcctgcctaggctcgtttag

SEQ ID NO: 187861 - DNA, 1266 bp, Artificial Sequence
  derived and/or modified sequence
atgacccccatcagccaggtgcggatgcggaagggcagcgcccacacagccgcacagccagggagactgggactgcatcctgccggggcgactgctcacgcctgccggggcatgacaagcatacgagctcggcctgggctcacatctgccatgctcggttctagagccgccggctttgcaagaggcctgcgcgccgttgcattggcatggctccctgggtggagaggccgttcgttcgcgctagcaagggctgcgggcgcaccgcacggtggcgacctccaaccccctgcttgcccagagcctagaggcaggcagctctcattgagtgctgccgccgtggtggacagcgcgccaaggcccttgcagccgtaccttcgccttatgcgcttggacaagcccattggtacatggctgttatatttgccatgcacttggtctattggcctagccgcagagccagggtgttttcccgactggtatatgctgagtttgtttggcaccggggcgatcctcatgagaggcgccgggtgcactatcaatgatatgtgggatcaggactatgataagaaggtgacaaggaccgcaaatagaccaatagccgccggcgacatctctacattccagtcattcgtgtttctcgggggccaactgactctagctttgggggttctgctgtgtctgaattattattcaattgctctgggcgccgggtcactactgttggtcatcacatatccgttgatgaagaggatttcctattggcctcagttagctctgggcctcacttttaactggggggcactgctgggctggagtgccatcaaagggtcttgcgatccctctgtgtgcttgcctttgtacttcagtggtgtaatgtggactctgatctacgacaccatttacgcccatcaggacaaaagagacgacgtattgatcgggctaaaaagtacagccttaagattcggagagaacacaaagccctggttgtccggttttagtgtcgcaatgctgggtgctctatctcttgttggcgtgaacagcggtcaaaccgccccctactatgccgcgcttggggccgtgggtgcccacttgacacatcagatttacaccctggatatccacagacctgaggattgctggaataaatttataagtaacagaacactcggtttaatcgtcttcctagggatagtgctgggcaatctttggaaggaaaagaagacagataagaccaaaaagggaattgaaaacaagatcgaaaattag

SEQ ID NO: 187862 - DNA, 1155 bp, Artificial Sequence
  derived and/or modified sequence
atgaccagcatccgggcccggcccggcctgaccagcgccatgctgggcagccgagccgccggctttgctagggggctgagggccgtggcgctcgcgtggttgcccggttggagaggccgcagcttcgctcttgcccgagccgcaggcgctccccacgggggtgatcttcagcctccggcctgtccagagccacggggcagacagcttagtcttagcgctgctgctgtagtggacagcgccccacgcccattacaaccctacttgcgcctaatgaggctggacaagccaattggtacgtggctactgtacctgccctgcacatggtctattgggctggctgcagagccaggttgttttccagattggtatatgctctccctgttcggcacaggcgctatcttaatgcgcggggccgggtgcacaatcaacgacatgtgggaccaagattatgacaaaaaagtcacacgtaccgctaatcgtcccatagccgcaggggacatctctacctttcaatccttcgtttttctcggcggacagttgaccctggcattgggggttctgttatgtctgaattattacagcatagcacttggcgccggcagtctgctgctggtcatcacctaccccctgatgaagagaatctcctactggccacaactggcacttggcctgacttttaattggggtgcactgctggggtggtctgctattaaagggtcatgtgatcccagcgtttgtttgcctttgtactttagcggcgtcatgtggacgttgatctatgacaccatctatgcacatcaagacaagcgagatgacgtgctaattggtttaaagagcactgctctgagattcggcgaaaacacgaagccctggctctccggtttttccgtggccatgctgggagctctttctctggtcggggtgaatagtggccaaactgctccctattacgcagcattgggtgcggttggagcgcatctgactcaccagatttacacccttgacatccacagacccgaggattgctggaataaattcatttccaaccgtactctgggccttatcgttttcctcggtattgtgctgggtaatctgtggaaagagaaaaaaacggacaaaactaaaaaggggatcgagaataaaatcgagaattag

SEQ ID NO: 187863 - DNA, 987 bp, Artificial Sequence
  derived and/or modified sequence
atgctgggttcccgcgcagctggctttgcacgtggtttgagggccgtggctctggcttggcttccaggttggcggggacgatcctttgcgctggcccgtgccgcaggcgctccacacggcggagatctgcagccacctgcctgccctgagcccaggggccgacagctgtcactatccgccgcagccgtcgtggactcagcgccacggcctctgcaaccctatctgagattgatgagactggataaacccatcggcacctggctcctctatctgccctgtacatggagcatcggactggcagccgagcctggatgcttccccgattggtatatgctgtcactgttcggcactggtgccattcttatgcgcggtgcagggtgtacaataaatgacatgtgggatcaggactatgataagaaggtgactcggactgcgaatagaccaatcgcggcaggcgacatctccacattccagagcttcgtttttctgggtgggcagctgacactggctctgggcgttctactctgccttaactattattcaattgcgctgggggctggatccctcctgttagtaattacgtaccccctcatgaaaagaatctcttattggcctcagctcgccctgggcttgacctttaactggggtgccctcctcggatggtcagccattaaggggagctgtgacccgtccgtgtgcctgcctctgtatttctcaggagtaatgtggacattgatatacgacaccatatacgcacaccaggacaagagagatgacgtgttaattggtctgaaatccacggcattaaggtttggcgagaacacgaaaccttggctctccggattctctgtggctatgctcggggcattgagcctggttggtgttaactctgggcaaactgctccctattatgctgcattgggagcggtgggcgctcatctgacccatcagaagtgggggttggaaattcttccaagactagtttag

SEQ ID NO: 187864 - DNA, 1266 bp, Artificial Sequence
  derived and/or modified sequence
atgactccgatctcccaagtccggatgcggaaaggcagcgcgcatacagcagcccagcctggaaggctgggattgcacccagccggtgctaccgcccacgcttgcaggggcatgacaagtataagagctcgacccggtttgaccagtgctatgctcggcagccgcgctgccggatttgcccgagggttgagagccgttgcgttggcatggctgccagggtggcgcggacggtcttttgctttagcgcgtgccgctggtgcccctcatggaggggacctgcaacctccagcatgtcccgagccgcgagggagacaattgagcctgagtgccgctgctgtagtcgactccgctcctagaccactgcagccatatctgaggctaatgcgccttgataaaccaattgggacctggctgctgtacttaccatgtacttggtccattggactggccgcagagcctgggtgttttcccgattggtatatgttaagtctgtttggaaccggcgcaatactgatgcgaggagcgggttgtacaatcaatgacatgtgggaccaagactacgataagaaggtaacaagaacagcgaaccgcccaattgcagccggagatataagtacctttcagtcatttgtgtttttgggtggccagcttaccctcgcgctgggcgtactactgtgcctgaattattactctattgcactcggcgcagggagtctgctgttggtgatcacataccctcttatgaagagaatcagctattggcctcaacttgcgctgggacttaccttcaattggggagcactgttggggtggagtgcaataaaaggctcatgcgatccgtccgtttgcctgccgttgtattttagcggcgtgatgtggacactgatttatgacacaatctacgcacaccaggacaaaagggacgatgtgctcatcggcctcaagtctacagccctgaggttcggagagaacaccaaaccctggctgtccggcttttcggtcgccatgctgggcgcactcagcttggttggcgtcaactctggtcagaccgccccatattatgcggctctgggcgcagtcggcgcacacctgacccaccagatatataccctggacatacatcggcctgaagactgttggaacaagttcatcagtaacaggactcttgggctaattgtgttcttggggatcgtgctgggcaatctgtggaaggaaaaaaagacggataagaccaaaaaaggcatcgagaacaagattgaaaactag

SEQ ID NO: 187865 - DNA, 1155 bp, Artificial Sequence
  derived and/or modified sequence
atgaccagcattcgcgcacgacccggattgacttcggctatgctcgggtcaagagctgccggatttgcaaggggcttgcgggctgtcgctctggcttggctccccggatggcgaggcaggtctttcgctttagctagggctgccggtgctccacatggtggggaccttcagccccctgcctgtcccgaacctagagggcgacagttgtcgctgtcagctgcagcagtggttgactcagcgccacgtccccttcagccctacttgcggctcatgaggctcgataagcccattggaacctggcttctgtacctcccttgcacttggagtattgggttggctgcagagccaggttgttttcccgattggtatatgctatccctgtttggaaccggggctattctcatgagaggtgccggttgcacaatcaacgacatgtgggaccaggattatgacaagaaggtcaccagaactgcaaaccgccctatcgcagctggagacatatctacatttcagtccttcgtttttttaggaggacagctaacactggccctgggcgtgcttctttgtctgaattattactcaatcgctctgggggctggttctctactcctggtgatcacatacccactgatgaaaaggatcagctactggccacaactcgcactcgggttgacgttcaactggggggctctgctagggtggtctgctattaagggatcctgcgatccaagtgtgtgcctccctttatacttttctggcgttatgtggacactaatctacgataccatctacgctcaccaggataaacgagacgatgtccttataggcctgaagtctactgcattgaggttcggggaaaatactaaaccgtggctcagcggtttctccgtcgccatgctgggcgcactcagtcttgtgggggtcaattctgggcagacagcaccttattacgcagctttaggtgccgtgggagcccatctgacccatcagatttataccttggacatccatcggcctgaagattgttggaacaaattcatttcgaatcgcacactcgggctgattgtgtttcttggtattgtccttggtaatctttggaaagagaagaaaactgataagacaaagaaggggattgaaaataagatcgagaattag

SEQ ID NO: 187866 - DNA, 1464 bp, Artificial Sequence
  derived and/or modified sequence
catgctgggctcgcgagccgcggggttcgcgcggggcctgcgggctgtggcactggcgtggctgccgggctggcggggccgctccttcgccctggcgcgtgcggcaggcgcgccccacggtggtgacttgcagccccccgcctgtcccgagccgcgcgggcgccagctcagtttgtccgcggcggcggtggtggactctgcgccccgccccctgcagccgtacttgcgcctcatgcggttggacaagcccattggaacctggcttctgtatttaccatgtacctggagcattggtttggcagctgaaccaggttgttttccagattggtacatgctctccctctttggcactggagctattctgatgcgtggagcaggctgtactattaatgacatgtgggaccaggactatgataaaaaggttacaagaacagccaatcgtccaatagccgctggagacatttcaacttttcagtcctttgtttttcttgggggacagctaaccctggcactgggtgttcttctgtgtctaaattactacagtatagctctgggagcaggatccttacttcttgtcatcacctacccactaatgaaaagaatttcatactggcctcaactagccttgggcttgacatttaattggggagcgttacttggatggtctgctatcaagggttcctgtgatccatctgtttgcctgcctctttatttttctggagttatgtggacactaatatatgatactatttatgcccatcaggacaaaagagatgatgttttgattggtcttaagtcaacggctctgcggttcggagaaaataccaagccgtggctcagcggcttcagtgttgcaatgctgggggcactgagcctagtgggtgtgaacagtggacagactgctccctactacgctgccctgggtgctgtaggagcccatctgactcaccagaaatggggtcttgagattttgcccaggctggtctgaaattcctggcttcaagcaatcttcctgccctggtctcccaaaagtgctgggattaccagtgtgagctaccaaccccagccaaggtatattattttttaaaaataatataggcctaaatccaaattttcccatctgattttcctggaattacttctgattcatgtctggaaaaatttcagtgatatctgaagcttgtggtttgagttgaattactctaaaagcaaactgacagataaagcttttaaaaaaaaatctgggtttctagtgatggttagtagactaattattcataaatttggtttctgctggcataaagaccaaggacagataagacatgaaatgcggaacatgtcaaagttctgccagtagagagcaggaagctgtcatttcaggatattcacccacaccacatcccctacctgtcagaaacttatgttgagaatctacattgttgacttgtaaatgaatgaactaaa

SEQ ID NO: 187867 - DNA, 1641 bp, Artificial Sequence
  derived and/or modified sequence
atgaccccaatttcacaagtaaggatgaggaaaggttctgcccacaccgccgcccagcctggcagactaggattgcatcctgcgggtgccactgcgcatgcctgccggggaatgacgtcaatccgagctcgtcccggcctcaccagcgccatgctgggctcgcgagccgcggggttcgcgcggggcctgcgggctgtggcactggcgtggctgccgggctggcggggccgctccttcgccctggcgcgtgcggcaggcgcgccccacggtggtgacttgcagccccccgcctgtcccgagccgcgcgggcgccagctcagtttgtccgcggcggcggtggtggactctgcgccccgccccctgcagccgtacttgcgcctcatgcggttggacaagcccattggaacctggcttctgtatttaccatgtacctggagcattggtttggcagctgaaccaggttgttttccagattggtacatgctctccctctttggcactggagctattctgatgcgtggagcaggctgtactattaatgacatgtgggaccaggactatgataaaaaggttacaagaacagccaatcgtccaatagccgctggagacatttcaacttttcagtcctttgtttttcttgggggacagctaaccctggcactgggtgttcttctgtgtctaaattactacagtatagctctgggagcaggatccttacttcttgtcatcacctacccactaatgaaaagaatttcatactggcctcaactagccttgggcttgacatttaattggggagcgttacttggatggtctgctatcaagggttcctgtgatccatctgtttgcctgcctctttatttttctggagttatgtggacactaatatatgatactatttatgcccatcaggacaaaagagatgatgttttgattggtcttaagtcaacggctctgcggttcggagaaaataccaagccgtggctcagcggcttcagtgttgcaatgctgggggcactgagcctagtgggtgtgaacagtggacagactgctccctactacgctgccctgggtgctgtaggagcccatctgactcaccagatttacactctagacatccacagacctgaggattgttggaataaatttatctccaaccgaacactgggactaatagtttttttagggattgtccttgggaatttgtggaaagaaaagaagacagacaaaacaaagaagggtatagagaataaaatagaaaattaatgaatgaaatttatctaggaatttttaaaacattttttacaaaatataattagatttgaatacaaaatctgatacaatatgttaaagaattaagaacctgaagatgaagatttagagcatatttacctggattttacttatttgctagcaaaattcccccttgtcacagaaaccagggactcttcaggatttgagatggccttgagtattttagttgatacattcttctgcccattataattctcacctgaagttatggggattgcacgggttttggcactttagaaaaagcctgatgtgggtcttacataaatgaatgtctgtataagaaaatggactcttttttttagggaaaaataaaagcaactatgggaa

SEQ ID NO: 187868 - DNA, 1639 bp, Artificial Sequence
  derived and/or modified sequence
atgaccccaatttcacaagtaaggatgaggaaaggttctgcccacaccgccgcccagcctggcagactaggattgcatcctgcgggtgccactgcgcatgcctgccggggaatgacgtcaatccgagctcgtcccggcctcaccagcgccatgctgggctcgcgagccgcggggttcgcgcggggcctgcgggctgtggcactggcgtggctgccgggctggcggggccgctccttcgccctggcgcgtgcggcaggcgcgccccacggtggtgacttgcagccccccgcctgtcccgagccgcgcgggcgccagctcagtttgtccgcggcggcggtggtggactctgcgccccgccccctgcagccgtacttgcgcctcatgcggttggacaagcccattggaacctggcttctgtatttaccatgtacctggagcattggtttggcagctgaaccaggttgttttccagattggtacatgctctccctctttggcactggagctattctgatgcgtggagcaggctgtactattaatgacatgtgggaccaggactatgataaaaaggttacaagaacagccaatcgtccaatagccgctggagacatttcaacttttcagtcctttgtttttcttgggggacagctaaccctggcactgggtgttcttctgtgtctaaattactacagtatagctctgggagcaggatccttacttcttgtcatcacctacccactaatgaaaagaatttcatactggcctcaactagccttgggcttgacatttaattggggagcgttacttggatggtctgctatcaagggttcctgtgatccatctgtttgcctgcctctttatttttctggagttatgtggacactaatatatgatactatttatgcccatcaggacaaaagagatgatgttttgattggtcttaagtcaacggctctgcggttcggagaaaataccaagccgtggctcagcggcttcagtgttgcaatgctgggggcactgagcctagtgggtgtgaacagtggacagactgctccctactacgctgccctgggtgctgtaggagcccatctgactcaccagatttacactctagacatccacagacctgaggattgttggaataaatttatctccaaccgaacactgggactaatagtttttttagggattgtccttgggaatttgtggaaagaaaagaagacagacaaaacaaagaagggtatagagaataaaatagaaaattaatgaatgaaatttatctaggaatttttaaaacattttttacaaaatataattagatttgaatacaaaatctgatacaatatgttaaagaattaagaacctgaagatgaagatttagagcatatttacctggattttacttatttgctagcaaaattcccccttgtcacagaaaccagggactcttcaggatttgagatggccttgagtattttagttgatacattcttctgcccattataattctcacctgaagttatggggattgcacgggttttggcactttagaaaaagcctgatgtgggtcttacataaatgaatgtctgtataagaaaatggactcttttttttagggaaaaataaaagcaactatggg

SEQ ID NO: 187869 - DNA, 987 bp, Artificial Sequence
  derived and/or modified sequence
atgctgggcagcagagccgccggcttcgccagaggcctgagagccgtggccctggcctggctgcccggctggagaggcagaagcttcgccctggccagagccgccggcgccccccacggcggcgacctgcagccccccgcctgccccgagcccagaggcagacagctgagcctgagcgccgccgccgtggtggacagcgcccccagacccctgcagccctacctgagactgatgagactggacaagcccatcggcacctggctgctgtacctgccctgcacctggagcatcggcctggccgccgagcccggctgcttccccgactggtacatgctgagcctgttcggcaccggcgccatcctgatgagaggcgccggctgcaccatcaacgacatgtgggaccaggactacgacaagaaggtgaccagaaccgccaacagacccatcgccgccggcgacatcagcaccttccagagcttcgtgttcctgggcggccagctgaccctggccctgggcgtgctgctgtgcctgaactactacagcatcgccctgggcgccggcagcctgctgctggtgatcacctaccccctgatgaagagaatcagctactggccccagctggccctgggcctgaccttcaactggggcgccctgctgggctggagcgccatcaagggcagctgcgaccccagcgtgtgcctgcccctgtacttcagcggcgtgatgtggaccctgatctacgacaccatctacgcccaccaggacaagagagacgacgtgctgatcggcctgaagagcaccgccctgagattcggcgagaacaccaagccctggctgagcggcttcagcgtggccatgctgggcgccctgagcctggtgggcgtgaacagcggccagaccgccccctactacgccgccctgggcgccgtgggcgcccacctgacccaccagaagtggggcctggagatcctgcccagactggtgtag

SEQ ID NO: 187870 - DNA, 1266 bp, Artificial Sequence
  derived and/or modified sequence
atgacccccatcagccaggtgagaatgagaaagggcagcgcccacaccgccgcccagcccggcagactgggcctgcaccccgccggcgccaccgcccacgcctgcagaggcatgaccagcatcagagccagacccggcctgaccagcgccatgctgggcagcagagccgccggcttcgccagaggcctgagagccgtggccctggcctggctgcccggctggagaggcagaagcttcgccctggccagagccgccggcgccccccacggcggcgacctgcagccccccgcctgccccgagcccagaggcagacagctgagcctgagcgccgccgccgtggtggacagcgcccccagacccctgcagccctacctgagactgatgagactggacaagcccatcggcacctggctgctgtacctgccctgcacctggagcatcggcctggccgccgagcccggctgcttccccgactggtacatgctgagcctgttcggcaccggcgccatcctgatgagaggcgccggctgcaccatcaacgacatgtgggaccaggactacgacaagaaggtgaccagaaccgccaacagacccatcgccgccggcgacatcagcaccttccagagcttcgtgttcctgggcggccagctgaccctggccctgggcgtgctgctgtgcctgaactactacagcatcgccctgggcgccggcagcctgctgctggtgatcacctaccccctgatgaagagaatcagctactggccccagctggccctgggcctgaccttcaactggggcgccctgctgggctggagcgccatcaagggcagctgcgaccccagcgtgtgcctgcccctgtacttcagcggcgtgatgtggaccctgatctacgacaccatctacgcccaccaggacaagagagacgacgtgctgatcggcctgaagagcaccgccctgagattcggcgagaacaccaagccctggctgagcggcttcagcgtggccatgctgggcgccctgagcctggtgggcgtgaacagcggccagaccgccccctactacgccgccctgggcgccgtgggcgcccacctgacccaccagatctacaccctggacatccacagacccgaggactgctggaacaagttcatcagcaacagaaccctgggcctgatcgtgttcctgggcatcgtgctgggcaacctgtggaaggagaagaagaccgacaagaccaagaagggcatcgagaacaagatcgagaactag

SEQ ID NO: 187871 - DNA, 1155 bp, Artificial Sequence
  derived and/or modified sequence
atgaccagcatcagagccagacccggcctgaccagcgccatgctgggcagcagagccgccggcttcgccagaggcctgagagccgtggccctggcctggctgcccggctggagaggcagaagcttcgccctggccagagccgccggcgccccccacggcggcgacctgcagccccccgcctgccccgagcccagaggcagacagctgagcctgagcgccgccgccgtggtggacagcgcccccagacccctgcagccctacctgagactgatgagactggacaagcccatcggcacctggctgctgtacctgccctgcacctggagcatcggcctggccgccgagcccggctgcttccccgactggtacatgctgagcctgttcggcaccggcgccatcctgatgagaggcgccggctgcaccatcaacgacatgtgggaccaggactacgacaagaaggtgaccagaaccgccaacagacccatcgccgccggcgacatcagcaccttccagagcttcgtgttcctgggcggccagctgaccctggccctgggcgtgctgctgtgcctgaactactacagcatcgccctgggcgccggcagcctgctgctggtgatcacctaccccctgatgaagagaatcagctactggccccagctggccctgggcctgaccttcaactggggcgccctgctgggctggagcgccatcaagggcagctgcgaccccagcgtgtgcctgcccctgtacttcagcggcgtgatgtggaccctgatctacgacaccatctacgcccaccaggacaagagagacgacgtgctgatcggcctgaagagcaccgccctgagattcggcgagaacaccaagccctggctgagcggcttcagcgtggccatgctgggcgccctgagcctggtgggcgtgaacagcggccagaccgccccctactacgccgccctgggcgccgtgggcgcccacctgacccaccagatctacaccctggacatccacagacccgaggactgctggaacaagttcatcagcaacagaaccctgggcctgatcgtgttcctgggcatcgtgctgggcaacctgtggaaggagaagaagaccgacaagaccaagaagggcatcgagaacaagatcgagaactag

SEQ ID NO: 187872 - protein, 476 aa, Artificial Sequence
  derived and/or modified sequence
MADSKEGVLPLTAASTAPISFGFTRTSARRRLADSGDGAGPSPEEKDFLKTVEGRELQSVKPQEAPKELVIPLIQNGHRRQPPARPPGPSTDTGALADGVVSQAVKELIAESKKSLEERENAGVDPTLAIPMIQKGCTPSGEGADSEPRAETVPEEANYEAVPVEAYGLAMLRGMGWKPGEGIGRTFNQVVKPRVNSLRPKGLGLGANLTEAQALTPTGPSRMPRPDEEQEKDKEDQPQGLVPGGAVVVLSGPHRGLYGKVEGLDPDNVRAMVRLAVGSRVVTVSEYYLRPVSQQEFDKNTLDLRQQNGTASSRKTLWNQELYIQQDNSERKRKHLPDRQDGPAAKSEKAAPRSQHWLHRDLRVRFVDNMYKGGQYYNTKMIIEDVLSPDTCVCRTDEGRVLEGLREDMLETLVPKAEGDRVMVVLGPQTGRVGHLLSRDRARSRALVQLPRENQVVELHYDAICQYMGPSDTDDD

SEQ ID NO: 187873 - DNA, 1431 bp, Artificial Sequence
  derived and/or modified sequence
atggctgactctaaggaaggcgtactcccattgaccgccgccagtaccgcgccaatctcgttcggcttcacgaggactagtgcccgacggcgactggccgatagtggagacggggcaggaccgtcaccagaggagaaagatttcctgaaaacagtggagggccgcgagctccagtccgtcaaaccacaagaggctcctaaagaacttgtgatcccactgattcaaaacgggcatcgaagacagcctccggcacgtcccccagggcccagcacagatacaggcgccctggcagacggtgtagtgtctcaagctgtcaaagagctgatcgctgagagtaaaaagtcactagaggaacgagaaaacgctggggtcgacccaacactggccatccccatgatccagaagggctgcacgcccagcggcgaaggcgccgacagtgagccacgagcagaaacagtcccagaagaagctaattacgaagcagtgcccgtggaggcttacggcctcgcgatgctgcgaggcatggggtggaagcccggagaaggaattgggcggacgttcaatcaggtggtaaaacctcgagtgaacagcctgcgccccaaaggacttggtctgggcgccaatttgacggaggcccaggctctgactcctactggcccgagtaggatgccaagaccagacgaggaacaagagaaagacaaggaggatcagccacagggcttggtccctggcggggcagtggtggttctgagtggccctcaccgcggactgtatggcaaggtggagggactcgacccagacaatgttcgagccatggttcggttggctgtgggatccagggtcgtaacggttagtgaatattatctgcgccctgtcagtcaacaggagtttgataagaataccctggatctgcggcaacagaatggtacggctagctcccggaagacactttggaaccaagaactttacatccagcaagataatagtgaaaggaaacggaagcacttgccagaccggcaggacggaccagccgcaaagtccgaaaaggccgctccccgctcccagcattggctgcaccgggatctgagagtcagattcgtggataacatgtataagggagggcagtactacaataccaaaatgattatcgaagacgtgctcagtcccgatacttgtgtctgccggacagacgaggggagagttctagagggcctgagggaggacatgttggaaacactggtccccaaagctgagggggatagggtgatggtagttctaggcccccagactggccgggtgggtcatcttttgagtagggatcgggccaggtctcgcgcgctcgtgcaactgccaagagaaaaccaagtagttgagctgcactacgacgctatatgccagtacatgggaccgtcagacaccgacgacgactag

SEQ ID NO: 187874 - DNA, 1431 bp, Artificial Sequence
  derived and/or modified sequence
atggctgacagcaaggagggcgtgctgcccctgacagctgccagcacagcccccatcagctttggcttcaccaggaccagcgcccggcggcggctggccgacagcggagatggagctggccccagccctgaggagaaggacttcctgaagacagtggagggccgggagctgcagagcgtgaagccccaggaggcccccaaggagctggtgatccccctcatccagaatggccaccggcggcagcccccagcccggcccccaggccccagcacagacacaggagccctggctgatggagtggtgtcccaggccgtgaaggagctgattgctgagagcaagaagagcctggaggagcgggagaatgctggggtggaccccaccctggccatccccatgatccagaagggctgcacccccagcggggagggcgctgacagcgagcccagggctgagaccgtgcctgaggaggccaactatgaagctgtgcctgtggaggcctacggcctggccatgctgcggggcatgggctggaagccaggagagggcattggaagaaccttcaaccaggtggtgaagccccgggtgaacagcctgcggcccaagggcctgggcctgggcgccaacctgacagaggcccaggccctgacccccaccggccccagcaggatgcccaggccagatgaggagcaggagaaggacaaggaggaccagccccagggcctggtgcctggaggagctgtggtggtgctgagcggcccccaccggggcctgtatggcaaggtggagggcctggaccctgacaacgtgcgggccatggtgcggctggccgtgggcagccgggtggtgacagtgtctgagtactacctgcggcctgtgtcccagcaggagtttgacaagaacaccctggacctgcggcagcagaatggaacagccagcagcaggaagaccctgtggaaccaggagctgtacatccagcaggacaacagcgagaggaagaggaagcacctgcctgaccggcaggacggccctgctgccaagtctgagaaggccgcccccaggagccagcactggctgcaccgggacctgcgggtgcgctttgtggacaacatgtacaagggcggccagtactacaacaccaagatgatcattgaagatgtgctgagcccagacacctgtgtgtgcaggacagatgagggccgggtgctggagggcctgcgggaggacatgctggagaccctggtgcccaaggccgagggggacagagtgatggtggtgctgggcccccagacaggccgggtgggccacctgctgagccgggaccgggcccggagccgggccctggtgcagctgccccgggagaaccaggtggtggagctgcactatgatgccatctgccagtacatgggccccagcgacacagatgatgactag

SEQ ID NO: 187875 - DNA, 1431 bp, Artificial Sequence
  derived and/or modified sequence
atggccgacagcaaggagggcgtgctgcccctgaccgccgccagcacagcgccaatcagcttcggtttcacacgaacctccgccaggcgccgtctggctgacagcggcgacggcgccggcccctccccggaggagaaggacttcctgaaaacagtggagggtcgcgaattgcaatcagtgaagccacaagaagcccccaaggagctcgtaataccgcttatccagaacggccaccggaggcagcctcccgcgagaccaccagggcccagcactgataccggcgccctggcagatggcgtggtcagccaagccgtcaaagagctgattgcggagagtaaaaaaagtctggaggagcgcgagaacgcaggggtggaccctactctggcaattcccatgatccaaaaaggatgtacacctagtggcgagggagcggattcagaaccacgcgctgaaaccgtccctgaggaggctaattacgaagccgtccctgtggaggcctatggtctggcaatgctgcgcggaatgggatggaagcctggagagggcattgggcgaacctttaatcaagtcgttaagcctcgcgtgaacagcctccggccaaaaggcctgggcttaggcgccaacttgaccgaagctcaggcactgacgcccacaggcccaagtaggatgccccgtccagatgaagaacaggagaaggacaaagaggaccagccacagggtttggtgccaggaggggcagtcgtggttctttctggacctcaccggggattgtacggaaaggtggagggcctggatcctgataacgtccgggctatggtgagactggccgttggctcccgtgtcgtgacggtgtctgaatactaccttcggcctgttagccagcaggaatttgacaaaaataccctggatttaaggcaacagaacggcaccgcgagcagccgcaaaaccctatggaatcaggagctgtatatccagcaagataattcggaaagaaaaagaaaacatcttcctgatcggcaggacgggccagcagcaaagagtgagaaggcagctcccaggtctcagcactggctacaccgcgatttacgagtgcgatttgttgataatatgtataagggcggacagtactacaataccaagatgatcattgaggacgtgctgtcaccagacacatgtgtatgccggactgacgagggtagggtcctggaggggctccgggaggatatgttggagactttggtaccaaaagcagagggtgatagggtgatggtggtcctgggaccgcagactggcagggtgggccacctgctcagccgcgaccgagccagatctcgggctcttgtgcagttacctcgggaaaaccaggtcgttgagctgcattatgatgccatttgccaatatatggggccatctgatacggacgacgattag

SEQ ID NO: 187876 - DNA, 1431 bp, Artificial Sequence
  derived and/or modified sequence
atggccgattccaaagaaggagtgttacctttaacagccgcttcaaccgctcctattagctttggcttcactcggacgtcagcaagacggaggctcgccgattcaggggacggagctggcccttcaccggaggaaaaagactttctcaaaaccgtggaaggacgcgaactgcaatccgtgaaaccccaggaagccccaaaggaactcgtcatacccctaatccagaacgggcatcgacgccagccacccgctcggccacccggacctagcaccgacaccggcgctctggccgacggtgtggtgagccaggcggttaaggagttgattgccgagagtaagaaaagtctggaagagcgggaaaacgcaggggtagatccaacacttgctatccccatgattcaaaagggatgcactcctagtggagagggagccgacagcgaaccgagagctgagaccgttcccgaagaggctaattatgaggccgtaccggtcgaagcttacgggttggctatgctgaggggcatgggctggaagcccggagagggaattggtcgtacatttaatcaggtcgtgaagccacgagttaacagcttgcggccaaaaggcttaggtcttggagctaatcttactgaggcacaggcactcactcccacaggacctagcaggatgcctcggcctgacgaggagcaagaaaaggataaggaagaccaacctcagggacttgtcccaggaggcgctgtcgttgtgctttccgggcctcaccggggtctctatggaaaggtagaaggtttagaccctgacaatgtgcgcgctatggtgcggttggcggtgggcagcagggtggtcacagtgtcggagtattatctgcgccctgtcagccagcaggagtttgacaagaacaccctcgatctgaggcagcagaatggtacagcttccagccgtaaaactttgtggaaccaggaactatatatccagcaggataattctgagaggaaaaggaaacatctacctgatcgccaggacggccctgcggcaaagtcagagaaggctgcgccacgctctcagcattggctgcaccgtgacctccgggttcggtttgtggacaatatgtacaagggaggtcagtactataatacaaaaatgatcatagaggatgtgctctcgcccgacacatgcgtgtgtagaaccgatgagggccgtgtcctggagggcttgagagaagacatgctggagacccttgtgccaaaagccgaaggggacagagttatggtcgtgctcggccctcagactgggagagtaggacatctactgtcccgtgaccgggctaggagtcgagctttagtacaactcccaagggaaaatcaggtggtggagctgcattatgatgcgatttgtcagtacatggggccatccgatactgacgacgactag

SEQ ID NO: 187877 - DNA, 1431 bp, Artificial Sequence
  derived and/or modified sequence
atggctgacagcaaagagggggtcctccccttgaccgcagcgagcactgccccaattagtttcggatttacacgtacgagtgcgaggagaaggcttgcagacagtggcgatggcgctggacctagccccgaagaaaaagacttcttgaagaccgttgaaggccgagaattacaaagcgtgaaaccacaggaggccccaaaagagcttgtcattcccctgatacagaacggtcacagaaggcaacccccagcaagacccccgggaccttcgactgacaccggggccctggccgacggggtagtgtcacaggcagttaaggaactgatcgcggaatctaaaaagagcctggaagaacgtgaaaatgcaggtgtcgaccctacccttgcgatccccatgatacaaaaggggtgtacgcctagcggcgaaggggcagactctgagccgagggcagagactgtgcccgaggaggcgaactacgaagctgtgcccgtcgaagcctacggccttgcgatgctcaggggcatgggctggaagcccggtgagggtataggacgcacctttaatcaagttgtgaagccaagagtgaactccctgagaccaaagggtttaggactcggagccaatctcactgaggcacaggccctcacccctaccgggccatctagaatgccccgtcccgacgaagaacaggagaaagacaaagaggaccaacctcagggactcgtacctggcggggctgttgtggtgctgagcggcccacacagaggactttatggcaaggtagaaggcctggatcccgataatgtaagagccatggtacggctggctgtgggctcacgggtggtgaccgtgtctgagtattatctccgccccgttagccagcaggagtttgacaaaaatacattagatttacgacagcagaacggcacagcaagttcaagaaaaactctgtggaatcaggaactatacatccagcaggacaacagtgaaaggaagcgtaagcacttgccggatcgccaggatggacctgctgcaaagtccgagaaggccgccccacgaagccagcactggctgcaccgtgacctccgggttaggtttgtggataacatgtacaaggggggacagtactataatacgaaaatgatcatcgaggacgtcctcagcccagacacatgcgtttgtagaaccgacgagggacgtgtcctggagggacttagagaagatatgctggaaacattagttcccaaggcggagggagaccgggtgatggttgtgctaggaccacagacgggccgagtgggacaccttctgtcaagggatcgggctcgaagccgagcgttagtgcagctcccccgcgagaaccaagtggtagaactccactacgacgccatttgccagtacatgggaccatcggacacagacgatgattag

SEQ ID NO: 187878 - DNA, 1431 bp, Artificial Sequence
  derived and/or modified sequence
atggccgacagtaaagaaggtgttcttcccttgactgcagcttcaaccgcccccatttcctttggctttactagaacgagtgctcgaagacgcctggccgactccggcgatggcgccggaccttctcctgaagaaaaggatttcctgaaaactgtggaaggtcgggaactacagtcagttaagccgcaggaagccccaaaggaattggtgattccactcatacagaatggccataggagacaaccccccgcacgcccccctggtcctagcacagatacaggcgccctggctgatggagtggtatcacaggccgtcaaagaacttattgcagaatccaagaaaagtttggaggaaagggagaatgccggtgtagatcctaccctagccataccgatgatacaaaaagggtgtacccccagcggggaaggtgcagactctgagccccgtgcagagacagtgccagaagaagcgaattatgaggccgtccccgtggaggcatatggcctggccatgcttaggggaatgggctggaagccaggtgaagggataggtagaacatttaatcaagtggtcaagccaagagttaactctcttcggcccaaaggtttgggtctgggagccaacctgaccgaggcccaagccctgacacccaccggaccgtcaaggatgcctcgccctgacgaagagcaggagaaggataaagaggatcagccacagggcctagtaccagggggggctgtggtggtactgtccgggcctcacagaggactatatggcaaagtcgaaggccttgacccagataatgtgagagctatggttcgtttagcggtgggttccagagtggtgacagttagcgagtattatttacggcccgtttcccagcaagagtttgataagaacacacttgatttgcgccagcaaaatgggaccgcctcttcaagaaagaccctttggaatcaggagttatacattcagcaggacaatagcgaacgtaagagaaagcatctccctgacaggcaggacggcccagccgccaaatcagagaaggctgctccacgttcacagcactggcttcaccgtgacctccgcgttagattcgtggataatatgtataaaggtggtcagtactacaacaccaaaatgattatcgaagacgtcctatccccagacacatgcgtatgcagaaccgatgaaggaagggtacttgaggggcttcgagaggatatgctggaaacactagtgcccaaagccgaaggtgatagagtgatggttgtgctcggcccgcagaccggtcgagtcgggcacctattgtctagagatcgggcccgctctagagcgctggtccagctgccacgcgagaatcaggtggttgagctgcattatgatgccatttgtcagtacatgggaccttctgacaccgacgatgactag

SEQ ID NO: 187879 - DNA, 1735 bp, Artificial Sequence
  derived and/or modified sequence
actttggccggcccctagcgatctgaacccaaactaaatttcccagcaagcagcgcgccggcctgggaaaaggagcaagatggctgactccaaagagggtgttttgccgctgacggctgcttccactgccccaatttcattcggcttcactcgcacgtccgcacggaggcggctggccgactcgggagacggcgcggggccatctccggaggagaaggatttcttgaaaaccgtggaagggagggagctgcagagtgtgaagccccaggaggcccccaaggaactcgtcatccctttgatccagaatggccatcgcaggcagccaccagcccggccccctgggccatccacagatactggggccttggcggatggggtggtgtcccaggctgtgaaggagctcattgcggaatccaagaagtctctggaagagagagagaatgcgggtgtcgaccccacgctcgctatccccatgatccagaaaggatgcacccccagcggggaaggggcagacagcgaaccccgggcagagacagtgccagaggaggctaattatgaggcggtccccgtggaggcctatgggctggccatgctgcggggcatgggctggaaacctggcgagggcatcggccgcaccttcaatcaagtagtgaagccccgtgtcaactcactgaggcccaaggggttagggctgggtgccaacctgaccgaggcccaggccttgacccccactggcccctcccgcatgccaagaccagatgaggagcaagagaaagataaggaagatcagcctcaagggctggtgcctggaggagctgtggtggttctttctggccctcaccgaggcctctatgggaaggtggaaggccttgatcctgacaatgttcgggccatggttcgtctggctgtggggagccgggtggtgactgttagtgagtactacctgcggcctgtctcccagcaggagtttgacaagaacaccttggatctcaggcaacagaacggaactgcctcatcacggaagaccctctggaatcaagaactctacatccagcaggacaactcagagaggaagcggaaacaccttccagaccgacaggatgggcctgcagccaagagtgagaaagcagcccccagaagtcagcactggttgcacagggacctgcgtgtgcggtttgtggacaacatgtacaaaggaggccaatattacaacaccaagatgataattgaagatgtcctaagcccagatacctgtgtatgtcggacagatgaaggccgagtcctggaaggcctgagggaagacatgctggagaccctggttcccaaggcagagggtgaccgtgtgatggtggtgctgggcccacagactggaagggtgggacatttgctgagccgggacagagcacggagccgggctttggtgcaactgccaagagaaaatcaggtggtggagcttcactacgatgccatctgccagtacatgggccctagtgacacagatgatgactgacccatgggactcctcccatcccccaggctggtaccagttctgtaccatatgagaaagttgccttcagaaggtgggaagatcattgttccatcctctacttctggtgcagtcctgggacaaggacaagggaaagggatgggtgaaccagtagggaagctagaaacaaacccaatatttaccaaaatttagggtataataaaaaccatttcaagtacttaatagaaa

SEQ ID NO: 187880 - DNA, 1431 bp, Artificial Sequence
  derived and/or modified sequence
atggccgacagcaaggagggcgtgctgcccctgaccgccgccagcaccgcccccatcagcttcggcttcaccagaaccagcgccagaagaagactggccgacagcggcgacggcgccggccccagccccgaggagaaggacttcctgaagaccgtggagggcagagagctgcagagcgtgaagccccaggaggcccccaaggagctggtgatccccctgatccagaacggccacagaagacagccccccgccagaccccccggccccagcaccgacaccggcgccctggccgacggcgtggtgagccaggccgtgaaggagctgatcgccgagagcaagaagagcctggaggagagagagaacgccggcgtggaccccaccctggccatccccatgatccagaagggctgcacccccagcggcgagggcgccgacagcgagcccagagccgagaccgtgcccgaggaggccaactacgaggccgtgcccgtggaggcctacggcctggccatgctgagaggcatgggctggaagcccggcgagggcatcggcagaaccttcaaccaggtggtgaagcccagagtgaacagcctgagacccaagggcctgggcctgggcgccaacctgaccgaggcccaggccctgacccccaccggccccagcagaatgcccagacccgacgaggagcaggagaaggacaaggaggaccagccccagggcctggtgcccggcggcgccgtggtggtgctgagcggcccccacagaggcctgtacggcaaggtggagggcctggaccccgacaacgtgagagccatggtgagactggccgtgggcagcagagtggtgaccgtgagcgagtactacctgagacccgtgagccagcaggagttcgacaagaacaccctggacctgagacagcagaacggcaccgccagcagcagaaagaccctgtggaaccaggagctgtacatccagcaggacaacagcgagagaaagagaaagcacctgcccgacagacaggacggccccgccgccaagagcgagaaggccgcccccagaagccagcactggctgcacagagacctgagagtgagattcgtggacaacatgtacaagggcggccagtactacaacaccaagatgatcatcgaggacgtgctgagccccgacacctgcgtgtgcagaaccgacgagggcagagtgctggagggcctgagagaggacatgctggagaccctggtgcccaaggccgagggcgacagagtgatggtggtgctgggcccccagaccggcagagtgggccacctgctgagcagagacagagccagaagcagagccctggtgcagctgcccagagagaaccaggtggtggagctgcactacgacgccatctgccagtacatgggccccagcgacaccgacgacgactag

SEQ ID NO: 187881 - RNA, 1431 nt, Artificial Sequence
  derived and/or modified sequence
auggcugacagcaaagaggggguccuccccuugaccgcagcgagcacugccccaauuaguuucggauuuacacguacgagugcgaggagaaggcuugcagacaguggcgauggcgcuggaccuagccccgaagaaaaagacuucuugaagaccguugaaggccgagaauuacaaagcgugaaaccacaggaggccccaaaagagcuugucauuccccugauacagaacggucacagaaggcaacccccagcaagacccccgggaccuucgacugacaccggggcccuggccgacgggguagugucacaggcaguuaaggaacugaucgcggaaucuaaaaagagccuggaagaacgugaaaaugcaggugucgacccuacccuugcgauccccaugauacaaaagggguguacgccuagcggcgaaggggcagacucugagccgagggcagagacugugcccgaggaggcgaacuacgaagcugugcccgucgaagccuacggccuugcgaugcucaggggcaugggcuggaagcccggugaggguauaggacgcaccuuuaaucaaguugugaagccaagagugaacucccugagaccaaaggguuuaggacucggagccaaucucacugaggcacaggcccucaccccuaccgggccaucuagaaugccccgucccgacgaagaacaggagaaagacaaagaggaccaaccucagggacucguaccuggcggggcuguuguggugcugagcggcccacacagaggacuuuauggcaagguagaaggccuggaucccgauaauguaagagccaugguacggcuggcugugggcucacggguggugaccgugucugaguauuaucuccgccccguuagccagcaggaguuugacaaaaauacauuagauuuacgacagcagaacggcacagcaaguucaagaaaaacucuguggaaucaggaacuauacauccagcaggacaacagugaaaggaagcguaagcacuugccggaucgccaggauggaccugcugcaaaguccgagaaggccgccccacgaagccagcacuggcugcaccgugaccuccggguuagguuuguggauaacauguacaaggggggacaguacuauaauacgaaaaugaucaucgaggacguccucagcccagacacaugcguuuguagaaccgacgagggacguguccuggagggacuuagagaagauaugcuggaaacauuaguucccaaggcggagggagaccgggugaugguugugcuaggaccacagacgggccgagugggacaccuucugucaagggaucgggcucgaagccgagcguuagugcagcucccccgcgagaaccaagugguagaacuccacuacgacgccauuugccaguacaugggaccaucggacacagacgaugauuag

SEQ ID NO: 187882 - RNA, 1431 nt, Artificial Sequence
  derived and/or modified sequence
auggccgacaguaaagaagguguucuucccuugacugcagcuucaaccgcccccauuuccuuuggcuuuacuagaacgagugcucgaagacgccuggccgacuccggcgauggcgccggaccuucuccugaagaaaaggauuuccugaaaacuguggaaggucgggaacuacagucaguuaagccgcaggaagccccaaaggaauuggugauuccacucauacagaauggccauaggagacaaccccccgcacgccccccugguccuagcacagauacaggcgcccuggcugauggagugguaucacaggccgucaaagaacuuauugcagaauccaagaaaaguuuggaggaaagggagaaugccgguguagauccuacccuagccauaccgaugauacaaaaaggguguacccccagcggggaaggugcagacucugagccccgugcagagacagugccagaagaagcgaauuaugaggccguccccguggaggcauauggccuggccaugcuuaggggaaugggcuggaagccaggugaagggauagguagaacauuuaaucaaguggucaagccaagaguuaacucucuucggcccaaagguuugggucugggagccaaccugaccgaggcccaagcccugacacccaccggaccgucaaggaugccucgcccugacgaagagcaggagaaggauaaagaggaucagccacagggccuaguaccagggggggcuguggugguacuguccgggccucacagaggacuauauggcaaagucgaaggccuugacccagauaaugugagagcuaugguucguuuagcgguggguuccagaguggugacaguuagcgaguauuauuuacggcccguuucccagcaagaguuugauaagaacacacuugauuugcgccagcaaaaugggaccgccucuucaagaaagacccuuuggaaucaggaguuauacauucagcaggacaauagcgaacguaagagaaagcaucucccugacaggcaggacggcccagccgccaaaucagagaaggcugcuccacguucacagcacuggcuucaccgugaccuccgcguuagauucguggauaauauguauaaagguggucaguacuacaacaccaaaaugauuaucgaagacguccuauccccagacacaugcguaugcagaaccgaugaaggaaggguacuugaggggcuucgagaggauaugcuggaaacacuagugcccaaagccgaaggugauagagugaugguugugcucggcccgcagaccggucgagucgggcaccuauugucuagagaucgggcccgcucuagagcgcugguccagcugccacgcgagaaucaggugguugagcugcauuaugaugccauuugucaguacaugggaccuucugacaccgacgaugacuag

SEQ ID NO: 187883 - DNA, 693 bp, Artificial Sequence
  derived and/or modified sequence
atgctcaaaaatccttatacaattaaaaagcagcccctgcatcagtttgtccagcgccccctgttccccctgcctgctgccttttaccacccagttcgctacatgtttattcaaactcaggacactcccaatccgaattcgctgaaatttatacctggcaaacctgtgctcgaaacgagaaccatggatttccccaccccggcggccgccttcagaagtccccttgcgcgacagctgttccggattgaaggtgttaaatccgtattcttcggtcctgacttcatcacagttaccaaagaaaacgaggaactcgactggaacttgttaaaacccgacatctacgctaccattatggattttttcgctagcggtcttcctctggtgactgaggaaacgccttctggagaggcagggtcagaggaggatgatgaagttgtggccatgattaaagaacttctcgataccagaatcagaccaaccgtgcaggaggatggcggcgacgtcatatataaaggctttgaggacggaatcgtacagcttaaactgcaagggtcttgtacttcatgccctagcagcattataaccctgaagaatggcatccagaatatgctgcagttctatattcctgaagtagagggcgtcgagcaggtgatggacgacgaatctgacgagaaggaggcgaacagtccttag

SEQ ID NO: 187884 - DNA, 693 bp, Artificial Sequence
  derived and/or modified sequence
atgctgaagaacccctacaccatcaagaagcagcccctgcaccagtttgtgcagaggcccctcttccccctgcctgctgccttctaccaccctgtgcgctacatgttcatccagacccaggacacccccaaccccaacagcctgaagttcatccctgggaagcctgtgctggagaccaggaccatggacttccccaccccagctgctgccttccgcagccccctggcccggcagctgttccgcatcgagggcgtgaagtctgtgttcttcggccctgacttcatcaccgtgaccaaggaaaatgaggagctggactggaacctgctgaagccagacatctatgccaccatcatggacttctttgccagcggcctgcccctggtgacagaggagacccccagcggggaggccggctctgaagaagatgatgaggtggtggccatgatcaaggagctgctggacacccgcatccggcccaccgtgcaggaggatggaggagatgtgatctacaagggctttgaagatggcatcgtgcagctgaagctgcagggcagctgcaccagctgccccagcagcatcatcaccctgaagaatggcatccagaacatgctgcagttctacatccctgaggtggagggcgtggagcaggtgatggatgatgaaagtgatgagaaggaggccaacagcccctag

SEQ ID NO: 187885 - DNA, 693 bp, Artificial Sequence
  derived and/or modified sequence
atgctgaagaacccctacaccatcaagaagcagcccctgcaccagtttgttcagagacctctatttcctttgcctgcggcattctatcacccggtgagatatatgttcatccagacccaggacactccaaatccgaatagcctgaagttcatcccaggaaagcccgttctcgaaaccaggaccatggatttcccaaccccggccgccgcattccgctccccactggcgaggcagctgttccgaattgagggggtaaaatcagttttcttcggacccgactttatcacagttacgaaagaaaacgaagagctagattggaatctgttgaaaccggacatttacgccacaatcatggactttttcgcatcgggattgcctctcgtgaccgaagaaacaccctctggagaggccggatctgaggaggacgacgaagtggttgctatgatcaaagagctgctggatacccgtatcagacccaccgtacaagaagatggcggagacgtgatttacaaaggcttcgaagatggcattgtccagctgaagctgcaaggatcatgcacgtcttgccccagctctatcattactctcaagaatggaatccagaatatgctgcagttctatatcccagaggtggaaggagtggagcaggtaatggatgacgagtctgatgagaaagaggccaatagcccgtag

SEQ ID NO: 187886 - DNA, 1044 bp, Artificial Sequence
  derived and/or modified sequence
gttccccggcctctcttggtcagggtgacgcagtagcctgcaaacctcggcgcgtaggccaccgcacttatccgcagcaggaccgcccgcagccggtagggtgggctcttcccagtgcccgcccagctaccggccagcctgcggctgcgcagatctttcgtggttctgtcagggagacccttaggcactccggactaagatggcggcgacggccaggcggggctggggagctgcggctgttgccgccgggctgcgcaggcggtaggtgacgagcctggagctccgaataggtgtgccgctgggcttagccagcggagcggtcgccgccttgcagaccctctctcgaggcgggttctgtcatatgttgaagaatccatacaccattaagaaacagcctctgcatcagtttgtacaaagaccacttttcccactacctgcagccttttatcacccaggcagttatttaggattgaaggagtaaaaagtgtcttctttggaccagatttcatcactgtcacaaaggaaaatgaagaattagactggaatttactgaaaccagatatttatgcaacaatcatggacttctttgcatctggcttacccctggttactgaggaaacaccttcaggagaagcaggatctgaagaagatgatgaagttgtggcaatgattaaggaattgttagatactagaatacggccaactgtgcaggaagatggaggggatgtaatctacaaaggctttgaagatggcattgtacagctgaaactccagggttcttgtaccagctgccctagttcaatcattactctgaaaaatggaattcagaacatgctgcagttttatattccggaggtagaaggcgtagaacaggttatggatgatgaatcagatgaaaaagaagcaaactcaccttaaaataatctggattttctttgggcataacagtcagacttgttgataatatatatcaagtttttattattaatatgctgaggaacttgaagattaataaaatatgctcttcagagaatgatatataaa

SEQ ID NO: 187887 - DNA, 580 bp, Artificial Sequence
  derived and/or modified sequence
ggcgacggccaggcggggctggggagctgcggctgttgccgccgggctgcgcaggcggttctgtcatatgttgaagaatccatacaccattaagaaacagcctctgcatcagtttgtacaaagaccacttttcccactacctgcagccttttatcacccaggcagttatttaggattgaaggagtaaaaagtgtcttctttggaccagatttcatcactgtcacaaaggaaaatgaagaattagactggaatttactgaaaccagatatttatgcaacaatcatggacttctttgcatctggcttacccctggttactgaggaaacaccttcaggagaagcaggatctgaagaagatgatgaagttgtggcaatgattaaggaattgttagatactagaatacggccaactgtgcaggaagatggaggggatgtaatctacaaaggctttgaagatggcattgtacagctgaaactccagggttcttgtaccagctgccctagttcaatcattactctgaaaaatggaattcagaacatgctgcagttttatattccggaggtagaaggcgtagaacagg

SEQ ID NO: 187888 - DNA, 558 bp, Artificial Sequence
  derived and/or modified sequence
gctaatatatattctccagaagtggttgccattgcataggaaaatgaagaattagactggaatttactgaaaccagatatttatgcaacaatcatggacttctttgcatctggcttacccctggttactgaggaaacaccttcaggagaagcaggatctgaagaagatgatgaagttgtggcaatgattaaggaattgttagatactagaatacggccaactgtgcaggaagatggaggggatgtaatctacaaaggctttgaagatggcattgtacagctgaaactccagggttcttgtaccagctgccctagttcaatcattactctgaaaaatggaattcagaacatgctgcagttttatattccggaggtagaaggcgtagaacaggttatggatgatgaatcagatgaaaaagaagcaaactcaccttaaaataatctggattttctttgggcataacagtcagacttgttgataatatatatcaagtttttattattaatatgctgaggaacttgaagattaataaaatatgctcttcagagaatgatatat

SEQ ID NO: 187889 - DNA, 668 bp, Artificial Sequence
  derived and/or modified sequence
aagatggcggcgacggccaggcggggctggggagctgcggctgttgccgccgggctgcgcaggcggtaggtgacgagcctggagctccgaataggtgtgccgctgggcttagccagcggagcggtcgccgccttgcagaccctctctcgaggcgggttctgtcatatgttgaagaatccatacaccattaagaaacagcctctgcatcagtttgtacaaagaccacttttcccactacctgcagccttttatcacccaggcagttatttaggattgaaggagtaaaaagtgtcttctttggaccagatttcatcactgtcacaaaggaaaatgaagaattagactggaatttactgaaaccagatatttatgcaacaatcatggacttctttgcatctggcttacccctggttactgaggaaacaccttcaggagaagcaggatctgaagaagatgatgaagttgtggcaatgattaaggaattgttagatactagaatacggccaactgtgcaggaagatggaggggatgtaatctacaaaggctttgaagatggcattgtacagctgaaactccagggttcttgtaccagctgccctagttcaatcattactctgaaaaatggaattcagaacatgctgcagttttatattccggaggtagaaggc

SEQ ID NO: 187890 - DNA, 693 bp, Artificial Sequence
  derived and/or modified sequence
atgcttaagaacccatacaccatcaaaaaacagcctctccaccagtttgttcagcggccactgttccctctgcctgccgcattttaccatccggtgaggtatatgttcatccagacacaggatacccccaacccaaacagccttaagtttatacctggaaagcctgtgctagagactagaacgatggactttcccacccctgcggctgcgttcagaagccccctggcgcgtcagctcttccgaatagagggcgtgaaaagcgtgttttttggtcctgacttcataactgtaactaaagagaacgaagaacttgactggaatttgctcaagcccgatatctacgcaaccatcatggacttctttgcctccggactgccgttagttaccgaggagacgccaagcggtgaggcaggatcagaggaggacgatgaagtcgtggccatgatcaaagagcttctcgatacccggatccgcccaacagtgcaagaggatggtggcgacgtgatttacaaaggcttcgaagatggcattgtgcaactcaaactgcaaggctcttgcaccagctgtccaagctccatcataaccttgaaaaatgggattcagaatatgctgcagttctacattccagaagtggagggggtggaacaggtaatggacgatgagtctgatgaaaaggaggccaatagcccctag

SEQ ID NO: 187891 - DNA, 693 bp, Artificial Sequence
  derived and/or modified sequence
atgctgaagaacccctacaccatcaagaagcagcccctgcaccagttcgtgcagagacccctgttccccctgcccgccgccttctaccaccccgtgagatacatgttcatccagacccaggacacccccaaccccaacagcctgaagttcatccccggcaagcccgtgctggagaccagaaccatggacttccccacccccgccgccgccttcagaagccccctggccagacagctgttcagaatcgagggcgtgaagagcgtgttcttcggccccgacttcatcaccgtgaccaaggagaacgaggagctggactggaacctgctgaagcccgacatctacgccaccatcatggacttcttcgccagcggcctgcccctggtgaccgaggagacccccagcggcgaggccggcagcgaggaggacgacgaggtggtggccatgatcaaggagctgctggacaccagaatcagacccaccgtgcaggaggacggcggcgacgtgatctacaagggcttcgaggacggcatcgtgcagctgaagctgcagggcagctgcaccagctgccccagcagcatcatcaccctgaagaacggcatccagaacatgctgcagttctacatccccgaggtggagggcgtggagcaggtgatggacgacgagagcgacgagaaggaggccaacagcccctag

SEQ ID NO: 187892 - protein, 483 aa, Artificial Sequence
  derived and/or modified sequence
MEEGGGGVRSLVPGGPVLLVLCGLLEASGGGRALPQLSDDIPFRVNWPGTEFSLPTTGVLYKEDNYVIMTTAHKEKYKCILPLVTSGDEEEEKDYKGPNPRELLEPLFKQSSCSYRIESYWTYEVCHGKHIRQYHEEKETGQKINIHEYYLGNMLAKNLLFEKEREAEEKEKSNEIPTKNIEGQMTPYYPVGMGNGTPCSLKQNRPRSSTVMYICHPESKHEILSVAEVTTCEYEVVILTPLLCSHPKYRFRASPVNDIFCQSLPGSPFKPLTLRQLEQQEEILRVPFRRNKEEDLQSTKEERFPAIHKSIAIGSQPVLTVGTTHISKLTDDQLIKEFLSGSYCFRGGVGWWKYEFCYGKHVHQYHEDKDSGKTSVVVGTWNQEEHIEWAKKNTARAYHLQDDGTQTVRMVSHFYGNGDICDITDKPRQVTVKLKCKESDSPHAVTVYMLEPHSCQYILGVESPVICKILDTADENGLLSLPN

SEQ ID NO: 187893 - DNA, 1452 bp, Artificial Sequence
  derived and/or modified sequence
atggaagaggggggcggaggggtgagaagcctagtccctggggggcctgtactcctggtcttgtgtggcctcctcgaagcaagtggcggtggaagggccctgccccagctgtcagacgacatcccttttcgggtgaattggccaggaacggaattcagcctgcctaccacgggggtgctgtataaggaagacaattatgttatcatgaccaccgcacataaagaaaaatataagtgtattttgcccttggtgacttcaggggatgaagaggaggagaaagattacaaaggcccaaacccacgggagctcctggaacccctgtttaagcagagctcgtgctcttaccgaattgaatcttactggacatacgaggtatgccacggaaagcacatacggcagtatcacgaggagaaggagaccggacagaagattaatattcacgagtactacctcggcaacatgttggcgaagaatctcctgtttgaaaaggagagagaggctgaggaaaaggagaaatcaaatgagatcccgacaaaaaatatcgaggggcagatgacgccctattatcccgtaggcatgggaaatggaacaccctgcagtctgaagcagaataggccacgctccagcacagttatgtatatttgtcaccctgaaagcaagcatgagatactatccgtggcagaggtcaccacatgtgagtatgaggtcgttatcctgacacctctgctttgctctcaccccaaataccgcttcagggcaagcccagtaaacgatattttctgccaatcacttccaggttctccctttaaacccttgacactcagacagctagaacaacaggaggagattttgagggtccctttcagaaggaacaaagaggaggatctccagagtacaaaggaggaaaggttccctgcaatccacaagtccattgcgatcgggtctcagccggttctaactgtcggtaccacacacatctccaaactgaccgatgatcagctcatcaaggaattcctgtccggttcatactgctttcgggggggggtcggatggtggaagtacgaattctgttacggcaaacacgttcatcagtatcatgaggataaagacagtgggaagacatcggtggtggtggggacctggaaccaagaggagcacatcgaatgggctaagaagaacacggctagagcctaccacctccaagatgacggaacacagaccgtgcggatggtgagccacttctatggcaacggcgatatctgtgacattactgataagcctaggcaagttaccgtgaagctcaagtgtaaggagtccgattcaccgcacgccgtgaccgtttacatgctcgaaccccactcttgccagtatattctgggcgtcgaaagccctgttatttgcaagatactggataccgccgatgagaacggtctgctctctctgccaaattag

SEQ ID NO: 187894 - DNA, 1452 bp, Artificial Sequence
  derived and/or modified sequence
atggaggagggcggcggcggcgtgcgcagcctggtgcctgggggccctgtgctgctggtgctgtgtggcctgctggaggccagcggcggcggccgggccctgccccagctgagtgatgacatccccttccgggtgaactggccaggcacagagttcagcctgcccaccactggagtgctgtacaaggaggacaactacgtgatcatgaccacagcccacaaggagaagtacaagtgcatcctgcccctggtgaccagcggagatgaggaggaggagaaggactacaagggccccaacccccgggagctgctggagcccctcttcaagcagagcagctgcagctacagaattgagagctactggacctatgaggtgtgccacggcaagcacatccggcagtaccacgaggagaaggagaccggccagaagatcaacatccacgagtactacctgggcaacatgctggccaagaacctgctgtttgagaaggagcgggaggccgaggagaaggagaagagcaatgagatccccaccaagaacatcgagggccagatgaccccctactaccctgtgggcatgggaaatggcaccccctgcagcctgaagcagaaccggcccaggagcagcacagtgatgtacatctgccaccctgagagcaagcatgagatcctgtctgtggccgaggtgaccacctgtgaatatgaggtggtgatcctgacccccctgctgtgcagccaccccaagtaccgcttccgggccagccctgtgaatgacatcttctgccagagcctgcccggcagccccttcaagcccctgaccctgcggcagctggagcagcaggaggagatcctgcgggtgcccttcagaagaaacaaggaggaggacctgcagagcaccaaggaggagcgcttccctgccatccacaagagcatcgccatcggcagccagcctgtgctgactgtgggcaccacccacatcagcaagctgacagatgaccagctgatcaaggagttcctgagcggcagctactgcttccggggcggcgtgggctggtggaagtatgagttctgctacggcaagcacgtgcaccagtaccacgaggacaaggacagcggcaagacctctgtggtggtgggcacctggaaccaggaggagcacatcgagtgggccaagaagaacacagcccgggcctaccacctgcaggatgatggcacccagacagtgaggatggtgagccacttctatggaaatggagacatctgtgacatcacagacaagccccggcaggtgacagtgaagctgaagtgcaaggagagtgacagcccccatgctgtgacagtgtacatgctggagccccacagctgccagtacatcctgggcgtggagagccctgtgatctgcaagatcctggacacagcagatgaaaatggcctgctgagcctgcccaactag

SEQ ID NO: 187895 - DNA, 1452 bp, Artificial Sequence
  derived and/or modified sequence
atggaggagggcggcggcggcgtgcggagcctggtgcccggcggcccagtccttttagtgctgtgtgggctgctcgaagcttccggtggcggaagagcccttcctcaactgtcagatgatataccattcagggtgaactggcctgggactgaattctcattgcctacaacaggggttctctacaaggaagataattatgtaattatgaccaccgcccacaaagagaagtacaagtgcatcttgcctctggttaccagcggtgatgaggaggaggagaaggattataagggccctaaccccagggagctcctcgagcccctcttcaagcagtcatcctgttcctaccgcattgagtcctattggacttacgaagtgtgccacgggaaacatatccgccagtatcatgaggagaaggagacaggtcagaaaataaacatccacgaatactacctgggtaatatgcttgcaaagaatttgctgtttgaaaaggaaagggaagccgaggaaaaagagaagagcaatgagatacccacaaaaaacattgaaggtcagatgacgccttattaccccgtgggtatggggaatggcaccccctgtagcttgaaacaaaaccgacctcgctcgtcaacagtgatgtatatctgtcatcccgaatccaagcacgaaattctgtcagtggctgaagtcacgacatgtgagtacgaggtggttatcctgacaccactgctgtgctcccatcctaaatatcgcttcagagcctccccagtcaacgatatattctgtcagagtctgccgggctccccttttaagcccctgaccttgcgccagttggaacagcaagaagaaattctccgcgtgccgttccgtagaaacaaagaggaggatttgcagtccacaaaggaggaacggttcccagctattcacaaatccatcgcaatcggcagccagccggtattgacagtagggaccacccatatctctaaacttacggacgatcagctgattaaagaatttctcagcggatcatattgcttccgtggtggagtgggatggtggaaatacgaattttgttacggaaaacacgtgcaccaataccatgaagataaggattcaggaaagaccagtgtcgtcgttgggacttggaatcaagaagagcatatagaatgggctaaaaaaaacactgcacgggcgtaccacttacaggatgatggaacccagacggtgaggatggtctcgcacttttacggtaacggagatatttgcgacataaccgataagcctcgccaggtgactgtcaagctcaaatgcaaggagtccgattcacctcatgccgtgactgtgtatatgctggaaccccatagctgccagtacattttgggcgtcgaaagccctgtgatttgcaagattctggacaccgccgacgagaacggattactctccctgccaaactag

SEQ ID NO: 187896 - DNA, 1452 bp, Artificial Sequence
  derived and/or modified sequence
atggaggaaggtgggggaggcgtgagaagcctcgtccccggaggtccagttttactagttctgtgcggccttctggaggccagcggcggaggacgggctttgcctcagctgagcgacgacattcctttccgcgtaaattggccgggaacggagttctccctgcccactacaggagttttatacaaagaggacaattacgtgattatgacaacagcccacaaggaaaagtataagtgtattctcccgctcgtcacaagcggggatgaggaagaggagaaggactataagggaccaaatccgcgtgaactactggaaccgcttttcaagcaatcttcatgctcctatagaattgagtcatactggacgtatgaggtgtgccatggcaagcacatccgtcaataccatgaggagaaggagactggccaaaagatcaacatacacgagtattacttgggaaatatgttagcgaaaaacctgctatttgagaaggagagagaggccgaggagaaagaaaagtctaatgaaattccaaccaagaacatagagggacagatgacaccatactatcccgttggcatgggtaacggaactccttgtagcttaaaacaaaataggccacggtcttccacagtaatgtacatctgccatccggagagcaagcacgaaatcctatccgttgctgaagtgacaacatgtgaatacgaggtcgtgatcctcactcctctcttgtgcagtcacccaaaataccgctttagagcttcaccagtcaacgatattttctgtcagagcttacccggaagccctttcaaacctctcacactgagacagctcgagcagcaggaggagatcttaagagtgccttttaggcgaaacaaagaagaggacctccaaagcacgaaagaagaaaggtttcccgcaatccacaagagtatcgctattggtagccagccggtcctcaccgtcggaaccacccatattagtaaactgaccgacgatcagttgattaaggaatttttatccggcagctactgctttcgcggaggcgtgggatggtggaagtacgagttttgttatggtaagcacgtgcatcagtatcacgaggacaaggatagcgggaagacctcggtcgtagtgggtacttggaatcaggaggaacatatagagtgggcaaaaaagaacaccgctagggcctatcacctgcaagatgacgggacccaaacagtccggatggtgagccatttttacgggaatggtgacatctgtgatataacagacaagcctcgccaggtcacggtcaaactaaaatgcaaggagagtgatagtccccacgcagttacagtctacatgctggagccccacagctgtcagtatattctcggagtagagtccccagtgatttgtaaaatactggataccgcagacgaaaatggcctgctgagcctgcctaattag

SEQ ID NO: 187897 - DNA, 1452 bp, Artificial Sequence
  derived and/or modified sequence
atggaggagggcggcggcggcgtgagaagcctggtgcccggcggccccgtgctgctggtgctgtgcggcctgctggaggccagcggcggcggcagagccctgccccagctgagcgacgacatccccttcagagtgaactggcccggcaccgagttcagcctgcccaccaccggcgtgctgtacaaggaggacaactacgtgatcatgaccaccgcccacaaggagaagtacaagtgcatcctgcccctggtgaccagcggcgacgaggaggaggagaaggactacaagggccccaaccccagagagctgctggagcccctgttcaagcagagcagctgcagctacagaatcgagagctactggacctacgaggtgtgccacggcaagcacatcagacagtaccacgaggagaaggagaccggccagaagatcaacatccacgagtactacctgggcaacatgctggccaagaacctgctgttcgagaaggagagagaggccgaggagaaggagaagagcaacgagatccccaccaagaacatcgagggccagatgaccccctactaccccgtgggcatgggcaacggcaccccctgcagcctgaagcagaacagacccagaagcagcaccgtgatgtacatctgccaccccgagagcaagcacgagatcctgagcgtggccgaggtgaccacctgcgagtacgaggtggtgatcctgacccccctgctgtgcagccaccccaagtacagattcagagccagccccgtgaacgacatcttctgccagagcctgcccggcagccccttcaagcccctgaccctgagacagctggagcagcaggaggagatcctgagagtgcccttcagaagaaacaaggaggaggacctgcagagcaccaaggaggagagattccccgccatccacaagagcatcgccatcggcagccagcccgtgctgaccgtgggcaccacccacatcagcaagctgaccgacgaccagctgatcaaggagttcctgagcggcagctactgcttcagaggcggcgtgggctggtggaagtacgagttctgctacggcaagcacgtgcaccagtaccacgaggacaaggacagcggcaagaccagcgtggtggtgggcacctggaaccaggaggagcacatcgagtgggccaagaagaacaccgccagagcctaccacctgcaggacgacggcacccagaccgtgagaatggtgagccacttctacggcaacggcgacatctgcgacatcaccgacaagcccagacaggtgaccgtgaagctgaagtgcaaggagagcgacagcccccacgccgtgaccgtgtacatgctggagccccacagctgccagtacatcctgggcgtggagagccccgtgatctgcaagatcctggacaccgccgacgagaacggcctgctgagcctgcccaactag

SEQ ID NO: 187898 - DNA, 2433 bp, Artificial Sequence
  derived and/or modified sequence
ggcggcggttgggccggtgatacccgggcgctttatagtcccgccgcctcctcctccacctcctcctcctcctcctctcctcctggagcagaggaggttgtggcggtggctggagaaagcggcggcggaggatggaggaaggaggcggcggcgtacggagtctggtcccgggcgggccggtgttactggtcctctgcggcctcctggaggcgtccggcggcggccgagcccttcctcaactcagcgatgacatccctttccgagtcaactggcccggcaccgagttctctctgcccacaactggagttttatataaagaagataattatgtcatcatgacaactgcacataaagaaaaatataaatgcatacttccccttgtgacaagtggggatgaggaagaagaaaaggattataaaggccctaatccaagagagcttttggagccactatttaaacaaagcagttgttcctacagaattgagtcttattggacttacgaagtatgtcatggaaaacacattcggcagtaccatgaagagaaagaaactggtcagaaaataaatattcacgagtactaccttgggaatatgttggccaagaaccttctatttgaaaaagaacgagaagcagaagaaaaggaaaaatcaaatgagattcccactaaaaatatcgaaggtcagatgacaccatactatcctgtgggaatgggaaatggtacaccttgtagtttgaaacagaaccggcccagatcaagtactgtgatgtacatatgtcatcctgaatctaagcatgaaattctttcagtagctgaagttacaacttgtgaatatgaagttgtcattttgacaccactcttgtgcagtcatcctaaatataggttcagagcatctcctgtgaatgacatattttgtcaatcactgccaggatctccatttaagcccctcaccctgaggcagctggagcagcaggaagaaatactaagggtgccttttaggagaaataaagaggaagatttgcaatcaactaaagaagagagatttccagcgatccacaagtcgattgctattggctctcagccagtgctcactgttgggacaacccacatatccaaattgacagatgaccaactcataaaagagtttcttagtggttcttactgctttcgtgggggtgtcggttggtggaaatatgaattctgctatggcaaacatgtacatcaataccatgaggacaaggatagtgggaaaacctctgtggttgtcgggacatggaaccaagaagagcatattgaatgggctaagaagaatactgctagagcttatcatcttcaagacgatggtacccagacagtcaggatggtgtcacatttttatggaaatggagatatttgtgatataactgacaaaccaagacaggtgactgtaaaactaaagtgcaaagaatcagattcacctcatgctgttactgtatatatgctagagcctcactcctgtcaatatattcttggggttgaatctccagtgatctgtaaaatcttagatacagcagatgaaaatggacttctttctctccccaactaaaggatattaaagttaggggaaagaaaagatcattgaaagtcatgataatttctgtcccactgtgtctcattatagagttctcagccattggacctcttctaaaggatggtataaaatgactctcaaccactttgtgaatacatatgtgtatataagaggttattgataaacttctgaggcagacatttgtctcgctttttttcatttttgttgtgtcttataaactgactgtttttctttgcttggatactgtgattccaaaataaatctcatccaagcaagttagagtccagcctaatcaaatgtcataattgttgtacctattgaaagtttttaaataatagatttattatgtaaattatagtatatgtaagtagctaatgaagtaaagatcatgaagaaagaaattgataggtgtaaatgagagaccatgtaaaatatgtaaattctagtacctgaaatcctttcaacagatttttatatagcaactgctctctgcaagtagttaaactagaaactgggcacatggtagaggctcacatgggagttgtcctcacccttgttaatctcaagaaactcttatttataataggttgcttctctctcagaacttttatctattacttttttcttcttatgagtatgtttactctcagagtatctatctgatgtagacagttggtgatgcttctgagactcagaatggtttactctaacaaaacactgtgctgtctatcccttgtacttgcctactgtaatatggatttcacttctgaacagtttacagcacaatatttattttaaagtgaataaaatgtccacaagcagtgttgtcatgtagtcaatggca

SEQ ID NO: 187899 - protein, 296 aa, Artificial Sequence
  derived and/or modified sequence
MANVLCNRARLVSYLPGFCSLVKRVVNPKAFSTAGSSGSDESHVAAAPPDICSRTVWPDETMGPFGPQDQRFQLPGNIGFDCHLNGTASQKKSLVHKTLPDVLAEPLSSERHEFVMAQYVNEFQGNDAPVEQEINSAETYFESARVECAIQTCPELLRKDFESLFPEVANGKLMILTVTQKTKNDMTVWSEEVEIEREVLLEKFINGAKEICYALRAEGYWADFIDPSSGLAFFGPYTNNTLFETDERYRHLGFSVDDLGCCKVIRHSLWGTHVVVGSIFTNATPDSHIMKKLSGN

SEQ ID NO: 187900 - DNA, 891 bp, Artificial Sequence
  derived and/or modified sequence
atggctaatgtgctgtgtaatagagcccgactggtgtcttatcttcccggattctgtagcttagtgaagcgcgtcgtgaatcctaaagctttctcgacagctggatccagcggcagcgacgaatcccacgtggctgctgcacctccggatatctgcagcaggacggtttggcccgacgagaccatgggacccttcggccctcaggaccagcgctttcagctgccaggaaatatcggctttgactgccacttgaacggcaccgcaagtcagaaaaaatccctcgtgcacaagaccctgcccgacgtgctcgccgagccattgtcttctgaaagacacgagtttgtgatggctcagtacgtcaacgagtttcaggggaatgacgccccagtggaacaggaaattaattctgcggagacatatttcgagagcgctagggtggagtgtgccattcagacttgcccggagctactgaggaaggacttcgagtcactttttcccgaagtcgcaaacggaaagctgatgattctaaccgtgacccaaaagaccaagaatgacatgacagtgtggtccgaagaggtcgagattgagagagaagtgctgttggagaagtttattaacggagcaaaagagatatgttatgcactgagagccgaaggttactgggccgatttcattgacccctcctccggcctcgctttcttcggcccttacacgaacaacacattgttcgaaaccgatgaaagatacagacacttaggattctctgtggatgacctgggatgctgcaaagtgatcaggcacagcctgtggggcacccacgttgtcgtgggctccatttttacaaacgccacccctgattcacacattatgaaaaagttgagcggcaactag

SEQ ID NO: 187901 - DNA, 891 bp, Artificial Sequence
  derived and/or modified sequence
atggccaatgtactctgcaacagggccagacttgtttcatatctgccagggttctgtagtcttgtgaagcgtgttgtcaacccaaaggctttctccacggccggatcttcgggcagcgacgagagccatgtggctgccgccccgccagacatctgctcacggaccgtatggccggatgagactatgggtccatttggaccccaggaccagcgctttcagcttcccgggaatatcgggttcgactgccacctgaacggaaccgcatcccagaagaagtctctcgtccataagacacttccagacgtgctggcagagccgctctctagcgaaagacatgagtttgtaatggcccagtacgtcaacgagttccaaggaaatgatgcgccagtcgagcaggagatcaactccgctgagacctactttgaaagcgccagggtcgaatgtgctattcaaacatgtccagaattacttagaaaggacttcgagtcgctgtttccagaagtggcaaatggtaaactaatgattctgacagtcacgcagaagacgaagaacgacatgacagtttggagcgaggaggtggagatcgagcgtgaggtcctgttagagaagttcatcaacggagcgaaagagatctgctatgcgctccgggccgaggggtattgggccgacttcatcgacccaagtagcggccttgctttctttggcccctataccaataacaccctgtttgaaactgatgagcgctatagacatctcggctttagtgtcgacgacctgggctgttgcaaggttatcaggcattctctatgggggacacatgtcgtagttggaagtatctttactaatgccacccctgacagccatatcatgaaaaaactatccgggaactag

SEQ ID NO: 187902 - DNA, 891 bp, Artificial Sequence
  derived and/or modified sequence
atggccaacgtgctgtgcaacagagcccggctggtgtcctacctgcccggcttctgcagcctggtgaagagggtggtgaaccccaaggccttcagcacagctggcagcagcggcagtgatgagagccacgtggccgccgcccccccagacatctgcagcaggacagtgtggccagatgagaccatgggccccttcggcccccaggaccagcgcttccagctgcccggcaacatcggctttgactgccacctgaatggaacagccagccagaagaagagcctggtgcacaagaccctgcctgatgtgctggccgagcccctgagcagcgagagacatgaatttgtgatggcccagtatgtgaatgagttccagggcaatgatgcccctgtggagcaggagatcaacagcgctgagacctactttgaaagtgcccgggtggagtgtgccatccagacctgcccagagctgctgaggaaggactttgagagcctcttccctgaggtggccaacgggaagctgatgatcctgactgtgacccagaagaccaagaatgacatgacagtgtggagcgaggaggtggagattgagcgggaggtgctgctggagaagttcatcaacggggccaaggagatctgctacgccctgcgggcagagggctactgggccgacttcatcgaccccagcagcggcctggccttcttcggcccctacaccaacaacaccctgtttgaaacagatgagcgctaccgccacctgggcttctctgtggatgacctgggctgctgcaaggtgatccgccacagcctgtggggcacccacgtggtggtgggcagcatcttcaccaatgccaccccagacagccacatcatgaagaagctgagcggcaactag

SEQ ID NO: 187903 - DNA, 1436 bp, Artificial Sequence
  derived and/or modified sequence
gcgcgtgcgcatcatcgtttcgacgcgctcggaagcaacttcctttgcctgctcaccgccagcgtaggtgctaccaccgctgccgtcgccgccgccattttgatggcaggaagagtccggttctgggacagctggagacagtggtggtgactgaaataactttaccaaaggaaagctattttgcgaactatcttctccagcggagatggccaatgtgctttgtaacagagccagactggtttcctatctcccaggattttgctctttagttaaaagggttgtcaatcccaaagccttttcgactgcaggatcatcaggttcggatgagtctcatgtggctgctgcacctccagatatatgctctcgaacagtgtggcctgatgaaactatgggaccctttggacctcaagatcagaggttccagcttcctgggaacataggttttgattgtcacctcaatgggactgcttcacagaagaaaagcctggttcataaaactttgcctgatgttctagcagaacctttatcaagtgaaagacatgagtttgtgatggcacaatatgtgaatgaatttcagggtaatgatgcacctgttgaacaagaaattaacagtgcagaaacttactttgaaagtgccagagtagagtgtgcaatacagacatgtccagaattgctgcgaaaagattttgaatcactgtttccagaagtagctaatggcaaactaatgattctgactgtaacacaaaaaactaagaatgatatgactgtttggagtgaagaagtagaaattgaaagagaagtgctcttagaaaagttcatcaatggtgctaaggaaatttgctatgctcttcgagctgagggttattgggctgactttattgacccatcatctggtttggcattttttggaccatatacaaacaacactctttttgaaactgatgaacgctaccgacatttaggattctctgttgatgaccttggatgctgtaaagtgattcgtcatagtctctggggtacccatgtagttgtagggagtatcttcactaatgcaacaccagacagccatattatgaagaaattaagtggaaattagcagaaatatccattcatttgctgtactatttgtatgtaatatttgggttgatctataaacactgtcagactaaagtttttaaaatatatttatttctaagtatttatttcagcatttatgaatttacaacattggcaagtgatttgggattttaaaattgcaaatgttcatttattcatatcattgaatacacgttgaacacatccacattgtataggatgtggtaattagcttgtaaccagggtatgatctgctattgttatttctcctctttattggaaaaaggcctcagttttaattattttcttcccaaaataaatcacacatttggttacaataa

SEQ ID NO: 187904 - DNA, 1726 bp, Artificial Sequence
  derived and/or modified sequence
tcggtattgcccgtattttcactgggtccctgtcgttgtccccagccatcctgtccgtctgtctttagtctcttttctgcttcctcatctttccgatcagcctgaagctttgcttggagctgttgttacgcagccccaacttctgttaaagcagccgcttcgatcctctggactgaattttggccacccagcccccattcccctcccggatctggtccgagttgtttttccgcggctgtaaaccggaagggctctgagctgcactgccggctccgggctgggggatctgtgcctggcatgggggcgagttctggcctccttagggtacggggagagcttggactttggtcctgacgtggtggacgacacaccttcgaagagtggacgttacctcagttgtctgttgttagagtttaatcgatcactcgtctgttttgttgtgttctttcccagaaataactttaccaaaggaaagctattttgcgaactatcttctccagcggagatggccaatgtgctttgtaacagagccagactggtttcctatctcccaggattttgctctttagttaaaagggttgtcaatcccaaagccttttcgactgcaggatcatcaggttcggatgagtctcatgtggctgctgcacctccagatatatgctctcgaacagtgtggcctgatgaaactatgggaccctttggacctcaagatcagaggttccagcttcctgggaacataggttttgattgtcacctcaatgggactgcttcacagaagaaaagcctggttcataaaactttgcctgatgttctagcagaacctttatcaagtgaaagacatgagtttgtgatggcacaatatgtgaatgaatttcagggtaatgatgcacctgttgaacaagaaattaacagtgcagaaacttactttgaaagtgccagagtagagtgtgcaatacagacatgtccagaattgctgcgaaaagattttgaatcactgtttccagaagtagctaatggcaaactaatgattctgactgtaacacaaaaaactaagaatgatatgactgtttggagtgaagaagtagaaattgaaagagaagtgctcttagaaaagttcatcaatggtgctaaggaaatttgctatgctcttcgagctgagggttattgggctgactttattgacccatcatctggtttggcattttttggaccatatacaaacaacactctttttgaaactgatgaacgctaccgacatttaggattctctgttgatgaccttggatgctgtaaagtgattcgtcatagtctctggggtacccatgtagttgtagggagtatcttcactaatgcaacaccagacagccatattatgaagaaattaagtggaaattagcagaaatatccattcatttgctgtactatttgtatgtaatatttgggttgatctataaacactgtcagactaaagtttttaaaatatatttatttctaagtatttatttcagcatttatgaatttacaacattggcaagtgatttgggattttaaaattgcaaatgttcatttattcatatcattgaatacacgttgaacacatccacattgtataggatgtggtaattagcttgtaaccagggtatgatctgctattgttatttctcctctttattggaaaaaggcctcagttttaattattttcttcccaaaataaatcacacatttg

SEQ ID NO: 187905 - DNA, 891 bp, Artificial Sequence
  derived and/or modified sequence
atggccaacgtgctgtgcaaccgggcccggctggtgagctacctgcccggcttttgttccctcgtgaagcgggtggtgaacccgaaagccttttcgactgcgggaagttcaggctccgacgaatcacacgtggccgctgcaccaccagatatttgctccagaaccgtttggcccgacgaaacaatgggtccgtttgggccgcaggaccagcgcttccaactcccaggcaacatcggattcgactgccacctgaatggaacggctagtcagaaaaagagtctcgtccacaaaactctccctgatgtgttagccgagcctctgtcctcggagcggcacgaatttgtaatggcccaatacgtcaacgagtttcagggcaacgacgcccccgtggagcaagagatcaactcagccgagacctattttgagagtgctcgcgtagaatgcgccatccagacatgcccggagctcctgcgcaaggacttcgaatccttattccctgaggtggcaaacggtaaactcatgatcctgacagtcacccagaaaacgaaaaacgatatgaccgtatggtctgaggaggtggaaattgagcgtgaggtgctgctcgagaagtttattaacggcgccaaagagatttgctacgctctgcgagccgagggatactgggctgactttattgacccttcaagcggactcgcctttttcggcccctatactaacaataccctctttgagactgatgaaaggtatcgccacctgggctttagtgtggatgatctcggctgctgcaaagtgatcaggcactcgctatggggcacacacgtggtggtgggctccatcttcacaaatgccactcccgacagccacatcatgaagaagctgagcggaaattag

SEQ ID NO: 187906 - DNA, 891 bp, Artificial Sequence
  derived and/or modified sequence
atggccaacgtgctgtgcaaccgggcccggctggtgagctacctgccaggtttttgctccctagttaagcgggttgtgaatcccaaggcattcagtaccgcgggatcatccggctcagacgagtcccacgtcgctgctgcccctcctgacatctgctcacgcaccgtgtggccagatgagaccatgggaccattcggaccgcaggaccagaggttccaactgcctggcaatataggtttcgattgccacctaaacgggactgctagccagaagaagagtctggtgcacaagactctgccggacgttctagcagaacccctctcttctgagcggcacgaatttgtgatggcccagtatgtgaacgaattccagggcaacgacgctccagttgagcaggagataaatagcgcagagacatacttcgagtccgcacgggtcgagtgcgccattcagacctgtcctgaactgcttcgaaaggatttcgagtctctgttccctgaagtggcgaatggaaaactgatgatcttaacagtaactcagaagaccaagaatgacatgaccgtttggtccgaggaggttgaaatcgaacgggaggtgttgctggagaagtttatcaatggtgctaaagagatttgttatgccctgagggcagagggatattgggcggacttcattgacccatcctcaggcctcgcattcttcgggccgtacacaaataatacactgtttgaaacagatgagcgatataggcatctgggcttcagcgtggacgacctgggctgttgtaaggtgatccgccactcactgtggggtacacatgttgtggtgggttctattttcacaaacgcgacacccgacagccacattatgaagaagttatcaggcaactag

SEQ ID NO: 187907 - DNA, 891 bp, Artificial Sequence
  derived and/or modified sequence
atggccaatgtgctgtgtaaccgcgctaggctcgtgagttatctgcccggtttctgctccttggttaaacgcgttgtaaatcctaaagcattctccacagccggaagtagcggcagcgatgaaagccatgtcgccgcagcgcctccagatatttgttcccgcactgtgtggccagatgagaccatgggcccttttggaccccaggatcaacggtttcaattgcccggtaacattggatttgattgtcatcttaacggtacagcatcacagaaaaagagcctcgtgcacaagactctgcctgacgtgctcgctgagccactttctagcgaacggcacgagttcgtgatggcacagtatgtgaatgaattccaaggcaatgatgcacccgtggagcaggagataaattcagctgagacctacttcgagagcgcgagggtggaatgtgcgattcagacctgcccagaactccttcgtaaagactttgaaagcctcttcccagaggtggccaatggtaagttgatgattttaacggtgacgcagaaaacaaaaaacgacatgaccgtgtggtccgaggaggtggagattgaacgtgaggtactcttggagaagtttattaatggggctaaagagatctgctatgcccttcgtgccgaaggatattgggcagacttcatcgacccgagcagtggactcgcctttttcggcccatacacgaataacacactctttgaaaccgatgaaaggtacagacacctcggcttttccgtagacgacctcggatgctgtaaagtgataaggcactcactttggggcacacacgtggttgttggatccatttttaccaatgctactcctgattcccacatcatgaaaaagctgagtggcaattag

SEQ ID NO: 187908 - DNA, 891 bp, Artificial Sequence
  derived and/or modified sequence
atggctaatgtgctctgtaatcgggcacggctggtcagctatctgcctggcttctgttccctggtcaaacgggtcgtgaaccctaaggctttctccaccgccggaagttctggttccgatgaatctcacgtggcggcagctccacctgatatctgctcccggacggtttggccagatgagacgatgggtccatttggtccacaggaccagagattccagttgcctgggaacatcggattcgactgccatctgaatggaacggcatcccaaaaaaaatcacttgttcacaaaacactgcccgacgtccttgccgaaccactgtcatctgagcgccatgagtttgtgatggctcagtacgtgaatgaattccagggcaatgacgctccagtggaacaggaaattaactcagctgagacatactttgagagcgcgagagtcgagtgcgcaatacagacttgtccagaactacttcggaaggatttcgagtcactgttccctgaggtcgcaaacggcaagctgatgatcctgacagtcacccagaaaaccaagaatgacatgactgtgtggtcggaggaggttgagattgagagagaggtactgctggaaaaatttattaacggggcaaaagaaatctgttatgcgctcagagctgagggctactgggctgactttatagatcccagctctggactggccttcttcgggccatatacaaacaacacgctgttcgagactgacgagcgttataggcatctgggattttccgtggacgacctgggatgctgtaaggttattcgccactctctgtggggcacacacgtcgttgttggaagtatctttacgaacgctactccggattcacacattatgaagaagctgtcgggcaattag

SEQ ID NO: 187909 - DNA, 891 bp, Artificial Sequence
  derived and/or modified sequence
atggccaacgtgctgtgcaacagagccagactggtgagctacctgcccggcttctgcagcctggtgaagagagtggtgaaccccaaggccttcagcaccgccggcagcagcggcagcgacgagagccacgtggccgccgccccccccgacatctgcagcagaaccgtgtggcccgacgagaccatgggccccttcggcccccaggaccagagattccagctgcccggcaacatcggcttcgactgccacctgaacggcaccgccagccagaagaagagcctggtgcacaagaccctgcccgacgtgctggccgagcccctgagcagcgagagacacgagttcgtgatggcccagtacgtgaacgagttccagggcaacgacgcccccgtggagcaggagatcaacagcgccgagacctacttcgagagcgccagagtggagtgcgccatccagacctgccccgagctgctgagaaaggacttcgagagcctgttccccgaggtggccaacggcaagctgatgatcctgaccgtgacccagaagaccaagaacgacatgaccgtgtggagcgaggaggtggagatcgagagagaggtgctgctggagaagttcatcaacggcgccaaggagatctgctacgccctgagagccgagggctactgggccgacttcatcgaccccagcagcggcctggccttcttcggcccctacaccaacaacaccctgttcgagaccgacgagagatacagacacctgggcttcagcgtggacgacctgggctgctgcaaggtgatcagacacagcctgtggggcacccacgtggtggtgggcagcatcttcaccaacgccacccccgacagccacatcatgaagaagctgagcggcaactag

SEQ ID NO: 187910 - protein, 749 aa, Artificial Sequence
  derived and/or modified sequence
MSGSHTPACGPFSALTPSIWPQEILAKYTQKEESAEQPEFYYDEFGFRVYKEEGDEPGSSLLANSPLMEDAPQRLRWQAHLEFTHNHDVGDLTWDKIAVSLPRSEKLRSLVLAGIPHGMRPQLWMRLSGALQKKRNSELSYREIVKNSSNDETIAAKQIEKDLLRTMPSNACFASMGSIGVPRLRRVLRALAWLYPEIGYCQGTGMVAACLLLFLEEEDAFWMMSAIIEDLLPASYFSTTLLGVQTDQRVLRHLIVQYLPRLDKLLQEHDIELSLITLHWFLTAFASVVDIKLLLRIWDLFFYEGSRVLFQLTLGMLHLKEEELIQSENSASIFNTLSDIPSQMEDAELLLGVAMRLAGSLTDVAVETQRRKHLAYLIADQGQLLGAGTLTNLSQVVRRRTQRRKSTITALLFGEDDLEALKAKNIKQTELVADLREAILRVARHFQCTDPKNCSVELTPDYSMESHQRDHENYVACSRSHRRRAKALLDFERHDDDELGFRKNDIITIVSQKDEHCWVGELNGLRGWFPAKFVEVLDERSKEYSIAGDDSVTEGVTDLVRGTLCPALKALFEHGLKKPSLLGGACHPWLFIEEAAGREVERDFASVYSRLVLCKTFRLDEDGKVLTPEELLYRAVQSVNVTHDAVHAQMDVKLRSLICVGLNEQVLHLWLEVLCSSLPTVEKWYQPWSFLRSPGWVQIKCELRVLCCFAFSLSQDWELPAKREAQQPLKEGVRDMLVKHHLFSWDVDG

SEQ ID NO: 187911 - DNA, 2250 bp, Artificial Sequence
  derived and/or modified sequence
atgtccggatcccacacgcctgcctgtggcccattctccgcgctgacgccgagtatttggccccaggagatccttgccaagtacacacaaaaggaagaatccgccgagcaacctgaattttactatgacgagtttggatttagagtctacaaagaggagggagacgagccgggttcaagcctcctggccaactcgccactgatggaagacgcgccacaacggctacgttggcaagcccacctcgaattcactcacaaccacgatgtcggcgatctcacgtgggacaaaattgccgtgagccttcctcgcagtgagaaactgaggtcccttgtgttggccggaatccctcatggcatgcggccccagttatggatgaggctgtccggagccctgcagaaaaagcgaaactccgagctctcttaccgggagatcgtcaagaactccagcaatgacgagactatagcagccaagcagatagaaaaggacctcctaagaaccatgccaagcaatgcctgctttgccagtatggggagcatcggagtgcctcggctgcgccgggtgttgcgcgccctcgcctggttgtatcccgagattggctactgtcaaggaacaggcatggtcgcagcatgccttctgctgtttctggaggaggaggacgcattctggatgatgtcagccattatagaagaccttttgccggcatcctacttcagcactaccttgctgggtgttcagaccgaccagcgggtattgagacacctgatagttcagtatcttccacggctcgataagctcttgcaggaacatgacattgaattatcactgattaccctccactggttcctcaccgccttcgcctctgtcgttgatatcaagctattattgaggatatgggatctgtttttttatgagggtagccgagtccttttccagcttaccttgggtatgttgcacctcaaggaggaggagttgatccagtccgaaaatagcgctagtatctttaatacactgtccgatataccatctcagatggaagatgctgagctactgctgggtgtcgcgatgagactcgctggatccctcacagatgttgcagtagagacacagcggaggaaacatctcgcatatctcatcgccgaccagggacagctgctgggggccgggaccctcaccaacctgtctcaagtcgtacggaggcgaactcagagaagaaaatctaccattaccgccctgctcttcggagaggacgatctggaggccctcaaggctaaaaacattaaacagacagagctggtggccgacttacgtgaggccatattaagagtggccagacatttccagtgcacagatccgaaaaattgttccgttgaattaacaccagactattctatggagtcacaccaaagggatcacgagaactacgtcgcctgcagtagatcacaccgccggcgagcaaaggcgttattggactttgaacggcatgatgatgatgagctgggcttccgaaagaatgatattattaccatagtctcccagaaggatgagcattgctgggtgggggaactgaacggactccgtggctggtttccggctaagtttgtcgaggttctcgatgagcgcagcaaggagtatagtatcgccggagacgatagtgtgacagaaggcgtgacagatctggttcgcggaacactgtgtcccgcactgaaagccttgttcgagcacggattgaaaaagccctctctgctcggcggagcttgccatccatggctgttcattgaggaggctgcagggcgagaagtggagcgagacttcgcgtcagtctattcgcgtctggtgctgtgtaaaactttccggcttgacgaggacggcaaggtactgacacctgaggagctgttgtaccgcgccgtccagtcagtgaacgtgacccacgacgcagtccacgctcagatggacgtcaaactccggtctctaatctgtgtgggcctcaacgaacaggtgctacatttatggttagaggttttatgctcctcactcccgactgtagagaagtggtaccagccatggagcttcctgcggtctcccgggtgggtgcagatcaagtgtgaattgagggtgctctgttgtttcgctttcagtttgtcacaggactgggagctcccggcaaaaagggaggctcagcaaccattaaaggaaggagtacgagacatgctggttaaacaccacctcttctcctgggatgtggatggatag

SEQ ID NO: 187912 - DNA, 2250 bp, Artificial Sequence
  derived and/or modified sequence
atgagcggcagccacaccccagcctgtggccccttcagcgccctgacccccagcatctggccccaggagatcctggccaagtacacccagaaggaggagagcgctgagcagcctgagttctactatgatgaatttggcttccgggtgtacaaggaggagggagatgagcccggcagcagcctgctggccaacagccccctgatggaggatgccccccagaggctgcgctggcaggcccacctggagttcacccacaaccatgatgtgggggacctgacctgggacaagattgctgtgtccctgcccaggtctgagaagctgcggagcctggtgctggccggcatcccccacggcatgaggccccagctgtggatgaggctgagcggggccctgcagaagaagagaaattctgagctgagctaccgggagatcgtgaagaacagcagcaatgatgagaccatcgccgccaagcagatcgagaaggacctgctgcggaccatgcccagcaatgcctgctttgcctccatgggcagcattggagtgccccggctgcggcgggtgctgcgggccctggcctggctgtacccagagatcggctactgccagggcaccggcatggtggccgcctgcctgctgctcttcctggaggaggaggatgccttctggatgatgtctgccatcatcgaggacctgctgcctgccagctacttcagcaccaccctgctgggcgtgcagacagaccagagggtgctgcggcacctgattgtgcagtacctgccccggctggacaagctgctgcaggagcatgacatcgagctgagcctcatcaccctgcactggttcctgacagcctttgcctctgtggtggacatcaagctgctgctgcgcatctgggacctcttcttctatgagggcagccgggtgctcttccagctgaccctgggcatgctgcacctgaaggaggaggagctgatccagagcgagaacagcgccagcatcttcaacaccctgagtgacatccccagccagatggaggatgctgagctgctgctgggcgtggccatgaggctggccggcagcctgacagatgtggccgtggagacccagaggaggaagcacctggcctacctgattgctgaccagggccagctgctgggcgccggcaccctgaccaacctgagccaggtggtgagaagaaggacccagaggaggaagagcaccatcacagccctgctgtttggagaagatgacctggaggccctgaaggccaagaacatcaagcagacagagctggtggccgacctgcgggaggccatcctgcgggtggcccggcacttccagtgcacagaccccaagaactgcagcgtggagctgaccccagactacagcatggagagccaccagagggaccacgagaactacgtggcctgcagccgcagccacagaagaagagccaaggccctgctggactttgaaagacatgatgatgatgagctgggcttcaggaagaatgacatcatcaccatcgtgtcccagaaggatgagcactgctgggtgggggagctgaatggcctgcggggctggttccctgccaagtttgtggaggtgctggatgagaggagcaaggagtacagcattgctggagatgattctgtgacagaaggagtgacagacctggtgcggggcaccctgtgcccagccctgaaggccctgtttgagcacggcctgaagaagcccagcctgctgggcggggcctgccacccctggctgttcatcgaggaggccgccggccgggaggtggagcgggactttgcctctgtgtacagccggctggtgctgtgcaagaccttccggctggatgaagatggcaaggtgctgaccccagaggagctgctgtacagagctgtgcagagcgtgaatgtgacccatgatgctgtgcacgcccagatggatgtgaagctgcggagcctcatctgtgtgggcctgaatgagcaggtgctgcacctgtggctggaggtgctgtgcagcagcctgcccaccgtggagaagtggtaccagccctggagcttcctgcggagccctggctgggtgcagatcaagtgtgagctgcgggtgctgtgctgctttgccttcagcctgagccaggactgggagctgcctgccaagcgggaggcccagcagcccctgaaggagggcgtgcgggacatgctggtgaagcaccacctgttctcctgggatgtggatggatag

SEQ ID NO: 187913 - DNA, 2250 bp, Artificial Sequence
  derived and/or modified sequence
atgagcggcagccacacccccgcctgcggccccttcagcgccctgactccatcaatttggccgcaggagattttggcaaaatacactcagaaggaggagagcgccgagcagccggagttctactacgacgaatttggctttcgcgtctacaaggaggaaggcgacgagccaggcagcagtctgctggcgaatagtcctcttatggaggacgcgcctcagagactgcgctggcaggcacacttggagttcacacataaccacgatgtgggggacctaacatgggacaaaattgcagtgtctctccctcggtctgaaaaactgagatccctggttctggctggtatcccacatggaatgcggccccagctgtggatgcgcctcagcggtgctctccagaaaaaacgcaacagcgaactgagctatagggaaatcgtgaaaaatagttcaaatgacgagacaatagcggctaaacagatcgaaaaggaccttctgaggaccatgccatcaaatgcatgcttcgcgtcgatggggtcaattggggtcccacgtttgcggagggtgctaagagcattggcctggctctaccctgagattgggtattgtcaaggcacaggaatggttgccgcctgtctgctgctttttctagaggaggaggatgctttttggatgatgagcgcaattatagaggacttgctgccagcttcctatttttctactaccctgctaggcgtccagaccgaccaacgtgtgctcagacacctgatcgtgcagtacctgccccgacttgacaaactgctgcaagagcatgacattgagctgagcctaatcacactgcattggtttctgacagcatttgccagcgtagtcgatatcaaattgctgctccggatttgggatctgtttttttacgaaggctcaagagtgctctttcaactgactctggggatgctacatttgaaggaggaggaactaatacagtccgagaattctgcctcaatattcaacacactctctgacatccctagccagatggaggatgccgagctgctgctgggggtagccatgcggctggcaggttcactgactgacgttgctgtggaaacgcagagacgcaagcatttggcctacctcattgctgaccaggggcagctgctgggagctggcactttgaccaatttatcccaagtcgtgcgccggaggacccagcggaggaagagcaccatcacggcccttttatttggggaagatgaccttgaggccctgaaggcgaagaacataaaacagactgagctggtagccgatctgcgggaggcaattctgcgcgtcgccaggcattttcagtgtaccgatcctaagaattgtagcgtcgaactgactccagactattctatggagtctcaccaaagggatcatgagaactacgtggcctgctctaggagccacaggagacgcgccaaagccctgctggatttcgaacggcatgacgacgatgagctcggcttcagaaagaacgatattattacaatcgtctcacaaaaggatgagcactgctgggtgggcgagctcaacggattacgcgggtggttccctgcgaagttcgtcgaagtactcgacgagaggagcaaggaatactctattgctggcgacgacagcgtcaccgaaggagtcaccgacctggtcaggggcactctgtgcccagctctcaaggccttgttcgagcacggcttgaagaagccttctctgctggggggcgcgtgccacccatggctattcatcgaggaggcagctggccgcgaagtggagcgagacttcgcatcagtatacagtagactggttctctgtaagacttttcgtcttgacgaggatggtaaggtactcacccctgaagagctgctgtacagagcagtgcagtcggtgaatgttacccatgacgccgttcacgcgcagatggacgtcaaactgcgatcgctgatatgtgtcgggctcaacgaacaggtattacacctgtggctggaagtgctttgcagtagccttcctacggttgaaaaatggtaccagccctggtccttcctgcgttcacccggttgggttcagattaagtgtgaattaagggtgctgtgctgtttcgctttttctttgtcacaagactgggagctgcctgctaagagagaggcccaacaaccactgaaggagggcgtccgcgatatgctcgttaaacatcatctattctcttgggacgttgacggatag

SEQ ID NO: 187914 - DNA, 2250 bp, Artificial Sequence
  derived and/or modified sequence
atgagtggcagtcacacccccgcttgcggcccattctcagccctgacaccctcaatctggccacaagaaattttagccaagtacacccagaaagaggagtcagctgaacaaccagaattctattacgatgagtttggattccgcgtgtacaaagaggagggcgacgaaccagggtcctcacttctggcaaatagtcctctaatggaagacgcccctcagcgcctgaggtggcaagcccatctggagttcacacataatcatgacgtgggagaccttacatgggataaaattgctgtgagcctgccacgctccgagaaactccggtctttggtgttggccggtatacctcatggcatgcggcctcagttgtggatgcgtctgtccggcgcactgcaaaagaaacgaaactccgaattgtcctacagagaaatcgtgaagaacagctccaatgatgaaactatagccgctaaacagatcgagaaagatcttttgcgtaccatgccatccaatgcctgcttcgcctcaatgggaagtatcggcgtccctagactgaggcgagtactgcgggctctggcttggctctaccctgagattggatactgccaagggacaggcatggtcgctgcttgcttgcttctctttctggaggaagaagatgccttctggatgatgtcagctattattgaggacttgcttcccgcttcttacttttccaccacactgctgggcgttcaaacagaccagcgtgtgctccggcatctgatcgtgcagtatcttccgagattagacaaactactccaggaacacgatattgaacttagtttaatcaccctccactggttcctgactgcttttgcgagcgtggtggacattaagctccttctgcgtatttgggatctattcttctacgaagggagtagagttctctttcagctaacccttggtatgctgcaccttaaagaagaggagctgatccagtccgagaacagtgcctccatctttaacacgttgagcgacatccccagccagatggaagacgccgagctgctgcttggggtagcgatgaggctcgccggttcccttaccgatgttgctgtcgagacacaaaggaggaagcacctggcctacttgatcgcagaccaagggcagctccttggcgctgggaccctgacgaatctgtctcaggtggtacggaggagaactcagcgaaggaagtccacaattacagccctgctgtttggggaggacgatctggaggctttgaaagccaagaatatcaagcagacagaactcgtggccgacctgcgcgaggcgatcctgcgcgtcgcaaggcacttccagtgcacagatcctaagaattgctccgtggagctcacacctgactacagcatggaatcccatcagcgagaccacgaaaactacgtggcgtgtagcagatctcaccgaaggcgcgcaaaagctttgttagatttcgaacgtcatgatgacgacgagctaggattcagaaagaatgacattatcacaattgtgtcacagaaggacgagcattgctgggtgggcgagctaaacggcttgcgagggtggttcccagccaaattcgtcgaggtgctggacgagagatctaaggagtacagtatcgcaggcgatgacagtgttactgagggagtgaccgacctggtgcgtggcaccctctgccccgctcttaaggccctgtttgagcacgggctgaagaaaccctccttactgggcggtgcttgccacccatggctgttcatcgaagaagccgctggtagggaggttgaacgggacttcgcatcagtgtactcacggctggttctttgtaagacatttcgcctggacgaggatgggaaggtattgactcctgaggaactgttgtatcgggctgtacagtcagtcaacgtgacacatgatgccgtgcacgctcagatggacgttaagctgagatccctgatatgtgtgggactgaatgagcaggtgctccacctatggctagaggtattgtgctcaagtctgccaaccgtggaaaaatggtatcagccgtggagttttctcagatccccaggttgggttcagattaagtgtgagctacgagttctgtgctgcttcgcttttagcctctcacaagattgggagctgccagctaaacgtgaggctcagcagccccttaaggaaggagttagggacatgctggtaaaacaccacttgttttcatgggatgtagacggatag

SEQ ID NO: 187915 - DNA, 2788 bp, Artificial Sequence
  derived and/or modified sequence
ccgctgagcgctgactgggtgcgagtggggaagctgctaacccgacccggattggcgctgaggtggcccgtggggcagggcagatgattctggaccagatgaagcctgaggagccttccagctctaagatagcaggataggagacttctaagattggagctgcagaagacttgccagcccaccagcacaatgtcaggaagccatacacctgcctgtggccctttctcagccctgactccgagcatatggccccaggagatcttggccaagtacacgcagaaggaagagtcagcagagcaaccagagttctactacgatgagtttggtttccgtgtgtacaaggaagaaggtgatgagcctggctccagtctgctggcgaactcccctctgatggaggatgctccacagaggctgcggtggcaggcccacctggagttcacccataaccacgatgtgggggatctcacctgggacaagattgccgtctccctaccccgctctgagaagctccgctccctggtgctggccggcatcccacatggcatgaggccacagctgtggatgcggctctctggggccctgcagaagaagaggaactctgagctgtcctaccgcgagattgtgaagaacagctccaacgatgagaccatcgctgccaagcagatcgagaaggacctgctccgcaccatgcccagcaacgcctgcttcgccagcatgggtagcatcggggtgccccgcctgcgcagggtgctccgggccctggcctggctctacccagagatcggctactgccagggcaccggcatggtggccgcctgcctcctgctgttcctggaggaggaggacgccttctggatgatgtctgccatcatcgaggacctgctccccgcctcctacttcagcaccaccctgctgggtgtccagactgaccagcgggtcctgcgccacctcattgtccagtacctgcctcgcctggacaagctgctccaggagcatgacattgagctgtccctgatcacactgcactggttcctcacggccttcgccagcgtggtggacatcaagctgctcctgcgcatctgggacctgtttttctacgagggctcccgggtgctgttccagctcacgctgggcatgctgcacctcaaggaggaagagctgatccagtcagagaactcggcctccatcttcaacacgctatcggatatcccgtcgcagatggaggacgcggagctgcttctgggggtggccatgcggctggccggctccctcaccgatgtggccgtggagactcagcgccgcaagcacctggcctatctcattgcagaccagggccagctcctgggggccggcaccctcaccaacctctctcaggttgttcgccgcaggacccagcggaggaagtccaccatcactgctctgctcttcggggaggatgacctggaggcactcaaggccaagaacatcaagcagacggaactggtggctgacctccgggaagccatcctgcgcgtggcacgccacttccagtgcacagaccccaaaaactgcagcgtggagctgactccagactatagcatggagagccaccagcgggaccacgagaactacgtggcgtgctcacgcagccaccggcgccgagccaaggccctgctggactttgagcggcacgacgacgacgagctgggcttccgcaagaacgacatcatcacaatcgtgtctcagaaggacgagcactgctgggtgggggagctcaacggcctgcgaggctggtttccagccaagttcgtggaagtcctggatgagcgcagcaaagagtactccatcgcgggggatgactcggtgacggagggggtcacagacctcgtgcgagggaccctctgcccggcccttaaggccctgttcgaacatggactgaagaagccatccctgcttgggggcgcctgccacccctggctgtttatcgaggaggctgcaggccgggaggtcgagagagactttgcctccgtgtattcccgtctggtgctctgtaagaccttcaggttggatgaagatggcaaagtcctgaccccggaggagctgctctaccgggctgtgcagtctgtgaacgtgacccacgatgcagtgcatgcacaaatggatgtgaagctccgctcactgatctgcgtggggctcaatgagcaggtgctgcacctgtggctggaggtgctctgctccagcctgcccaccgtggagaagtggtaccagccctggtccttcctgcgcagcccgggctgggtccagatcaagtgtgagctccgagtcctctgctgctttgccttcagcctctcccaggactgggagctccctgcgaagagagaggcgcagcagcccctgaaggagggcgtccgggacatgctggtgaagcaccacctcttcagctgggatgtggacgggtgaccccctcctccccagcccaacctcgggcctgcgtctgaggtggcccaggaccccaagctgcagagcccagggaagagcagctccagagccctggccggggccgcgggatatcaatatcaggctgccccactccacgttccccagcacatcccaggtggtgggagcagagggtaccctgccccaccagggtccttagggatgctctaggccaaaccacagtttgtaccaaaaaccttgtgaggaggtgggggagccatgtctgtgctcaggaagagggaaggggatgggggtggctagtaggctcctggcctctttggtttataaataaactgtgtctgtctttgagaaa

SEQ ID NO: 187916 - DNA, 2250 bp, Artificial Sequence
  derived and/or modified sequence
atgagcggcagccacacccccgcctgcggccccttcagcgccctgacccccagcatctggccccaggagatcctggccaagtacacccagaaggaggagagcgccgagcagcccgagttctactacgacgagttcggcttcagagtgtacaaggaggagggcgacgagcccggcagcagcctgctggccaacagccccctgatggaggacgccccccagagactgagatggcaggcccacctggagttcacccacaaccacgacgtgggcgacctgacctgggacaagatcgccgtgagcctgcccagaagcgagaagctgagaagcctggtgctggccggcatcccccacggcatgagaccccagctgtggatgagactgagcggcgccctgcagaagaagagaaacagcgagctgagctacagagagatcgtgaagaacagcagcaacgacgagaccatcgccgccaagcagatcgagaaggacctgctgagaaccatgcccagcaacgcctgcttcgccagcatgggcagcatcggcgtgcccagactgagaagagtgctgagagccctggcctggctgtaccccgagatcggctactgccagggcaccggcatggtggccgcctgcctgctgctgttcctggaggaggaggacgccttctggatgatgagcgccatcatcgaggacctgctgcccgccagctacttcagcaccaccctgctgggcgtgcagaccgaccagagagtgctgagacacctgatcgtgcagtacctgcccagactggacaagctgctgcaggagcacgacatcgagctgagcctgatcaccctgcactggttcctgaccgccttcgccagcgtggtggacatcaagctgctgctgagaatctgggacctgttcttctacgagggcagcagagtgctgttccagctgaccctgggcatgctgcacctgaaggaggaggagctgatccagagcgagaacagcgccagcatcttcaacaccctgagcgacatccccagccagatggaggacgccgagctgctgctgggcgtggccatgagactggccggcagcctgaccgacgtggccgtggagacccagagaagaaagcacctggcctacctgatcgccgaccagggccagctgctgggcgccggcaccctgaccaacctgagccaggtggtgagaagaagaacccagagaagaaagagcaccatcaccgccctgctgttcggcgaggacgacctggaggccctgaaggccaagaacatcaagcagaccgagctggtggccgacctgagagaggccatcctgagagtggccagacacttccagtgcaccgaccccaagaactgcagcgtggagctgacccccgactacagcatggagagccaccagagagaccacgagaactacgtggcctgcagcagaagccacagaagaagagccaaggccctgctggacttcgagagacacgacgacgacgagctgggcttcagaaagaacgacatcatcaccatcgtgagccagaaggacgagcactgctgggtgggcgagctgaacggcctgagaggctggttccccgccaagttcgtggaggtgctggacgagagaagcaaggagtacagcatcgccggcgacgacagcgtgaccgagggcgtgaccgacctggtgagaggcaccctgtgccccgccctgaaggccctgttcgagcacggcctgaagaagcccagcctgctgggcggcgcctgccacccctggctgttcatcgaggaggccgccggcagagaggtggagagagacttcgccagcgtgtacagcagactggtgctgtgcaagaccttcagactggacgaggacggcaaggtgctgacccccgaggagctgctgtacagagccgtgcagagcgtgaacgtgacccacgacgccgtgcacgcccagatggacgtgaagctgagaagcctgatctgcgtgggcctgaacgagcaggtgctgcacctgtggctggaggtgctgtgcagcagcctgcccaccgtggagaagtggtaccagccctggagcttcctgagaagccccggctgggtgcagatcaagtgcgagctgagagtgctgtgctgcttcgccttcagcctgagccaggactgggagctgcccgccaagagagaggcccagcagcccctgaaggagggcgtgagagacatgctggtgaagcaccacctgttcagctgggacgtggacggctag

SEQ ID NO: 187917 - protein, 478 aa, Artificial Sequence
  derived and/or modified sequence
MAAGGSGVGGKRSSKSDADSGFLGLRPTSVDPALRRRRRGPRNKKRGWRRLAQEPLGLEVDQFLEDVRLQERTSGGLLSEAPNEKLFFVDTGSKEKGLTKKRTKVQKKSLLLKKPLRVDLILENTSKVPAPKDVLAHQVPNAKKLRRKEQLWEKLAKQGELPREVRRAQARLLNPSATRAKPGPQDTVERPFYDLWASDNPLDRPLVGQDEFFLEQTKKKGVKRPARLHTKPSQAPAVEVAPAGASYNPSFEDHQTLLSAAHEVELQRQKEAEKLERQLALPATEQAATQESTFQELCEGLLEESDGEGEPGQGEGPEAGDAEVCPTPARLATTEKKTEQQRRREKAVHRLRVQQAALRAARLRHQELFRLRGIKAQVALRLAELARRQRRRQARREAEADKPRRLGRLKYQAPDIDVQLSSELTDSLRTLKPEGNILRDRFKSFQRRNMIEPRERAKFKRKYKVKLVEKRAFREIQL

SEQ ID NO: 187918 - protein, 472 aa, Artificial Sequence
  derived and/or modified sequence
MAAGGSGVGGKRSSKSDADSGFLGLRPTSVDPALRRRRRGPRNKKRGWRRLAQEPLGLEVDQFLEDVRLQERTSGGLLSEAPNEKLFFVDTGSKEKGLTKKRTKVQKKSLLLKKPLRVDLILENTSKVPAPKDVLAHQVPNAKKLRRKEQLWEKLAKQGELPREVRRAQARLLNPSATRAKPGPQDTVERPFYDLWASDNPLDRPLVGQDEFFLEQTKKKGVKRPARLHTKPSQAPAVEVAPAGASYNPSFEDHQTLLSAAHEVELQRQKEAEKLERQLALPATEQAATQESTFQELCEGLLEESDGEGEPGQGEGPEAGDAEVCPTPARHHREEDGAAAARRLCTGCGYSRPRCGPPGSGTRSCSGCAGSPGGPEAGGARRQRRRQARREAEADKPRRLGRLKYQAPDIDVQLSSELTDSLRTLKPEGNILRDRFKSFQRRNMIEPRERAKFKRKYKVKLVEKRAFREIQL

SEQ ID NO: 187919 - protein, 263 aa, Artificial Sequence
  derived and/or modified sequence
MAAGGSGVGGKRSSKSDADSGFLGLRPTSVDPALRRRRRGPRNKKRGWRRLAQEPLGLEVDQFLEDVRLQERTSGGLLSEAPNEKLFFVDTGSKEKGLTKKRTKVQKKSLLLKKPLRVDLILENTSKVPAPKDVLAHQVPNAKKLRRKEQLWASDNPLDRPLVGQDEFFLEQTKKKGVKRREAEADKPRRLGRLKYQAPDIDVQLSSELTDSLRTLKPEGNILRDRFKSFQRRNMIEPRERAKFKRKYKVKLVEKRAFREIQL

SEQ ID NO: 187920 - DNA, 1437 bp, Artificial Sequence
  derived and/or modified sequence
atggcagccggggggtccggggtgggaggcaaaaggagttccaaatccgacgcagactccggctttctagggcttagaccgacctcagtggaccctgcactccggcggcggcggagaggacctagaaataagaaacggggatggagaaggctagctcaagaacctctgggactcgaggtggatcaattcttagaggatgtccgtctgcaggagaggaccagtggaggccttctaagcgaagctcctaacgagaaacttttcttcgtggataccgggtccaaagaaaaaggactaaccaagaagagaaccaaagtgcagaagaagagcctccttctaaagaagcccctgcgggtcgatctcattctggagaacaccagcaaggtgcctgcacctaaggatgtactggctcaccaagtccccaacgccaagaagctgcggcgcaaggagcagctgtgggagaagctagcaaagcagggcgagctccctagagaggtaaggcgagcacaggccaggttactgaacccgagcgccacaagagcaaagccgggcccccaagataccgtggagagacccttctatgacctgtgggccagcgacaatcccctggatcgtcctttggttggacaggacgagtttttcctagagcaaaccaaaaagaagggggtcaaacgtcccgctcggctccatacaaagccctctcaggcccccgccgtcgaggttgcccccgccggcgctagctacaacccctcctttgaagaccatcagacactgctcagcgctgcccatgaggtggagctccaaagacagaaggaggccgaaaagttagaacggcagcttgcgcttccggcaacggagcaggctgcaacccaggagagcacatttcaggaactgtgcgaaggcttactggaggagtcggacggcgagggtgaacctggccagggtgagggaccggaagctggcgacgccgaggtttgtccaacccctgccagactcgccaccaccgaaaaaaagacggaacagcagcgacgaagggaaaaggcagtgcatagactgcgggtgcagcaagctgcattgagagccgctcgcctcagacatcaggaattgttccggctgcgcgggatcaaagcacaagtggctctgagattagccgagttggctcgcaggcagcgccggaggcaggccaggcgggaggccgaagctgacaagcctcgtaggctcggaagactcaaatatcaagctcctgacatcgatgtccagctgagctcagagttgacagactcgctcaggaccttaaaacccgaaggaaacatcctgcgcgatagattcaagagctttcagagacgcaacatgatcgaaccgcgagagcgggctaaatttaagcgcaagtacaaggtcaagctggttgagaaaagggcttttagggaaatccagctgtag

SEQ ID NO: 187921 - DNA, 1419 bp, Artificial Sequence
  derived and/or modified sequence
atggcagccggcggcagcggcgtaggcggaaagcgaagtagcaagtccgacgccgactctggattcttgggcctgagaccaacatccgtggatccagctctgcgacggaggaggcgtggcccaagaaataagaagcggggctggagaagactggcacaggagccactggggttagaggtggaccagttcttagaggacgtgagactacaggagagaacttcaggcgggttgctgagcgaggcccctaacgagaaactgttcttcgtcgatactggctcaaaagaaaaggggctgacaaaaaagcggactaaagtccagaagaaaagtttgcttcttaagaaacctctcagggtcgacctgatcctggagaacacctcaaaggtgcctgctccgaaggacgtcttagcacatcaagtcccgaatgcgaaaaaactgagacggaaggagcagttatgggagaagctggccaagcagggtgagctgcctcgggaggtgcgcagagctcaggcacgcttgctaaacccctcagcaacccgagcaaagcccggaccccaggacaccgtcgaacgacctttctacgatctgtgggcctccgataacccgttggaccgaccactcgtcggccaagatgaattctttctggagcagacaaagaaaaagggtgtcaaacggccggcaaggctccataccaagccttctcaagcgccagctgttgaagtggcacctgccggcgcttcctacaaccccagttttgaagatcatcagacactgctgtctgccgcgcatgaagttgagttacagaggcagaaggaagccgagaagcttgaacgacagctggcccttcccgcaaccgaacaggccgctactcaggaatccacattccaagagttatgcgaaggactgctcgaggagagcgacggcgagggagaaccaggccagggagagggaccagaggctggcgacgctgaggtctgtccaacaccagcccgccatcacagagaagaggacggagctgccgcggccaggaggctgtgcaccggatgcgggtactctaggcctagatgcggcccaccgggctcgggtactaggtcctgctctgggtgtgctggttcaccaggcggcccggaggcgggcggggcccgacgacagaggcggcgacaggcacgccgagaggcagaggccgacaaaccacggcgtctcggcaggcttaagtaccaagccccagatatagatgtgcagctatcatccgagctgacagactcattacgcacactcaagcccgaagggaacatcctccgagatcgtttcaagtcctttcagcgccgcaatatgattgaacctagggagcgggcaaagttcaaaagaaaatataaggtgaagcttgtcgagaagcgggccttccgcgaaatccagctgtag

SEQ ID NO: 187922 - DNA, 792 bp, Artificial Sequence
  derived and/or modified sequence
atggccgccggggggagtggggtgggcggtaagaggtcctctaaatctgatgctgactccggcttcctaggcttgagacctacgtccgtggacccggcattgaggcggcgacgcagggggcccaggaacaagaagcgcgggtggcgcaggttggctcaggaaccgcttggccttgaggtggatcagtttctcgaggatgtcagactccaggaacgcacatccgggggattgttatccgaggcccctaacgagaagctgttcttcgttgacaccggatccaaggagaaaggactcaccaagaaaagaaccaaagtccagaagaaatctcttctgctgaagaagcctttgagggttgacctgatacttgaaaacacaagcaaggtcccagcacccaaggacgttctggcccatcaagtccccaatgcaaagaaactccggcggaaggagcagctttgggcaagtgataacccccttgatagaccattggtaggccaggatgagtttttccttgaacagaccaagaagaagggggtgaagaggcgggaggccgaggccgataaacctcgtagactgggtcgcctgaagtatcaggcccccgatatcgacgtgcagctcagttctgagttgactgatagtctgaggacactgaagcctgagggtaatatcctgagagaccggttcaagtcatttcagcgacgcaacatgattgagccaagggagagagcaaaattcaaaagaaaatataaggtgaagttggtcgagaaacgcgccttcagggagattcaattatag

SEQ ID NO: 187923 - DNA, 1522 bp, Artificial Sequence
  derived and/or modified sequence
tggctgagttcttcctttgacaagatggcggcaggaggcagtggcgttggtgggaagcgcagctcgaaaagcgatgccgattctggtttcctggggctgcggcccacttcggtggacccagcgctgaggcggcggcggcgaggcccaagaaataagaagcggggctggcggcggcttgctcaggagccgctggggctggaggttgaccagttcctggaagacgtgcggctacaggagcgcacgagcggtggcttgttgtcagaggccccaaatgaaaaactcttcttcgtggacactggctccaaggaaaaagggctgacaaagaagagaaccaaagtccagaagaagtcactgcttctcaagaaaccccttcgggttgacctcatcctcgagaacacatccaaagtccctgcccccaaagacgtcctcgcccaccaggtccccaacgccaagaagctcaggcggaaggagcagctatgggagaagctggccaagcagggcgagctgccccgggaggtgcgcagggcccaggcccggctcctcaacccttctgcaacaagggccaagcccgggccccaggacaccgtagagcggcccttctacgacctctgggcctcagacaaccccctggacaggccgttggttggccaggatgagtttttcctggagcagaccaagaagaaaggagtgaagcggccagcacgcctgcacaccaagccgtcccaggcacccgccgtggaggtggcgcctgccggagcttcctacaatccatcctttgaagaccaccagaccctgctctcagcggcccacgaggtggagttgcagcggcagaaggaggcggagaagctggagcggcagctggccctgcccgccacggagcaggccgccacccaggagtccacattccaggagctgtgcgaggggctgctggaggagtcggatggtgagggggagccaggccagggcgaggggccggaggctggggatgccgaggtctgtcccacgcccgcccgcctggccaccacagagaagaagacggagcagcagcggcggcgggagaaggctgtgcacaggctgcgggtacagcaggccgcgttgcgggccgcccggctccggcaccaggagctgttccggctgcgcgggatcaaggcccaggtggccctgaggctggcggagctggcgcggcggcagaggcggcggcaggcgcggcgggaggctgaggctgacaagccccgaaggctggggcggctcaagtaccaggcacctgacatcgacgtgcagctgagctcggagctgacagactcgctcaggaccctgaagcccgagggcaacatccttcgagaccggttcaagagcttccagaggaggaatatgatcgagcctcgagagagagccaagttcaaacgcaagtacaaggtgaagctggtggagaagcgggcgttccgtgagatccagttgtagctgccatcagatgccggagactcgcccttcaataaaaaatctcttctagctgatcagtggg

SEQ ID NO: 187924 - DNA, 1478 bp, Artificial Sequence
  derived and/or modified sequence
tgacaagatggcggcaggaggcagtggcgttggtgggaagcgcagctcgaaaagcgatgccgattctggtttcctggggctgcggcccacttcggtggacccagcgctgaggcggcggcggcgaggcccaagaaataagaagcggggctggcggcggcttgctcaggagccgctggggctggaggttgaccagttcctggaagacgtgcggctacaggagcgcacgagcggtggcttgttgtcagaggccccaaatgaaaaactcttcttcgtggacactggctccaaggaaaaagggctgacaaagaagagaaccaaagtccagaagaagtcactgcttctcaagaaaccccttcgggttgacctcatcctcgagaacacatccaaagtccctgcccccaaagacgtcctcgcccaccaggtccccaacgccaagaagctcaggcggaaggagcagctatgggagaagctggccaagcagggcgagctgccccgggaggtgcgcagggcccaggcccggctcctcaacccttctgcaacaagggccaagcccgggccccaggacaccgtagagcggcccttctacgacctctgggcctcagacaaccccctggacaggccgttggttggccaggatgagtttttcctggagcagaccaagaagaaaggagtgaagcggccagcacgcctgcacaccaagccgtcccaggcacccgccgtggaggtggcgcctgccggagcttcctacaatccatcctttgaagaccaccagaccctgctctcagcggcccacgaggtggagttgcagcggcagaaggaggcggagaagctggagcggcagctggccctgcccgccacggagcaggccgccacccaggagtccacattccaggagctgtgcgaggggctgctggaggagtcggatggtgagggggagccaggccagggcgaggggccggaggctggggatgccgaggtctgtcccacgcccgcccgccaccacagagaagaagacggagcagcagcggcgagaaggctgtgcacaggctgcgggtacagcaggccgcgttgcgggccgcccggctccggcaccaggagctgttccggctgcgcgggatcaccaggtggccctgaggctggcggagcgcggcggcagaggcggcggcaggcgcggcgggaggctgaggctgacaagccccgaaggctggggcggctcaagtaccaggcacctgacatcgacgtgcagctgagctcggagctgacagactcgctcaggaccctgaagcccgagggcaacatccttcgagaccggttcaagagcttccagaggaggaatatgatcgagcctcgagagagagccaagttcaaacgcaagtacaaggtgaagctggtggagaagcgggcgttccgtgagatccagttgtagctgccatcagatgccggagactcgcccttcaataaaaaatctcttctagctg

SEQ ID NO: 187925 - DNA, 850 bp, Artificial Sequence
  derived and/or modified sequence
gacaagatggcggcaggaggcagtggcgttggtgggaagcgcagctcgaaaagcgatgccgattctggtttcctggggctgcggcccacttcggtggacccagcgctgaggcggcggcggcgaggcccaagaaataagaagcggggctggcggcggcttgctcaggagccgctggggctggaggttgaccagttcctggaagacgtgcggctacaggagcgcacgagcggtggcttgttgtcagaggccccaaatgaaaaactcttcttcgtggacactggctccaaggaaaaagggctgacaaagaagagaaccaaagtccagaagaagtcactgcttctcaagaaaccccttcgggttgacctcatcctcgagaacacatccaaagtccctgcccccaaagacgtcctcgcccaccaggtccccaacgccaagaagctcaggcggaaggagcagctatgggcctcagacaaccccctggacaggccgttggttggccaggatgagtttttcctggagcagaccaagaagaaaggagtgaagcggcgggaggctgaggctgacaagccccgaaggctggggcggctcaagtaccaggcacctgacatcgacgtgcagctgagctcggagctgacagactcgctcaggaccctgaagcccgagggcaacatccttcgagaccggttcaagagcttccagaggaggaatatgatcgagcctcgagagagagccaagttcaaacgcaagtacaaggtgaagctggtggagaagcgggcgttccgtgagatccagttgtagctgccatcagatgccggagactcgcccttcaataaaaaatctcttctagctg

SEQ ID NO: 187926 - DNA, 1437 bp, Artificial Sequence
  derived and/or modified sequence
atggctgctgggggcagcggcgtgggcggcaagaggagcagcaagagtgatgctgacagcggcttcctgggcctgcggcccacctctgtggaccctgccctgcggaggagaagaagaggccccaggaacaagaagaggggctggaggcggctggcccaggagcccctgggcctggaggtggaccagttcctggaggatgtgcggctgcaggagaggaccagcggcggcctgctgtctgaggccccaaatgagaagctgttctttgtggacaccggcagcaaggagaagggcctgaccaagaagaggaccaaggtgcagaagaagagcctgctgctgaagaagcccctgcgggtggacctgatcctggagaacaccagcaaggtgcctgcccccaaggatgtgctggcccaccaggtgcccaatgccaagaagctgcggaggaaggagcagctgtgggagaagctggccaagcagggcgagctgccccgggaggtgcggcgggcccaggcccggctgctgaaccccagcgccacccgggccaagccaggcccccaggacacagtggagcggcccttctatgacctgtgggccagtgacaaccccctggaccggcccctggtgggccaggatgagttcttcctggagcagaccaagaagaagggcgtgaagaggcctgcccggctgcacaccaagcccagccaggccccagctgtggaggtggccccagctggggccagctacaaccccagctttgaggaccaccagaccctgctgtctgctgcccacgaggtggagctgcagaggcagaaggaggccgagaagctggagcggcagctggccctgcctgccacagagcaggccgccacccaggagagcaccttccaggagctgtgtgagggcctgctggaggagagtgatggagagggggagcccggccagggcgagggccctgaggccggagatgctgaggtgtgccccaccccagcccggctggccaccacagagaagaagacagagcagcagaggagaagagagaaggctgtgcaccggctgcgggtgcagcaggccgccctgcgggccgcccggctgcggcaccaggagctgttccggctgcggggcatcaaggcccaggtggccctgcggctggccgagctggcccggcggcagaggcggcggcaggcccggcgggaggccgaggccgacaagccccggcggctgggccgcctgaagtaccaggccccagacattgatgtgcagctgagcagcgagctgacagacagcctgcggaccctgaagccagagggcaacatcctgcgggaccgcttcaagagcttccagaggaggaacatgattgagccccgggagcgggccaagttcaagaggaagtacaaggtgaagctggtggagaagagggccttccgggagatccagctgtag

SEQ ID NO: 187927 - DNA, 1419 bp, Artificial Sequence
  derived and/or modified sequence
atggctgctgggggcagcggcgtgggcggcaagaggagcagcaagagtgatgctgacagcggcttcctgggcctgcggcccacctctgtggaccctgccctgcggaggagaagaagaggccccaggaacaagaagaggggctggaggcggctggcccaggagcccctgggcctggaggtggaccagttcctggaggatgtgcggctgcaggagaggaccagcggcggcctgctgtctgaggccccaaatgagaagctgttctttgtggacaccggcagcaaggagaagggcctgaccaagaagaggaccaaggtgcagaagaagagcctgctgctgaagaagcccctgcgggtggacctgatcctggagaacaccagcaaggtgcctgcccccaaggatgtgctggcccaccaggtgcccaatgccaagaagctgcggaggaaggagcagctgtgggagaagctggccaagcagggcgagctgccccgggaggtgcggcgggcccaggcccggctgctgaaccccagcgccacccgggccaagccaggcccccaggacacagtggagcggcccttctatgacctgtgggccagtgacaaccccctggaccggcccctggtgggccaggatgagttcttcctggagcagaccaagaagaagggcgtgaagaggcctgcccggctgcacaccaagcccagccaggccccagctgtggaggtggccccagctggggccagctacaaccccagctttgaggaccaccagaccctgctgtctgctgcccacgaggtggagctgcagaggcagaaggaggccgagaagctggagcggcagctggccctgcctgccacagagcaggccgccacccaggagagcaccttccaggagctgtgtgagggcctgctggaggagagtgatggagagggggagcccggccagggcgagggccctgaggccggagatgctgaggtgtgccccaccccagcccggcaccaccgggaggaggatggagctgctgctgcccggcggctgtgcaccggctgcggctacagccggccccgctgtggccccccaggcagcggcaccaggagctgcagcggctgtgccggcagccctgggggccctgaggccggcggggcccggcggcagaggcggcggcaggcccggcgggaggccgaggccgacaagccccggcggctgggccgcctgaagtaccaggccccagacattgatgtgcagctgagcagcgagctgacagacagcctgcggaccctgaagccagagggcaacatcctgcgggaccgcttcaagagcttccagaggaggaacatgattgagccccgggagcgggccaagttcaagaggaagtacaaggtgaagctggtggagaagagggccttccgggagatccagctgtag

SEQ ID NO: 187928 - DNA, 792 bp, Artificial Sequence
  derived and/or modified sequence
atggctgctgggggcagcggcgtgggcggcaagaggagcagcaagagtgatgctgacagcggcttcctgggcctgcggcccacctctgtggaccctgccctgcggaggagaagaagaggccccaggaacaagaagaggggctggaggcggctggcccaggagcccctgggcctggaggtggaccagttcctggaggatgtgcggctgcaggagaggaccagcggcggcctgctgtctgaggccccaaatgagaagctgttctttgtggacaccggcagcaaggagaagggcctgaccaagaagaggaccaaggtgcagaagaagagcctgctgctgaagaagcccctgcgggtggacctgatcctggagaacaccagcaaggtgcctgcccccaaggatgtgctggcccaccaggtgcccaatgccaagaagctgcggaggaaggagcagctgtgggccagtgacaaccccctggaccggcccctggtgggccaggatgagttcttcctggagcagaccaagaagaagggcgtgaagaggcgggaggccgaggccgacaagccccggcggctgggccgcctgaagtaccaggccccagacattgatgtgcagctgagcagcgagctgacagacagcctgcggaccctgaagccagagggcaacatcctgcgggaccgcttcaagagcttccagaggaggaacatgattgagccccgggagcgggccaagttcaagaggaagtacaaggtgaagctggtggagaagagggccttccgggagatccagctgtag

SEQ ID NO: 187929 - DNA, 1437 bp, Artificial Sequence
  derived and/or modified sequence
atggccgccggcggcagcggcgtgggcggcaagcggagcagcaagtcagatgctgacagtgggtttctcggcctccgcccaacgtctgtggaccccgctctccgacgacgcagacgaggccctaggaacaagaagcggggatggcgccggttagcccaggaacctttaggacttgaggtggatcagtttttggaagatgtgaggctgcaggagcgcacgtccgggggactcctgagcgaggcgccaaatgagaaactgtttttcgtggatacggggtctaaagagaagggcctcactaagaaaaggaccaaggtgcaaaagaagtctctccttctcaagaagcccttgagagtggacctgatccttgagaacactagcaaagtgcctgcaccaaaagatgtgctggctcaccaggtgcctaacgcgaagaagctgcggcgcaaggaacagttatgggaaaagcttgccaaacagggcgagctcccccgagaagtgcggagggctcaggcgagactcctgaaccctagtgccacgcgagccaaacctggacctcaggacactgtcgagcggcctttctacgacctctgggcttctgacaacccgcttgatagacctctggtgggtcaggacgagtttttcctggagcaaacaaagaagaagggggtcaagcggccagcccgtttgcacaccaagccttcccaggcacccgctgtcgaagtcgctccggcaggcgcctcatacaaccccagcttcgaggaccaccagacattactctccgccgcacacgaagtggaactgcaacgacagaaggaagctgagaagctggaaaggcagttggctcttcccgccacagagcaggcagcgacccaagagtctaccttccaagagctgtgtgaggggcttctcgaggagagcgacggggagggagagcctgggcaaggcgagggcccggaagcaggtgacgcagaagtctgccctacccccgcccggttagcaaccacagagaaaaagaccgaacagcagcggcgcagggagaaggcagtacatcgcctcagggtgcagcaggccgctctgcgagctgcacggttgcgtcaccaagaactgtttcggcttcggggcatcaaggctcaggtggctctgcggctcgcggaactggcccggcgtcagagacgtcgtcaggcccggcgcgaggccgaggccgacaaacccagaagactcggacgactgaaataccaggccccggacattgacgtccagttaagctctgagttgacagattcactgcggaccctgaaacccgaagggaacatcttgagggacaggttcaaatctttccaaaggcggaatatgatcgagcctcgcgagcgggctaagtttaagaggaaatacaaggtcaaactggtggagaagcgcgctttcagggagatccagctctag

SEQ ID NO: 187930 - DNA, 1419 bp, Artificial Sequence
  derived and/or modified sequence
atggccgccggcggcagcggcgtgggcggcaagcggagcagcaagagtgacgcagatagtggctttctgggcctgcggccgacgtcagtggatccagccttaaggcgcagaaggagaggcccgagaaataagaaacgtggctggaggcgattagctcaggagcccctggggctggaggtcgatcaattcttagaggatgttcgcctgcaggaacgaactagtggcgggctcctttctgaggccccgaacgaaaagctcttctttgttgacacgggctccaaagaaaaaggcctgaccaaaaagagaacgaaagtgcagaagaaatctctgctgcttaagaagcctctgagggtagacctgatactggagaatacttctaaggtccccgctccaaaggacgtgcttgctcaccaggtcccgaacgcaaaaaaattaaggcgcaaagagcagttgtgggaaaagctggctaaacagggtgagttgccccgtgaagtaaggcgcgcccaggcccggctgctaaatcctagcgcaacacgggctaagccgggtccgcaggacactgtcgagcgtcctttctatgatctatgggcatcagacaatccgttagatcgccccttggtgggacaggatgagttcttcctggagcagacaaagaaaaagggcgtgaaacggcccgctagattacacacgaagccttcacaggcacccgccgtggaggtcgctccggcgggtgcatcatacaacccaagtttcgaggatcaccagaccctgctgagcgctgctcatgaagtcgagcttcaacgccagaaggaagccgagaaactggaaagacagctggcactgcccgcaaccgagcaagccgccacacaagagagtacctttcaggagctttgcgaaggactgttggaagagagcgacggggagggcgaacctggccaaggtgaggggccagaggccggcgacgccgaagtctgccccaccccagcacgccaccaccgggaggaggatggggccgccgccgcgcgtcggctctgtactggatgtggatacagccgcccaagatgtgggccaccaggaagcggcaccaggagctgctcaggttgcgccggttcacccgggggaccagaagctggaggagctcggcgacagagaagacgccaggccaggagggaagctgaggctgacaaaccacgacggcttggccggttaaagtatcaggctcccgatattgacgtacagttatccagcgagctgacagacagtctgaggactttgaagccagaagggaatatcttgcgggatcgcttcaagtcattccagcgtagaaacatgatcgagccaagagagcgagccaagttcaagaggaaatacaaagttaaactggtagaaaagagagcctttagagagatacagttatag

SEQ ID NO: 187931 - DNA, 792 bp, Artificial Sequence
  derived and/or modified sequence
atggccgccggcggcagcggcgtgggcggcaagcggagcagcaagtccgatgcagacagcggcttcctaggcctgaggcctactagcgtggaccctgctctgcggcgaaggcgtagaggacctcggaacaagaaaagaggctggcgtaggctggcccaagaacctctgggtcttgaagtcgaccagtttctcgaggacgtccggttgcaggagagaacttctggaggcctcctcagcgaggctccgaatgagaagctcttcttcgtggacacaggaagtaaggaaaaggggctcaccaagaagaggaccaaggttcagaaaaagagcttgttgctgaagaagcctctacgcgtggatctcatcctggaaaatacctccaaggttccagcccctaaagacgtgttggcccatcaggtgcctaacgctaagaagttacggcgtaaggagcaactttgggccagtgataaccccctcgacaggcccttggtgggccaggacgaattttttctggagcagactaaaaagaaaggggttaaaaggcgcgaagcagaggctgacaagcctaggagactcggccgactgaagtatcaggcccctgacattgacgtgcagctgagctctgagttgacggacagcctccggactctgaaaccagagggaaatatcctccgcgaccgctttaaatcattccagagacgcaatatgatcgagccccgagaacgggccaagtttaagcgaaaatataaggtgaagttggttgaaaaacgcgccttccgggaaatccagctgtag

SEQ ID NO: 187932 - DNA, 1437 bp, Artificial Sequence
  derived and/or modified sequence
atggccgctggcggtagcggtgtcggtggaaagagatcttcaaagtctgacgcagatagtggatttttaggccttagaccgacctcagtggaccctgccctgaggcggaggcgcagaggacccaggaataagaaacggggatggagacggctagcccaggagcctcttgggttagaggtggatcaattcctggaagacgtgagactgcaagagcgcaccagcggaggcctgctgagcgaggccccaaatgagaaactgtttttcgtggatacaggtagcaaggagaaaggactgacaaagaagcggaccaaagttcagaaaaaaagcttgctcctgaaaaagccactgagagtggacttgattctcgagaacacaagcaaagtgccagctccgaaagatgtccttgcccatcaggtcccaaacgcaaaaaagctgaggaggaaggagcagttgtgggagaaactggcaaaacagggggagctccccagggaagtacgcagggcacaggccagactactgaacccatccgccacccgcgctaaaccaggccctcaagataccgtagaaagacctttttacgatctgtgggcaagcgacaaccctctggaccggccactggttggtcaggacgaatttttcctggagcaaaccaagaaaaaaggggtgaaaagacctgcacggctacatacaaagccaagccaggcaccggcagtcgaggtcgctcctgctggtgcgtcttataatcctagcttcgaggatcatcagactctgctgtccgcagctcacgaagtggagttgcagcgccagaaggaagcagaaaaactcgagcggcaactggcattgccagctaccgaacaagctgcaacccaggaaagcacctttcaggaactatgtgaggggctccttgaggagtctgatggcgaaggcgagccgggacagggtgaaggcccagaggctggggacgctgaggtctgtcccacccccgctcgattagccacaaccgaaaagaaaactgaacaacaacgccgtagagagaaggcagtccataggctccgcgtgcagcaggcggcattgcgcgctgcgagactgcgccatcaggagctttttcgactcaggggcatcaaagctcaagtagccctgcgcctcgctgaactggctagacgccagagacgacgccaggcacgtagggaggcggaagccgataaacctcgcaggcttggacggctcaaataccaggctccagacattgatgttcagctgagctctgagcttaccgactctttgcgaaccctgaagccagagggtaacatcctgagggatcgcttcaaatcatttcagcgccgtaatatgattgagcctcgagaacgggctaaattcaaacgtaaatacaaggtcaaactggtggagaagagggccttccgggaaattcagctctag

SEQ ID NO: 187933 - DNA, 1419 bp, Artificial Sequence
  derived and/or modified sequence
atggcggctggaggcagtggggttggaggtaagaggtcgagcaaatctgacgccgattcgggcttcctcggcctccgcccaacctcggtagaccccgctcttcgcagacgcaggcggggtcctcgtaacaaaaagcggggatggcgcaggctggcacaggagccactggggctggaagttgatcaatttctggaagatgttcggctgcaggagagaaccagcggcggactcctcagcgaagccccaaatgagaagctgttcttcgtggacactgggtccaaagagaagggactgacaaaaaagcggaccaaagtgcagaaaaagtcccttctcttgaagaaaccattgagagtggacttgatcctcgagaacaccagtaaagtgcccgctccaaaggacgtgctggcccatcaagttccaaacgctaaaaagttgaggaggaaggaacagctgtgggagaagcttgccaaacagggcgaactacctcgtgaggtgcgtagggctcaagccaggctcctcaacccctccgctacgagggcgaaacctggaccacaagacactgtggaaaggcccttttatgacctgtgggcgagtgataaccccctggaccgtcctctcgtggggcaggacgagttctttctggagcaaaccaagaagaaaggagtcaaaaggcccgcaagactgcacaccaagccctctcaggcacctgccgttgaggttgccccagcaggtgcgagctacaatccctcatttgaggatcatcagaccttgttaagcgccgctcatgaagtggaactccagcgccagaaagaagccgaaaagcttgagcgacaactggcattgccagcaactgaacaggctgccacacaggagagtacatttcaggagctgtgtgaggggttgcttgaggagagtgacggagaaggggagccgggacagggagaagggccagaagcaggtgatgccgaagtgtgtccaacacccgctcggcaccacagggaagaggatggcgcagcagcagccaggcgtctgtgtaccggatgtggctatagccgacctaggtgtggaccaccgggaagcggtactagatcttgtagtggatgcgccggatcgcctggcggacccgaggcaggaggagcccgtagacagcggagacgccaggctcgtcgcgaggccgaggccgataagcccaggaggttgggaagactcaaatatcaggcccctgacatcgacgtacagctgagtagcgagctgaccgattcgctgcgcacattaaagcctgaaggcaatattctaagggatcggtttaagtcatttcaaaggagaaacatgatcgaaccacgggaacgagcaaaattcaaaagaaagtacaaggtcaagcttgttgagaaacgagccttcagagagattcaactgtag

SEQ ID NO: 187934 - DNA, 792 bp, Artificial Sequence
  derived and/or modified sequence
atggctgctgggggatccggagtagggggaaagcgtagcagtaagtcggatgccgactccgggtttctgggcctccggccaacaagcgttgatcctgccctaagacgcagaagaaggggtccacgtaataagaaacggggatggcggaggctcgcacaggagcccctgggtctggaagtggaccagttcctagaggatgtgaggctgcaggagcgcacatcgggaggtctccttagcgaagcacctaatgaaaaactgttttttgtcgatactggctccaaggagaagggcctcaccaaaaagcgcacgaaggtgcagaagaagtcactactgctaaagaagccccttagggtcgatttaattctcgaaaacacctcgaaagtgcctgcaccaaaagatgtgttggcccaccaggtgcccaatgcaaagaaactgcgacgcaaggaacaactatgggcaagcgacaatccccttgatcgtcccttagtgggacaggatgagttctttttggaacagaccaaaaaaaaaggcgtgaaaagaagggaagccgaggcagataagccaaggcgcctgggccgattgaagtatcaagctccagatattgacgtgcaactatcttctgagctgacggacagtttacgcacactgaagccggaggggaacatcctgcgcgacagatttaaaagttttcagagacgcaacatgatcgagcctcgggaaagagccaagttcaaacggaagtacaaagtcaagctcgtggagaagcgcgcatttagagagatccagctgtag

SEQ ID NO: 187935 - DNA, 1437 bp, Artificial Sequence
  derived and/or modified sequence
atggccgccggcggcagcggcgtgggcggcaagagaagcagcaagagcgacgccgacagcggcttcctgggcctgagacccaccagcgtggaccccgccctgagaagaagaagaagaggccccagaaacaagaagagaggctggagaagactggcccaggagcccctgggcctggaggtggaccagttcctggaggacgtgagactgcaggagagaaccagcggcggcctgctgagcgaggcccccaacgagaagctgttcttcgtggacaccggcagcaaggagaagggcctgaccaagaagagaaccaaggtgcagaagaagagcctgctgctgaagaagcccctgagagtggacctgatcctggagaacaccagcaaggtgcccgcccccaaggacgtgctggcccaccaggtgcccaacgccaagaagctgagaagaaaggagcagctgtgggagaagctggccaagcagggcgagctgcccagagaggtgagaagagcccaggccagactgctgaaccccagcgccaccagagccaagcccggcccccaggacaccgtggagagacccttctacgacctgtgggccagcgacaaccccctggacagacccctggtgggccaggacgagttcttcctggagcagaccaagaagaagggcgtgaagagacccgccagactgcacaccaagcccagccaggcccccgccgtggaggtggcccccgccggcgccagctacaaccccagcttcgaggaccaccagaccctgctgagcgccgcccacgaggtggagctgcagagacagaaggaggccgagaagctggagagacagctggccctgcccgccaccgagcaggccgccacccaggagagcaccttccaggagctgtgcgagggcctgctggaggagagcgacggcgagggcgagcccggccagggcgagggccccgaggccggcgacgccgaggtgtgccccacccccgccagactggccaccaccgagaagaagaccgagcagcagagaagaagagagaaggccgtgcacagactgagagtgcagcaggccgccctgagagccgccagactgagacaccaggagctgttcagactgagaggcatcaaggcccaggtggccctgagactggccgagctggccagaagacagagaagaagacaggccagaagagaggccgaggccgacaagcccagaagactgggcagactgaagtaccaggcccccgacatcgacgtgcagctgagcagcgagctgaccgacagcctgagaaccctgaagcccgagggcaacatcctgagagacagattcaagagcttccagagaagaaacatgatcgagcccagagagagagccaagttcaagagaaagtacaaggtgaagctggtggagaagagagccttcagagagatccagctgtag

SEQ ID NO: 187936 - DNA, 1419 bp, Artificial Sequence
  derived and/or modified sequence
atggccgccggcggcagcggcgtgggcggcaagagaagcagcaagagcgacgccgacagcggcttcctgggcctgagacccaccagcgtggaccccgccctgagaagaagaagaagaggccccagaaacaagaagagaggctggagaagactggcccaggagcccctgggcctggaggtggaccagttcctggaggacgtgagactgcaggagagaaccagcggcggcctgctgagcgaggcccccaacgagaagctgttcttcgtggacaccggcagcaaggagaagggcctgaccaagaagagaaccaaggtgcagaagaagagcctgctgctgaagaagcccctgagagtggacctgatcctggagaacaccagcaaggtgcccgcccccaaggacgtgctggcccaccaggtgcccaacgccaagaagctgagaagaaaggagcagctgtgggagaagctggccaagcagggcgagctgcccagagaggtgagaagagcccaggccagactgctgaaccccagcgccaccagagccaagcccggcccccaggacaccgtggagagacccttctacgacctgtgggccagcgacaaccccctggacagacccctggtgggccaggacgagttcttcctggagcagaccaagaagaagggcgtgaagagacccgccagactgcacaccaagcccagccaggcccccgccgtggaggtggcccccgccggcgccagctacaaccccagcttcgaggaccaccagaccctgctgagcgccgcccacgaggtggagctgcagagacagaaggaggccgagaagctggagagacagctggccctgcccgccaccgagcaggccgccacccaggagagcaccttccaggagctgtgcgagggcctgctggaggagagcgacggcgagggcgagcccggccagggcgagggccccgaggccggcgacgccgaggtgtgccccacccccgccagacaccacagagaggaggacggcgccgccgccgccagaagactgtgcaccggctgcggctacagcagacccagatgcggcccccccggcagcggcaccagaagctgcagcggctgcgccggcagccccggcggccccgaggccggcggcgccagaagacagagaagaagacaggccagaagagaggccgaggccgacaagcccagaagactgggcagactgaagtaccaggcccccgacatcgacgtgcagctgagcagcgagctgaccgacagcctgagaaccctgaagcccgagggcaacatcctgagagacagattcaagagcttccagagaagaaacatgatcgagcccagagagagagccaagttcaagagaaagtacaaggtgaagctggtggagaagagagccttcagagagatccagctgtag

SEQ ID NO: 187937 - DNA, 792 bp, Artificial Sequence
  derived and/or modified sequence
atggccgccggcggcagcggcgtgggcggcaagagaagcagcaagagcgacgccgacagcggcttcctgggcctgagacccaccagcgtggaccccgccctgagaagaagaagaagaggccccagaaacaagaagagaggctggagaagactggcccaggagcccctgggcctggaggtggaccagttcctggaggacgtgagactgcaggagagaaccagcggcggcctgctgagcgaggcccccaacgagaagctgttcttcgtggacaccggcagcaaggagaagggcctgaccaagaagagaaccaaggtgcagaagaagagcctgctgctgaagaagcccctgagagtggacctgatcctggagaacaccagcaaggtgcccgcccccaaggacgtgctggcccaccaggtgcccaacgccaagaagctgagaagaaaggagcagctgtgggccagcgacaaccccctggacagacccctggtgggccaggacgagttcttcctggagcagaccaagaagaagggcgtgaagagaagagaggccgaggccgacaagcccagaagactgggcagactgaagtaccaggcccccgacatcgacgtgcagctgagcagcgagctgaccgacagcctgagaaccctgaagcccgagggcaacatcctgagagacagattcaagagcttccagagaagaaacatgatcgagcccagagagagagccaagttcaagagaaagtacaaggtgaagctggtggagaagagagccttcagagagatccagctgtag

SEQ ID NO: 187938 - protein, 351 aa, Artificial Sequence
  derived and/or modified sequence
MGDPERPEAAGLDQDERSSSDTNESEIKSNEEPLLRKSSRRFVIFPIQYPDIWKMYKQAQASFWTAEEVDLSKDLPHWNKLKADEKYFISHILAFFAASDGIVNENLVERFSQEVQVPEARCFYGFQILIENVHSEMYSLLIDTYIRDPKKREFLFNAIETMPYVKKKADWALRWIADRKSTFGERVVAFAAVEGVFFSGSFAAIFWLKKRGLMPGLTFSNELISRDEGLHCDFACLMFQYLVNKPSEERVREIIVDAVKIEQEFLTEALPVGLIGMNCILMKQYIEFVADRLLVELGFSKVFQAENPFDFMENISLEGKTNFFEKRVSEYQRFAVMAETTDNVFTLDADF

SEQ ID NO: 187939 - protein, 43 aa, Artificial Sequence
  derived and/or modified sequence
MGDPERPEAAGLDQDERSSSDTNESEIKSNEEPLLRKSSRRSF

SEQ ID NO: 187940 - protein, 297 aa, Artificial Sequence
  derived and/or modified sequence
MYKQAQASFWTAEEVDLSKDLPHWNKLKADEKYFISHILAFFAASDGIVNENLVERFSQEVQVPEARCFYGFQILIENVHSEMYSLLIDTYIRDPKKREFLFNAIETMPYVKKKADWALRWIADRKSTFGERVVAFAAVEGVFFSGSFAAIFWLKKRGLMPGLTFSNELISRDEGLHCDFACLMFQYLVNKPSEERVREIIVDAVKIEQEFLTEALPVGLIGMNCILMKQYIEFVADRLLVELGFSKVFQAENPFDFMENISLEGKTNFFEKRVSEYQRFAVMAETTDNVFTLDADF

SEQ ID NO: 187941 - DNA, 1056 bp, Artificial Sequence
  derived and/or modified sequence
atgggggaccctgagagaccagaggccgctggcctggaccaagatgaacggtcttcgagtgatacaaacgagtctgagatcaagagtaatgaggagccactgcttcggaaatcctcacgtcggtttgtgatcttccctatccagtaccctgacatctggaagatgtacaaacaggctcaggcctccttctggacagcggaggaggtcgatttaagtaaggatttaccacattggaacaaactcaaggccgatgaaaagtacttcatctcccatatcttggcattctttgcagcatcagacggaatagtgaatgagaatttggtcgaacgcttctcacaggaagtccaggtccccgaagcccggtgcttctatggctttcagatccttatcgagaatgtacatagtgagatgtactcactgctgatagacacctatattagagatccaaagaagagggaattcctgttcaatgcaatcgaaacaatgccttatgttaaaaaaaaggcggattgggctctgcggtggattgccgaccgaaagtcaacgttcggtgaacgggtggttgcattcgcagctgttgaaggggtgttcttctcaggctcttttgccgccatcttctggctgaagaagcgtgggctgatgcctgggcttacattcagtaacgagctcatcagtcgcgacgaaggactccattgtgacttcgcatgtttaatgtttcagtacctcgtaaataaacctagtgaggaacgggtgagggagattattgtggacgccgtcaaaatcgagcaagaattccttactgaagcgctgcctgttggtttgatcggcatgaactgtatcctgatgaagcagtacattgaattcgtcgccgaccggctcctcgtagaactcggcttttccaaagtgttccaggcagaaaatccattcgatttcatggagaatatttccttggaaggaaagaccaatttttttgaaaaaagagtctccgagtaccagaggttcgccgtaatggctgaaaccacagacaacgtcttcacgctcgacgcagacttttag

SEQ ID NO: 187942 - DNA, 132 bp, Artificial Sequence
  derived and/or modified sequence
atgggagatccagaacggcccgaggccgccgggctcgaccaggacgagaggtccagcagtgacacaaacgaatcagaaatcaagtccaatgaggagcctctcctccggaagagttctcggcgctctttttag

SEQ ID NO: 187943 - DNA, 894 bp, Artificial Sequence
  derived and/or modified sequence
atgtacaagcaggcccaggcttctttttggaccgccgaagaagtggatttaagtaaggatctgccccactggaataaactgaaagccgatgaaaaatacttcatttcacacatcttggctttctttgcagcatcagacggaatagtgaacgagaaccttgtggagaggttcagccaggaagtgcaggtgccagaagctagatgcttctacggattccagattctcatcgagaatgtgcattccgaaatgtatagtctactcatagacacgtacatccgcgatccaaagaagcgggagtttctgttcaacgcaatcgaaaccatgccctacgtgaagaaaaaggcggactgggcactgagatggattgctgatcgcaagtcaacattcggagagcgcgttgttgcttttgcggcagtagaaggagtattcttttctgggagtttcgcagcgatattctggctgaagaagagaggcctgatgcctgggcttactttctctaacgagctgatctcccgcgatgagggtctgcattgtgattttgcctgcttgatgttccagtacctggttaacaaaccttcagaggaacgtgtccgggagatcatcgttgacgcagtgaagattgaacaagagtttctcaccgaagcgttgccagtgggtttaatcggcatgaactgcatcctcatgaaacagtacatcgaatttgtcgctgataggttactagtcgagcttgggttctcaaaagtgttccaagctgaaaatcccttcgacttcatggagaatatttctctggaaggaaagacaaactttttcgagaagcgggtctctgagtaccaacggtttgccgttatggccgaaactaccgataatgtttttacactggatgcagacttctag

SEQ ID NO: 187944 - DNA, 1056 bp, Artificial Sequence
  derived and/or modified sequence
atgggagaccctgagaggcctgaggccgccggcctggaccaggatgagaggagcagcagtgacaccaatgaaagtgagatcaagagcaatgaggagcccctgctgaggaagagcagccgccgcttcgtcatcttccccatccagtacccagacatctggaagatgtacaagcaggcccaggccagcttctggacagctgaggaggtggacctgagcaaggacctgccccactggaacaagctgaaggcagatgagaagtacttcatcagccacatcctggccttctttgctgccagtgatggcatcgtgaatgaaaacctggtggagcgcttcagccaggaggtgcaggtgcctgaggcccgctgcttctacggcttccagatcctgattgaaaatgtgcacagcgagatgtacagcctgctgattgacacctacatccgggaccccaagaagcgggagttcctgttcaatgccatcgagaccatgccctacgtgaagaagaaggctgactgggccctgcgctggattgctgacaggaagagcacctttggagagcgggtggtggcctttgctgctgtggagggcgtcttcttcagcggcagctttgctgccatcttctggctgaagaagaggggcctgatgcctggcctgaccttcagcaatgaactcatcagcagagatgagggcctgcactgtgactttgcctgcctgatgttccagtacctggtgaacaagcccagcgaggagcgggtgcgggagatcatcgtggatgctgtgaagattgagcaggagttcctgacagaggccctgcctgtgggcctgattggcatgaactgcatcctgatgaagcagtacatcgagtttgtggccgaccggctgctggtggagctgggcttcagcaaggtgttccaggccgagaacccctttgacttcatggagaacatcagcctggagggcaagaccaacttctttgagaagagggtgtctgagtaccagagatttgctgtgatggccgagaccacagacaacgtgttcaccctggatgctgacttctag

SEQ ID NO: 187945 - DNA, 132 bp, Artificial Sequence
  derived and/or modified sequence
atgggagaccctgagaggcctgaggccgccggcctggaccaggatgagaggagcagcagtgacaccaatgaaagtgagatcaagagcaatgaggagcccctgctgaggaagagcagccgccgctccttctag

SEQ ID NO: 187946 - DNA, 894 bp, Artificial Sequence
  derived and/or modified sequence
atgtacaagcaggcccaggccagcttctggacagctgaggaggtggacctgagcaaggacctgccccactggaacaagctgaaggcagatgagaagtacttcatcagccacatcctggccttctttgctgccagtgatggcatcgtgaatgaaaacctggtggagcgcttcagccaggaggtgcaggtgcctgaggcccgctgcttctacggcttccagatcctgattgaaaatgtgcacagcgagatgtacagcctgctgattgacacctacatccgggaccccaagaagcgggagttcctgttcaatgccatcgagaccatgccctacgtgaagaagaaggctgactgggccctgcgctggattgctgacaggaagagcacctttggagagcgggtggtggcctttgctgctgtggagggcgtcttcttcagcggcagctttgctgccatcttctggctgaagaagaggggcctgatgcctggcctgaccttcagcaatgaactcatcagcagagatgagggcctgcactgtgactttgcctgcctgatgttccagtacctggtgaacaagcccagcgaggagcgggtgcgggagatcatcgtggatgctgtgaagattgagcaggagttcctgacagaggccctgcctgtgggcctgattggcatgaactgcatcctgatgaagcagtacatcgagtttgtggccgaccggctgctggtggagctgggcttcagcaaggtgttccaggccgagaacccctttgacttcatggagaacatcagcctggagggcaagaccaacttctttgagaagagggtgtctgagtaccagagatttgctgtgatggccgagaccacagacaacgtgttcaccctggatgctgacttctag

SEQ ID NO: 187947 - DNA, 1056 bp, Artificial Sequence
  derived and/or modified sequence
atgggcgaccccgagcggcccgaggccgccggcctggaccaggacgagcgcagtagctcagatacgaatgagtcagagatcaaaagcaatgaagagccactacttaggaagagctcacggcgcttcgttatttttccaattcagtacccagacatttggaaaatgtataaacaggcccaggctagcttctggacagctgaggaagtggacttgagtaaagatctcccacattggaataaactcaaggctgatgagaaatatttcataagccacatcctagctttctttgccgcaagtgatggtattgtcaacgagaatctggttgaacggttttcccaggaagttcaggttccggaagccagatgcttttacggatttcagatccttatagagaatgtccactcagagatgtattccctgcttatcgacacttatatcagggatccaaagaagcgcgagttccttttcaatgctattgagacgatgccatatgtgaaaaaaaaagctgactgggccctccgttggattgcggatagaaaatccacctttggtgagagagtcgtggccttcgcggctgtggagggcgtgtttttttctgggagttttgccgcaattttctggctgaagaaacggggattaatgccaggtctcacattcagtaacgaactgatttcgcgggacgagggactgcattgtgacttcgcctgcttgatgttccagtacctggttaacaaaccctctgaggagagggtgagggagatcatcgtagatgcagttaaaattgagcaagagtttctaacagaagccttgcccgtaggactcattggaatgaactgtattttgatgaagcagtacatcgagttcgttgctgatcgtttactggtcgagctcggtttttctaaagttttccaagctgagaatccatttgacttcatggagaacatatctctggagggaaagaccaacttttttgaaaaaagagtgtccgagtaccaaaggtttgcggttatggccgagaccaccgacaacgtgtttactttagacgcggacttctag

SEQ ID NO: 187948 - DNA, 132 bp, Artificial Sequence
  derived and/or modified sequence
atgggcgaccccgagcggcccgaggccgccggcctggaccaggacgaacgcagcagctctgacacaaacgaatccgagataaagagcaatgaagagcctctgctccgaaagtccagccggcggagcttctag

SEQ ID NO: 187949 - DNA, 894 bp, Artificial Sequence
  derived and/or modified sequence
atgtacaagcaggcccaggccagcttctggaccgccgaggaggtggacctcagcaaagatctgccccattggaataaattgaaagctgacgagaagtacttcatttcccacatcctagcttttttcgcggcgtcggatggaatagtcaatgagaaccttgtagaacgatttagtcaggaagttcaagttcccgaggccaggtgcttttatggctttcagattctgattgagaacgtccactctgagatgtacagtctgttgattgacacttatatcagagatcctaagaaaagagaattcctcttcaacgcaattgaaacaatgccgtatgtgaagaaaaaggccgactgggccctcaggtggatcgccgaccgcaagtccacattcggcgagcgagtcgtggcattcgcagctgtcgagggggtattcttcagtggcagctttgccgctattttctggctgaagaagcgcgggctcatgcccggactcaccttcagcaatgagctgatctcacgtgatgaagggttgcattgcgattttgcatgtctgatgtttcaatatctagtgaacaagccctctgaggaaagggtacgggagattatagtggatgccgtcaagatcgaacaggagtttctgacagaagctcttcccgtggggttgattggcatgaactgtatactcatgaagcagtacattgaattcgtggccgataggctcctggttgagttagggttcagtaaggtcttccaggccgagaaccccttcgattttatggaaaatatttcactggagggaaaaaccaacttttttgaaaaaagggtgagcgaataccagcgcttcgcagtgatggcagagacgaccgataatgtgttcaccttggatgcggacttttag

SEQ ID NO: 187950 - DNA, 1056 bp, Artificial Sequence
  derived and/or modified sequence
atgggtgatcctgagcggccagaggctgccggactggatcaggatgaacggtcatcctccgatactaacgaaagtgaaattaagtcgaacgaggaacctctcttgcgaaaatcctccagaaggtttgtgatcttccccatacaatatcctgatatatggaaaatgtacaaacaagcccaggctagtttctggaccgccgaggaggtggacctgtcgaaagatctcccccactggaataaactaaaagcagatgaaaagtattttatctcccacattctcgccttcttcgctgcatcagacgggatcgtgaatgagaatcttgtcgaacggttctcacaggaggttcaggtccctgaggcacgatgcttttatggtttccagattctgatcgagaacgtgcattctgaaatgtactcattgctaattgatacatacattcgggatccaaagaagcgggaatttctgtttaatgctatagagacaatgccatacgtcaagaagaaagcagactgggcgctgaggtggatagccgacagaaagagcacatttggtgagcgcgttgttgcattcgccgcagtggaaggcgtcttcttctcaggatcttttgccgctatattctggctgaaaaagcgcggactaatgcctggccttacattctccaatgagttaatatctcgggatgaaggactgcattgtgactttgcatgcctgatgtttcagtatcttgttaacaagccttccgaggaacgggtccgcgagattatcgtggacgcagtaaagatcgagcaggagttcctcaccgaggccctgccggtgggactcatcggtatgaattgtatcttaatgaagcagtacatcgaatttgtcgcagaccgacttctcgtagagctgggtttctctaaggtcttccaggcagaaaatcctttcgacttcatggagaatatctcactggagggtaaaacaaacttcttcgagaagcgggtgtctgaataccagaggtttgccgtgatggccgagaccacagacaatgtattcactctcgatgccgacttttag

SEQ ID NO: 187951 - DNA, 132 bp, Artificial Sequence
  derived and/or modified sequence
atgggcgatccagagcgacctgaagcagcaggactggatcaagatgaacgcagtagcagcgacacaaacgagtccgagatcaagtccaatgaagaaccattgctccggaagagctctcgcagatcattttag

SEQ ID NO: 187952 - DNA, 894 bp, Artificial Sequence
  derived and/or modified sequence
atgtacaagcaggcgcaagccagcttttggacagccgaggaagtggacctgtccaaggatctgcctcattggaacaagttgaaagccgacgaaaaatacttcatcagccacattctcgcgttctttgctgccagtgatggaatcgtgaacgagaatctcgtggagagattttctcaagaggtccaagtgcccgaggcacgttgcttttacggttttcagatccttatcgagaatgtccattcagagatgtacagtttgctcatcgacacgtatattcgtgaccccaagaagagggagtttctgtttaatgctatcgaaactatgccctatgtcaagaagaaagcagactgggcgctcaggtggatcgccgatcgcaagagcacatttggcgaacgagtcgtggcttttgccgctgtggaaggagtgttttttagcggatcctttgccgcaattttttggctcaaaaaaaggggtttgatgcccggtctgaccttcagcaacgaattgatctccagggacgaaggtctccactgtgactttgcttgcttgatgtttcagtacctggtcaataaaccctctgaggagcgtgtcagagagattatagttgatgcagtaaaaatagagcaggaatttctgactgaggctctgcctgttggcctcatcggaatgaactgtattttgatgaagcagtacatcgagttcgtggccgataggctactggttgagctcggtttttctaaagtcttccaggcagaaaatccattcgactttatggaaaatatcagcctggaaggcaagactaacttcttcgaaaaaagggtgagcgagtatcagaggttcgcagtgatggctgagacgacagacaacgtgtttacactggacgccgatttttag

SEQ ID NO: 187953 - DNA, 4931 bp, Artificial Sequence
  derived and/or modified sequence
ggctggccgaagttaggcggagccccgaggcgggggaggcggggccgggccggcgcagggagagtcactcaatggacaggcgagaaagcaggaccggcgcggcggggcggggccggccgagtccctagagctgggggcggggcggacccagcggaccagcggaccacctgggtgctgtcgtagttggaggtggcctgaggagctcagttccctcagcgcccgtagcttcggcggagtctgcgcgatgggcgacccggaaaggccggaagcggccgggctggatcaggatgagagatcatcttcagacaccaacgaaagtgaaataaagtcaaatgaagagccactcctaagaaagagttctcgccggtttgtcatctttccaatccagtaccctgatatttggaaaatgtataaacaggcacaggcttccttctggacagcagaagaggtcgacttatcaaaggatctccctcactggaacaagcttaaagcagatgagaagtacttcatctctcacatcttagccttttttgcagccagtgatggaattgtaaatgaaaatttggtggagcgctttagtcaggaggtgcaggttccagaggctcgctgtttctatggctttcaaattctcatcgagaatgttcactcagagatgtacagtttgctgatagacacttacatcagagatcccaagaaaagggaatttttatttaatgcaattgaaaccatgccctatgttaagaaaaaagcagattgggccttgcgatggatagcagatagaaaatctacttttggggaaagagtggtggcctttgctgctgtagaaggagttttcttctcaggatcttttgctgctatattctggctaaagaagagaggtcttatgccaggactcactttttccaatgaactcatcagcagagatgaaggacttcactgtgactttgcttgcctgatgttccaatacttagtaaataagccttcagaagaaagggtcagggagatcattgttgatgctgtcaaaattgagcaggagtttttaacagaagccttgccagttggcctcattggaatgaattgcattttgatgaaacagtacattgagtttgtagctgacagattacttgtggaacttggattctcaaaggtttttcaggcagaaaatccttttgattttatggaaaacatttctttagaaggaaaaacaaatttctttgagaaacgagtttcagagtatcagcgttttgcagttatggcagaaaccacagataacgtcttcaccttggatgcagatttttaaaaaacctcttgttttaaaactctataaacttgtcattggtaaatagtagtctattttcctctgcttaaaaaaaattttaagtatatcctttaaaggactgggggtttgctcaaaaggaaatccaaaacctattctaaacaatttgcatttatataattttcctgtttaacaacaagagtgtgacctaaatgcttttgtcttgtcactgaaataaaagatggcattatgtggttaagagcatggggcgaggggtcagacatgagtctaaggttctgcccttactccagtgtgtgacccttggcaagtcagttaatcttggtaaacctcggtgtacttatctttaaaatgggagtaatagtaggtcctaaattcatagagtggatattaggattaggatgcaaaaataaatgcttaaccaacactactactgttagcaccactactaattatcattcattgataatattaattgcaatgatgttgtaataaaatactctcatttccttaaaataattgtgattctaggtcctaggatctagaattagatctttgtatttttaatgcttaggggaagaatataagtatctccttaaaaagaacataattctcattcacgcaagaataagttctttgaattccttagtatgtagtgaagaaaatttagttgttagttgctttgggaagcctacttatggagtggaaaccaggaggttatcatggtagttgaccttataagaaaaatgattcttcttcagaaattaaaaacataactattgccagatttagctctggaatgtttagaatcaggctagaatagcattttccaaagaatattctaagagctattagctcctctagatatttttttgggggaaaaaggggattctgtggtcagatgagtttgggaaatgctgaacacttcattcttctttagcaagtacagtcagtacatcaaagactgagcagttcagtggtacataaatttatctcgccctgcatattcccaacatacttaacacagatgttttttacctgttaacatctcacccagctagtgttcctcagaacaaagattggaaaaagctggccgagaaccatttatacatagaggaagggcttatggactgagaaagggagaacatggtagggattattgaatcatttcaaatttataccagcctgaatagtgtaccagcaattgacttaggctgtgtttctttatggttttaaaactcttgagctgttataagagatagttcttttaatgtgactatgcaacatgatagccaatggtgagggaaaaggaggtttctctagaagagtctgatgaaaggccgggaaccaaggtttttgagaagtctgcccctatttatttttagtaagtatcaagaggtagcctgagcctagttagagttagacctgtctttggatgaagaagtcttaatactgaaatactgaatttttaatacattattatttggtattctgtataccccttcaagcagttgtttcccattcccaacaaactgtactttatacaattctggatgctaaaacttagagattttctctttgcataaattttggctccattctttccataacaatctaatcaaaactgggagttctcaagtgaatgcaaaaggagcaggccataactttatttgttagatacactgtcagaaacttgagatcttttggcctatgataataccattaatttttgcattgcttcagtttgccaagtgtttttacatcatctcatttgatctcaaaacagcttgacagagcaactgttattgaaatattacagatggaaagaatgaggctcagggaagttaaatgacttggccaagatctgctcatcgtcactgtctgtacagtatttttttttagaggttgtaatgtctcagatttagtcctttaccatctatgttgatttgcttttgtctatttcctcattaattgaatatactttaaatatatatattaaagtatcaaaatatagagagacatttgaactgtattcaggtaatatgtttaaagatatttatatattgccatacaaaaacttaacatttaaaactgataatatctgtaatgacatcagaatgaaagaaaaaaaattgtacagtgtatattcctttgttttgaatccaaatctttttcataggtaatgacagatgccttaatgtgaagcttatttataatagcaataaacctaactggatttggatgaagaagtcttaatactgacatactggatttttaatgcactggtttgttatttggtattctatctctttttccaggcctccaggttgcacatttatttattatgttcaatactttggttcttagttcttaaagaatcaagaagttgtgtaatcttttaaaaatattatcttgcagataaagaaaaaaattaagagtgtgtttacaactgttttctcttttttacagtacatgtatttaaatcattgctataataaagttaagttcattaggaatataaaaacttgcagttctatgatagattgcatttattaaaaatgtttcattgtatcacatagaaatatggccaggaaggacttgagaagacagtttgatccattgcttttagacaggactgggttttgctgtccaattatatacaataatagtttttcttacaactaagctggccccagccttgtcttgatattaatacatgaaatttttataattgtctcattgtctcatttagaaacatccatatttttctgctttttctattgccattttttatttgtgcatgaattgattattgagaaaatgtagcagtttgcatatttaaaaattaatcattttgcattttacatttaaatatgctaacatcactgtcatagaattcccaaatttcatttgtagatactgaactaagggctaatgtcaggagctgatttttaatgataaagctgcagatgggctaaataaaagccaaattaatcctacaatcaggtattatgtttttaaaccaagttgagtgaattggtagtggacttgggaaatcttccccagcagaatctggatgaatggcacagaattgaaatctctttgtttcccaccatttccctttaagtgctctgctcctttgtaaaaagttaaagatttgaaagagaatctcatattcccgaggcattaggaagaaaggatttaatcccttcaatttggggcttaatcttgtttaaaaaaatgtaagtgaagatggaaggctggagagaatgattgctttttgtacagttaaataaggtcacaatattcttacatactttgttttacaactgtgttttcattttttcaaatgtctggccatttagcaaagttatttactatttactgtgtacatagaaagctttattatgtgtggtgtatctaaattttttttgctgaaatacattatggtcaatcaagccaagcctgcatgtacagaatttgtttttttttcaaataaattagttgttttcttatttttttggcttagtatgttgaaataaactatggtatcttcatcattttgtacatttcctttttgaggaaggtttctttataagtgcaagggctaccctaataaaggaatgtatatacttac

SEQ ID NO: 187954 - DNA, 1056 bp, Artificial Sequence
  derived and/or modified sequence
atgggcgaccccgagagacccgaggccgccggcctggaccaggacgagagaagcagcagcgacaccaacgagagcgagatcaagagcaacgaggagcccctgctgagaaagagcagcagaagattcgtgatcttccccatccagtaccccgacatctggaagatgtacaagcaggcccaggccagcttctggaccgccgaggaggtggacctgagcaaggacctgccccactggaacaagctgaaggccgacgagaagtacttcatcagccacatcctggccttcttcgccgccagcgacggcatcgtgaacgagaacctggtggagagattcagccaggaggtgcaggtgcccgaggccagatgcttctacggcttccagatcctgatcgagaacgtgcacagcgagatgtacagcctgctgatcgacacctacatcagagaccccaagaagagagagttcctgttcaacgccatcgagaccatgccctacgtgaagaagaaggccgactgggccctgagatggatcgccgacagaaagagcaccttcggcgagagagtggtggccttcgccgccgtggagggcgtgttcttcagcggcagcttcgccgccatcttctggctgaagaagagaggcctgatgcccggcctgaccttcagcaacgagctgatcagcagagacgagggcctgcactgcgacttcgcctgcctgatgttccagtacctggtgaacaagcccagcgaggagagagtgagagagatcatcgtggacgccgtgaagatcgagcaggagttcctgaccgaggccctgcccgtgggcctgatcggcatgaactgcatcctgatgaagcagtacatcgagttcgtggccgacagactgctggtggagctgggcttcagcaaggtgttccaggccgagaaccccttcgacttcatggagaacatcagcctggagggcaagaccaacttcttcgagaagagagtgagcgagtaccagagattcgccgtgatggccgagaccaccgacaacgtgttcaccctggacgccgacttctag

SEQ ID NO: 187955 - DNA, 132 bp, Artificial Sequence
  derived and/or modified sequence
atgggcgaccccgagagacccgaggccgccggcctggaccaggacgagagaagcagcagcgacaccaacgagagcgagatcaagagcaacgaggagcccctgctgagaaagagcagcagaagaagcttctag

SEQ ID NO: 187956 - DNA, 894 bp, Artificial Sequence
  derived and/or modified sequence
atgtacaagcaggcccaggccagcttctggaccgccgaggaggtggacctgagcaaggacctgccccactggaacaagctgaaggccgacgagaagtacttcatcagccacatcctggccttcttcgccgccagcgacggcatcgtgaacgagaacctggtggagagattcagccaggaggtgcaggtgcccgaggccagatgcttctacggcttccagatcctgatcgagaacgtgcacagcgagatgtacagcctgctgatcgacacctacatcagagaccccaagaagagagagttcctgttcaacgccatcgagaccatgccctacgtgaagaagaaggccgactgggccctgagatggatcgccgacagaaagagcaccttcggcgagagagtggtggccttcgccgccgtggagggcgtgttcttcagcggcagcttcgccgccatcttctggctgaagaagagaggcctgatgcccggcctgaccttcagcaacgagctgatcagcagagacgagggcctgcactgcgacttcgcctgcctgatgttccagtacctggtgaacaagcccagcgaggagagagtgagagagatcatcgtggacgccgtgaagatcgagcaggagttcctgaccgaggccctgcccgtgggcctgatcggcatgaactgcatcctgatgaagcagtacatcgagttcgtggccgacagactgctggtggagctgggcttcagcaaggtgttccaggccgagaaccccttcgacttcatggagaacatcagcctggagggcaagaccaacttcttcgagaagagagtgagcgagtaccagagattcgccgtgatggccgagaccaccgacaacgtgttcaccctggacgccgacttctag

SEQ ID NO: 187957 - protein, 103 aa, Artificial Sequence
  derived and/or modified sequence
METVQELIPLAKEMMAQKRKGKMVKLYVLGSVLALFGVVLGLMETVCSPFTAARRLRDQEAAVAELQAALERQALQKQALQEKGKQQDTVLGGRALSNRQHAS

SEQ ID NO: 187958 - DNA, 866 bp, Artificial Sequence
  derived and/or modified sequence
gcggagtctccaactgggagagctgcagctgccgagaggaggagaacgctgaggtcggtcggaccaacggacgcgctgaccgctgccaactgcagctcgcgctgcctcctgctcgcgccgtgccactaaggtcattcccgcctccgagagcccagagccgagatggaaacggtccaggagctgatccccctggccaaggagatgatggcccagaagcgcaaggggaagatggtgaagctgtacgtgctgggcagcgtgctggccctcttcggcgtggtgctcggcctgatggagactgtgtgcagccccttcacggccgccagacgtctgcgggaccaggaggcagccgtggcggagctgcaggccgccctggagcgacaggctctccagaagcaagccctgcaggagaaaggcaagcagcaggacacggtcctcggcggccgggccctgtccaaccggcagcacgcctcctaggaactgtgggagaccagcggagtgggagggagacgcagtagacagagacagaccgagagaggaatggagagacagagggggcgcgcgcacaggagcctgactccgctgggagagtgcaggagcacgtgctgttttttatttggacttaacttcagagaaaccgctgacatctagaactgacctaccacaagcatccaccaaaggagtttgggattgagttttgctgctgtgcagcactgcattgtcatgacatttccaacactgtgtgaattatctaaatgcgtctaccattttgcactagggaggaaggataaatgctttttatgttattattattaattattacaatgaccaccattttgcattttgaaataaaaaaactttttatacca

SEQ ID NO: 187959 - DNA, 312 bp, Artificial Sequence
  derived and/or modified sequence
atggagactgtgcaagaactcatccctttagcgaaggaaatgatggcccaaaagagaaaaggcaagatggtgaaactttatgtgctcgggagtgtattggcattgttcggagttgttctgggactcatggagactgtgtgcagcccattcacagccgccagaagactccgcgatcaagaggccgccgtggctgaattgcaggctgccctggagcggcaggccttgcagaaacaggcacttcaagagaagggcaaacagcaagacactgtcctgggaggcagggcactatctaatcgccaacacgcctcttag

SEQ ID NO: 187960 - DNA, 312 bp, Artificial Sequence
  derived and/or modified sequence
atggagaccgtgcaggagctgatccccctggccaaggagatgatggcccagaagaggaagggcaagatggtgaagctgtatgtgctgggctctgtgctggccctgtttggagtggtgctgggcctgatggagaccgtgtgcagccccttcaccgctgcccggcggctgcgggaccaggaggccgctgtggccgagctgcaggccgccctggagcggcaggccctgcagaagcaggccctgcaggagaagggcaagcagcaggacacagtgctgggcggccgggccctgagcaaccggcagcacgccagctag

SEQ ID NO: 187961 - DNA, 312 bp, Artificial Sequence
  derived and/or modified sequence
atggagaccgtgcaggagctgatccccctggccaaggagatgatggcccagaaacgtaaaggaaagatggtgaagctgtatgtattaggcagcgtgctcgcactcttcggtgtggtgctcggcctgatggaaactgtttgttcaccctttacagccgctcgcagactgagagaccaagaggctgctgtggccgagttacaggccgccctggagcgccaggcactccaaaaacaagcgctccaggagaagggcaagcagcaggataccgtgctgggaggacgcgcactctccaacagacagcatgccagttag

SEQ ID NO: 187962 - DNA, 312 bp, Artificial Sequence
  derived and/or modified sequence
atggagaccgttcaggaactgatcccattggctaaggaaatgatggcacagaaacggaagggaaagatggttaagctgtacgtgctgggatcagtgctcgccttatttggagttgtgctgggcctgatggaaactgtctgttcacccttcacagctgcccgtcggctgcgggaccaggaagcggctgttgcggagttgcaggcagccttagagcgccaagccttgcagaagcaggccctgcaggaaaagggcaaacagcaggacaccgtcctgggcggaagggcactatctaatcgccaacatgcaagctag

SEQ ID NO: 187963 - DNA, 312 bp, Artificial Sequence
  derived and/or modified sequence
atggagaccgtgcaggagctgatccccctggccaaggagatgatggcccagaagagaaagggcaagatggtgaagctgtacgtgctgggcagcgtgctggccctgttcggcgtggtgctgggcctgatggagaccgtgtgcagccccttcaccgccgccagaagactgagagaccaggaggccgccgtggccgagctgcaggccgccctggagagacaggccctgcagaagcaggccctgcaggagaagggcaagcagcaggacaccgtgctgggcggcagagccctgagcaacagacagcacgccagctag

SEQ ID NO: 187964 - protein, 509 aa, Artificial Sequence
  derived and/or modified sequence
MGVQAGLFGMLGFLGVALGGSPALRWYRTSCHLTKAVPGNPLGYLSFLAKDAQGLALIHARWDAHRRLQSCSWEDEPELTAAYGALCAHETAWGSFIHTPGPELQRALATLQSQWEACRALEESPAGARKKRAAGQSGVPGGGHQREKRGWTMPGTLWCGVGDSAGNSSELGVFQGPDLCCREHDRCPQNISPLQYNYGIRNYRFHTISHCDCDTRFQQCLQNQHDSISDIVGVAFFNVLEIPCFVLEEQEACVAWYWWGGCRMYGTVPLARLQPRTFYNASWSSRATSPTPSSRSPAPPKPRQKQHLRKGPPHQKGSKRPSKANTTALQDPMVSPRLDVAPTGLQGPQGGLKPQGARWVCRSFRRHLDQCEHQIGPREIEFQLLNSAQEPLFHCNCTRRLARFLRLHSPPEVTNMLWELLGTTCFKLAPPLDCVEGKNCSRDPRAIRVSARHLRRLQQRRHQLQDKGTDERQPWPSEPLRGPMSFYNQCLQLTQAARRPDRQQKSWSQ

SEQ ID NO: 187965 - DNA, 1530 bp, Artificial Sequence
  derived and/or modified sequence
atgggcgtacaggccggactcttcgggatgttaggcttccttggcgttgccttgggcggatcacctgccctcagatggtataggacaagctgtcatctgacgaaggcagttccaggcaatccactcggctatctgagcttcctggctaaagatgcacaggggctcgcactcatccacgcacggtgggacgcccaccgtagactgcagagctgtagttgggaggacgagcctgaactgacagccgcttacggcgccctgtgcgcccacgaaaccgcctggggcagcttcatccacacacccggcccagagctgcagagggccctggctacgctgcagtcccagtgggaggcgtgcagagctttggaagagagccctgccggtgctcgcaagaagcgggccgcgggtcaatcaggagtccctggcggtggccatcagcgagaaaagagagggtggaccatgcccgggacattgtggtgtggggtgggcgacagcgcagggaattcttcagagctgggagtgttccaagggcccgacctctgctgccgcgagcatgaccggtgcccacagaatatttcccccttgcaatataactacggtataaggaactaccgttttcatacaatctctcactgtgactgcgatacgcgcttccagcagtgcttacagaatcagcatgactccatctctgacatcgtgggagtggctttttttaacgttctggagatcccctgctttgttctggaggagcaagaggcctgcgttgcttggtattggtggggggggtgtcggatgtacggaacagtaccgctcgcacgcctacagccccggacgttttacaacgcgtcctggagctcacgtgccaccagtcccactccaagctctcggtcccccgctccacccaaaccaaggcagaaacagcacctccgtaagggaccaccccatcagaaaggatccaaacgtccctcaaaggctaatacgaccgcactgcaggacccaatggtgtcaccccggctggacgtcgcgcccacagggttgcagggaccacagggtggattgaaaccccagggcgcaagatgggtgtgccgatctttcagacggcatctggatcagtgtgaacaccaaatcggaccgcgggagatcgagttccagctcctcaacagcgcacaggagcccctcttccactgcaattgtactagaagactggcgcgcttcctgcgccttcattccccacccgaggtgacgaatatgctttgggagctgttaggcaccacctgctttaagttggccccccctctcgattgcgttgaaggcaagaactgtagccgcgacccacgggccatccgagtgtccgcgcgacatttacgaaggctgcaacaacgccgccatcagctccaggataaagggactgacgagagacagccgtggccttccgaaccattgcggggcccaatgagtttctataatcagtgtcttcagttgactcaagcagctcggaggcccgatcgacagcagaagagttggtcacaatag

SEQ ID NO: 187966 - DNA, 1530 bp, Artificial Sequence
  derived and/or modified sequence
atgggcgtgcaggccggcctgtttggcatgctgggcttcctgggcgtggccctgggcggcagccctgccctgcgctggtaccgcaccagctgccacctgaccaaggctgtgcccggcaaccccctgggctacctgtccttcctggccaaggatgcccagggcctggccctgattcatgcccgctgggatgcccaccggcggctgcagagctgctcctgggaggatgagcctgagctgacagctgcctatggagccctgtgtgcccatgaaacagcctggggcagcttcatccacaccccaggccctgagctgcagagggccctggccaccctgcagagccagtgggaggcctgccgggccctggaggagagccctgctggggccaggaagaagagagctgctggccagagcggcgtgcctgggggcggccaccagcgggagaagaggggctggaccatgcctggcaccctgtggtgtggggtgggggacagcgctggcaacagcagcgagctgggcgtcttccagggccctgacctgtgctgccgggagcatgaccgctgcccccagaacatcagccccctgcagtacaactacggcatccggaactaccgcttccacaccatcagccactgtgactgtgacacccgcttccagcagtgcctgcagaaccagcacgacagcatcagtgacatcgtgggcgtggccttcttcaacgtgctggagatcccctgctttgtgctggaggagcaggaggcctgtgtggcctggtactggtggggcggctgcaggatgtatggaacagtgcccctggcccggctgcagcccaggaccttctacaatgcctcctggagcagccgggccaccagccccacccccagcagccgcagccctgccccacccaagccccggcagaagcagcacctgaggaagggccccccccaccagaagggcagcaagaggcccagcaaggccaacaccacagccctgcaggaccccatggtgagcccccggctggatgtggcccccaccggcctgcagggcccccagggcggcctgaagccccagggcgcccgctgggtgtgccgctccttcagaagacacctggaccagtgtgagcaccagatcggcccccgggagattgagttccagctgctgaacagcgcccaggagcccctcttccactgcaactgcacccggcggctggcccgcttcctgcggctgcacagccccccagaggtgaccaacatgctgtgggagctgctgggcaccacctgcttcaagctggccccacccctggactgtgtggagggcaagaactgcagccgggacccccgggccatccgggtgtctgcccggcacctgcggcggctgcagcagaggaggcaccagctgcaggacaagggcacagatgagcggcagccctggcccagcgagcccctgcggggccccatgtccttctacaaccagtgcctgcagctgacccaggccgcccggcggccagaccggcagcagaagtcctggagccagtag

SEQ ID NO: 187967 - DNA, 1530 bp, Artificial Sequence
  derived and/or modified sequence
atgggcgtgcaggccggcctgttcggcatgctgggcttcctgggcgttgctctcggcgggtcgcctgccctcagatggtatcgcactagctgccacctgaccaaagccgtgcccggaaatcccctaggttatctgtctttcctagcaaaggacgcacagggactggccctcattcatgcccggtgggatgcgcacagaaggctgcagagctgtagctgggaggacgaaccggaactgactgccgcctacggcgccctatgcgcccacgagacagcctggggctcttttatacacacccccggcccagagcttcaacgtgccctagccactcttcaaagccagtgggaggcttgtcgcgccctcgaggagtctccagctggcgcgagaaagaagcgagccgccggacagagcggcgtgcccggcggcggtcatcaacgggagaaacgaggatggactatgccaggcactctgtggtgcggagttggcgatagcgcaggtaattctagtgagctgggtgtcttccagggccccgatttatgttgtagggaacacgacagatgtccacagaatatttcccccttgcagtataattatggaattcggaattaccgtttccacactatatcacattgcgattgcgacacaagattccagcagtgccttcaaaatcagcatgatagtatctctgacatagtgggtgtggcatttttcaacgtactggaaattccctgctttgtgctggaagaacaggaagcctgtgtcgcgtggtactggtggggcggttgccgtatgtatgggacagtgcccctcgcccgactgcagcctcgcactttctataacgcaagctggagttctagggcaaccagccccaccccttcctcaaggtctcccgcccccccaaaacctcggcagaagcagcaccttagaaaaggaccaccgcatcagaagggatcaaaacggccttcgaaggccaatacgacagccctgcaggacccaatggttagcccaaggctggacgtcgcccctaccgggctccagggccctcaggggggtctgaagcctcagggagctaggtgggtctgtaggagtttcaggaggcatcttgaccagtgtgaacaccagatagggcccagggagattgagtttcagttactgaacagcgctcaagagcctctttttcattgtaattgcaccaggcggctggcacggtttttgcgtctccacagccctcctgaggtaacgaacatgctgtgggagctgttgggtaccacatgcttcaaactggctcctccactcgattgcgtcgaaggtaaaaactgctcaagagaccccagagccatacgagtgagcgccaggcacctgcggcgactgcaacagcgccggcatcaactacaggacaagggaaccgacgagaggcaaccatggccctctgaaccgctccgagggcccatgtcgttttataaccagtgcctccagcttactcaagcagctaggagacctgacaggcagcagaagagctggtcacagtag

SEQ ID NO: 187968 - DNA, 1530 bp, Artificial Sequence
  derived and/or modified sequence
atgggcgtccaagccggactgtttggtatgctggggttcctgggtgtcgccctaggaggctcacctgcccttaggtggtaccgaacaagttgccacttaacaaaggcagtgcccggtaatcccctgggatacctctcatttcttgcaaaggacgcccaaggactggctctgatccatgctcgatgggatgcccacagaagactccagagctgttcttgggaggatgaacccgagctgaccgcggcatacggggcattatgcgcccatgaaacggcctggggatcattcatccataccccgggtccggagctgcaacgggctctggccacactgcagtcccaatgggaagcctgcagggctctcgaagaaagtccagccggagctcgcaagaaacgagctgccggacagagtggcgttcccggtgggggtcatcaacgtgagaagaggggctggaccatgcctgggaccctatggtgtggtgtaggagattctgcaggcaactccagcgagctgggagtgtttcagggtcccgacctttgttgcagagagcatgatagatgtccgcaaaacatatctcccttacaatataactacggtatacggaactatcggtttcacactatcagccactgcgactgcgacacaagatttcagcagtgccttcagaatcaacacgatagtatctccgatatcgttggagtggctttcttcaatgtgttggagattccttgctttgtgttggaggagcaagaagcgtgcgtggcttggtactggtgggggggatgccggatgtatgggaccgtccccctggccaggctgcagcccaggacgttttataatgctagttggtcgtctcgagctacaagtccgacgccaagctcccggagcccagcgccaccaaagcctcggcagaagcaacacttacggaaaggacctccacaccagaaagggagcaagcggcctagcaaggccaacacaactgctctgcaagaccccatggtcagccccaggcttgatgtcgccccaacaggattgcagggccctcaaggagggctcaagccccaaggggctaggtgggtgtgccgatccttcaggcgtcacctggatcagtgcgagcatcagattggtccaagggagattgagttccagctattaaactctgcgcaagagcctctctttcactgtaactgtacccgcaggctagcaaggttcctgagactgcacagcccccctgaggttacaaacatgctgtgggagttacttggcacaacctgtttcaagctagccccaccacttgattgcgttgagggtaaaaactgcagtcgagatccacgagccattagagtaagcgctagacacctgagaagactgcagcagcggaggcaccagctgcaggataaaggaaccgatgagaggcaaccttggccctccgagcctctcaggggaccaatgtcgttctataatcagtgcttgcaactgacccaggctgctcgaaggccggataggcagcagaaatcctggtcccagtag

SEQ ID NO: 187969 - DNA, 1530 bp, Artificial Sequence
  derived and/or modified sequence
atgggcgtgcaggccggcctgttcggcatgctgggcttcctgggcgtggccctgggcggcagccccgccctgagatggtacagaaccagctgccacctgaccaaggccgtgcccggcaaccccctgggctacctgagcttcctggccaaggacgcccagggcctggccctgatccacgccagatgggacgcccacagaagactgcagagctgcagctgggaggacgagcccgagctgaccgccgcctacggcgccctgtgcgcccacgagaccgcctggggcagcttcatccacacccccggccccgagctgcagagagccctggccaccctgcagagccagtgggaggcctgcagagccctggaggagagccccgccggcgccagaaagaagagagccgccggccagagcggcgtgcccggcggcggccaccagagagagaagagaggctggaccatgcccggcaccctgtggtgcggcgtgggcgacagcgccggcaacagcagcgagctgggcgtgttccagggccccgacctgtgctgcagagagcacgacagatgcccccagaacatcagccccctgcagtacaactacggcatcagaaactacagattccacaccatcagccactgcgactgcgacaccagattccagcagtgcctgcagaaccagcacgacagcatcagcgacatcgtgggcgtggccttcttcaacgtgctggagatcccctgcttcgtgctggaggagcaggaggcctgcgtggcctggtactggtggggcggctgcagaatgtacggcaccgtgcccctggccagactgcagcccagaaccttctacaacgccagctggagcagcagagccaccagccccacccccagcagcagaagccccgccccccccaagcccagacagaagcagcacctgagaaagggccccccccaccagaagggcagcaagagacccagcaaggccaacaccaccgccctgcaggaccccatggtgagccccagactggacgtggcccccaccggcctgcagggcccccagggcggcctgaagccccagggcgccagatgggtgtgcagaagcttcagaagacacctggaccagtgcgagcaccagatcggccccagagagatcgagttccagctgctgaacagcgcccaggagcccctgttccactgcaactgcaccagaagactggccagattcctgagactgcacagcccccccgaggtgaccaacatgctgtgggagctgctgggcaccacctgcttcaagctggccccccccctggactgcgtggagggcaagaactgcagcagagaccccagagccatcagagtgagcgccagacacctgagaagactgcagcagagaagacaccagctgcaggacaagggcaccgacgagagacagccctggcccagcgagcccctgagaggccccatgagcttctacaaccagtgcctgcagctgacccaggccgccagaagacccgacagacagcagaagagctggagccagtag

SEQ ID NO: 187970 - DNA, 4941 bp, Artificial Sequence
  derived and/or modified sequence
gtcagtcggtgggtcggtcctcgcgccggccctccccctccccggtctccgggggaggcgcggtggagtccgcccccggggttctccgatgggggagaagcggcgacggcggcagtggagtaaccgagccggagcgtgagcggccccggtgccccgttccccacggaggccatgggcgacccagcccccgcccgcagcctggacgacatcgacctgtccgccctgcgggctttatggttccagttcttctaccattctggaagctccctagaatctcctggaatgcttaatggacctttccagcaccgaaattcaagaattatgactcatcggtcagcagaaaagaccctgctgggatctttgagcttgtggaggtggtcggcaatggaacctacggacaggtgtacaagggtcggcatgtcaagacggggcagctggctgccatcaaggtcatggatgtcacggaggacgaggaggaagagatcaaacaggagatcaacatgctgaaaaagtactctcaccaccgcaacatcgccacctactacggagccttcatcaagaagagccccccgggaaacgatgaccagctctggctggtgatggagttctgtggtgctggttcagtgactgacctggtaaagaacacaaaaggcaacgccctgaaggaggactgtatcgcctatatctgcagggagatcctcaggggtctggcccatctccatgcccacaaggtgatccatcgagacatcaaggggcagaatgtgctgctgacagagaatgctgaggtcaagctagtggattttggggtgagtgctcagctggaccgcaccgtgggcagacggaacactttcattgggactccctactggatggctccagaggtcatcgcctgtgatgagaaccctgatgccacctatgattacaggagtgatatttggtctctaggaatcacagccatcgagatggcagagggagccccccctctgtgtgacatgcaccccatgcgagccctcttcctcattcctcggaaccctccgcccaggctcaagtccaagaagtggtctaagaagttcattgacttcattgacacatgtctcatcaagacttacctgagccgcccacccacggagcagctactgaagtttcccttcatccgggaccagcccacggagcggcaggtccgcatccagcttaaggaccacattgaccgatcccggaagaagcggggtgagaaagaggagacagaatatgagtacagcggcagcgaggaggaagatgacagccatggagaggaaggagagccaagctccatcatgaacgtgcctggagagtcgactctacgccgggagtttctccggctccagcaggaaaataagagcaactcagaggctttaaaacagcagcagcagctgcagcagcagcagcagcgagaccccgaggcacacatcaaacacctgctgcaccagcggcagcggcgcatagaggagcagaaggaggagcggcgccgcgtggaggagcaacagcggcgggagcgggagcagcggaagctgcaggagaaggagcagcagcggcggctggaggacatgcaggctctgcggcgggaggaggagcggcggcaggcggagcgcgagcaggaatacaagcggaagcagctggaggagcagcggcagtcagaacgtctccagaggcagctgcagcaggagcatgcctacctcaagtccctgcagcagcagcaacagcagcagcagcttcagaaacagcagcagcagcagctcctgcctggggacaggaagcccctgtaccattatggtcggggcatgaatcccgctgacaaaccagcctgggcccgagaggtagaagagagaacaaggatgaacaagcagcagaactctcccttggccaagagcaagccaggcagcacggggcctgagccccccatcccccaggcctccccagggcccccaggacccctttcccagactcctcctatgcagaggccggtggagccccaggagggaccgcacaagagcctggtggcacaccgggtcccactgaagccatatgcagcacctgtaccccgatcccagtccctgcaggaccagcccacccgaaacctggctgccttcccagcctcccatgaccccgaccctgccatccccgcacccactgccacgcccagtgcccgaggagctgtcatccgccagaattcagaccccacctctgaaggacctggccccagcccgaatcccccagcctgggtccgcccagataacgaggccccacccaaggtgcctcagaggacctcatctatcgccactgcccttaacaccagtggggccggagggtcccggccagcccaggcagtccgtgccagtaaccccgacctcaggaggagcgaccctggctgggaacgctcggacagcgtccttccagcctctcacgggcacctcccccaggctggctcactggagcggaaccgcgtgggagtctcctccaaaccggacagctcccctgtgctctcccctgggaataaagccaagcccgacgaccaccgctcacggccaggccggcccgcagactttgtgttgctgaaagagcggactctggacgaggcccctcggcctcccaagaaggccatggactactcgtcgtccagcgaggaggtggaaagcagtgaggacgacgaggaggaaggcgaaggcgggccagcagaggggagcagagatacccctgggggccgcagcgatggggatacagacagcgtcagcaccatggtggtccacgacgtcgaggagatcaccgggacccagcccccatacgggggcggcaccatggtggtccagcgcacccctgaagaggagcggaacctgctgcatgctgacagcaatgggtacacaaacctgcctgacgtggtccagcccagccactcacccaccgagaacagcaaaggccaaagcccaccctcgaaggatgggagtggtgactaccagtctcgtgggctggtaaaggcccctggcaagagctcgttcacgatgtttgtggatctagggatctaccagcctggaggcagtggggacagcatccccatcacagccctagtgggtggagagggcactcggctcgaccagctgcagtacgacgtgaggaagggttctgtggtcaacgtgaatcccaccaacacccgggcccacagtgagacccctgagatccggaagtacaagaagcgattcaactccgagatcctctgtgcagccctttggggggtcaacctgctggtgggcacggagaacgggctgatgttgctggaccgaagtgggcagggcaaggtgtatggactcattgggcggcgacgcttccagcagatggatgtgctggaggggctcaacctgctcatcaccatctcagggaaaaggaacaaactgcgggtgtattacctgtcctggctccggaacaagattctgcacaatgacccagaagtggagaagaagcagggctggaccaccgtgggggacatggagggctgcgggcactaccgtgttgtgaaatacgagcggattaagttcctggtcatcgccctcaagagctccgtggaggtgtatgcctgggcccccaaaccctaccacaaattcatggccttcaagtcctttgccgacctcccccaccgccctctgctggtcgacctgacagtagaggaggggcagcggctcaaggtcatctatggctccagtgctggcttccatgctgtggatgtcgactcggggaacagctatgacatctacatccctgtgcacatccagagccagatcacgccccatgccatcatcttcctccccaacaccgacggcatggagatgctgctgtgctacgaggacgagggtgtctacgtcaacacgtacgggcgcatcattaaggatgtggtgctgcagtggggggagatgcctacttctgtggcctacatctgctccaaccagataatgggctggggtgagaaagccattgagatccgctctgtggagacgggccacctcgacggggtcttcatgcacaaacgagctcagaggctcaagttcctgtgtgagcggaatgacaaggtgttttttgcctcagtccgctctgggggcagcagccaagtttacttcatgactctgaaccgtaactgcatcatgaactggtgacggggccctgggctggggctgtcccacactggacccagctctccccctgcagccaggcttcccgggccgcccctctttcccctccctgggcttttgcttttactggtttgatttcactggagcctgctgggaacgtgacctctgacccctgatgctttcgtgatcacgtgaccatcctcttccccaacatgtcctcttcccaaaactgtgcctgtccccagcttctggggagggacacagcttccccttcccaggaattgagtgggcctagcccctccccccttttctccatttgagaggagagtgcttggggcttgaaccccttaccccactgctgctgactgggcagggccctggacccctttatttgcacgtcaggggagccggctccccccttgaatgtaccagaccctggggggggtcactgggccctagatttttggggggtcaccagccactccaggggcagggaccatttcttcattttctgaaagcactttaatgattccccttcccccaaactccagggaatggaggggggaccccgccagccaaaacattccccccattcccgacccccctctcctcttctagcccatgcccttccccggtggagggagggagcagggagccctcactctccacgccccttgcttgcatctgtatatagtgtgagcagcaagtaacccttctccctccccccccacccctcctcaatgtagtggccttggatatcctgtttgttaataaagacaattcaaccagc

SEQ ID NO: 187971 - protein, 328 aa, Artificial Sequence
  derived and/or modified sequence
MTVEKEAPDAHFTVDKQNISLWPREPPPKSGPSLVPGKTPTVRAALICLTLVLVASVLLQAVLYPRFMGTISDVKTNVQLLKGRVDNISTLDSEIKKNSDGMEAAGVQIQMVNESLGYVRSQFLKLKTSVEKANAQIQILTRSWEEVSTLNAQIPELKSDLEKASALNTKIRALQGSLENMSKLLKRQNDILQVVSQGWKYFKGNFYYFSLIPKTWYSAEQFCVSRNSHLTSVTSESEQEFLYKTAGGLIYWIGLTKAGMEGDWSWVDDTPFNKVQSVRFWIPGEPNNAGNNEHCGNIKAPSLQAWNDAPCDKTFLFICKRPYVPSEP

SEQ ID NO: 187972 - DNA, 987 bp, Artificial Sequence
  derived and/or modified sequence
atgacagtggagaaagaggcgcccgacgcccacttcaccgtggataaacagaatatcagtctctggcctagggagcctccacctaaaagcggcccttcgctggtgcccggcaaaacgcctacagtcagggccgccctgatctgcctgaccttagttttagtggccagtgtgctgcttcaggcggttttatatcctcgtttcatgggcaccataagtgacgtgaaaaccaacgtacaactgctgaagggcagagtggataacatctccacgctggactctgagataaaaaagaattcagacggaatggaagctgcaggcgtgcaaatccagatggtcaacgagtctctgggctatgtgcgctcccagtttttaaaattgaaaacctctgtggagaaggcgaacgctcaaatacagatcttaaccagatcctgggaagaggttagtaccctgaatgcccagattcctgaactcaaatccgatctagagaaagcctcagccctgaatacgaagatacgagcattgcaaggcagcctggaaaacatgagtaagctgttgaaacgacagaacgacattctacaggttgtttcccaaggatggaagtattttaagggtaatttctattacttttcacttattcctaaaacatggtatagcgccgaacagttttgcgtgagccggaactcacatctgacaagcgtgacaagtgagtctgagcaggagtttctttacaaaactgcagggggtctgatttattggatagggttgactaaggccggtatggagggcgattggagctgggtggacgataccccattcaataaagtgcagtctgtccgattttggatcccaggagaacctaataacgcaggcaacaatgaacattgcgggaacatcaaggctccctccctccaagcctggaacgatgctccctgtgacaagacctttctgtttatttgcaagaggccctacgttccttctgagccttag

SEQ ID NO: 187973 - DNA, 987 bp, Artificial Sequence
  derived and/or modified sequence
atgacagtggagaaggaggccccagatgcccacttcaccgtggacaagcagaacatcagcctgtggccccgggagcccccacccaagagcggccccagcctggtgcctgggaagacccccaccgtgcgggccgccctgatctgcctgaccctggtgctggtggcctctgtgctgctgcaggccgtgctgtacccccgcttcatgggcaccatcagtgatgtgaagaccaacgtgcagctgctgaagggccgggtggacaacatcagcaccctggacagcgagatcaagaagaacagtgatggcatggaggccgccggcgtgcagatccagatggtgaatgaaagcctgggctacgtgcgcagccagttcctgaagctgaagacctctgtggagaaggccaatgcccagatccagatcctgaccaggtcctgggaggaggtgtccaccctgaatgcccagatccctgagctgaagagtgacctggagaaggccagcgccctgaacaccaagatccgggccctgcagggcagcctggagaacatgagcaagctgctgaagaggcagaatgacatcctgcaggtggtgtcccagggctggaagtacttcaagggcaacttctactacttcagcctcatccccaagacctggtacagcgctgagcagttctgtgtgtccaggaacagccacctgacctctgtgaccagcgagagcgagcaggagttcctgtacaagacagctgggggcctcatctactggattggcctgaccaaggccggcatggagggggactggagctgggtggatgacacccccttcaacaaggtgcagagcgtgcgcttctggatccctggagagcccaacaatgccggcaacaatgagcactgcggcaacatcaaggcccccagcctgcaggcctggaatgatgccccctgtgacaagaccttcctgttcatctgcaagaggccctacgtgcccagcgagccctag

SEQ ID NO: 187974 - DNA, 987 bp, Artificial Sequence
  derived and/or modified sequence
atgaccgtggagaaggaggcccccgacgcccacttcaccgtggacaagcagaatatctcactgtggccacgtgaacccccccccaagtctgggccaagtttggtcccgggaaagacacccacagttcgtgcagccctgatctgtctcactctcgtattagtagctagcgttctgttgcaagccgttttgtatcctaggtttatgggtactataagtgatgttaagaccaatgttcaacttctgaagggcagggtagataacatctcgaccttggattctgaaatcaagaagaactcggatgggatggaggctgccggggtccagatccagatggttaacgagtccctgggctacgtacgatctcaatttctgaagctcaagacctccgtggagaaggccaatgcacagatacagatcttgactaggtcatgggaggaagtgagtaccctcaatgcccagatccccgagctgaaaagcgacctggagaaagcttccgcactgaatactaagatcagggctttacaggggtccctggagaatatgagcaagctcctgaagaggcaaaacgacatcctgcaagtggtttctcaggggtggaaatattttaaaggaaatttttattatttttcgttgatccccaaaacctggtatagcgcagagcaattttgcgtgtccaggaactctcatctcacatccgtcaccagtgagagcgagcaggagttcctgtacaaaactgccggaggcttgatctactggatcggcttgacgaaggctggaatggaaggagactggagttgggttgatgatacaccattcaataaggttcagtctgttcgtttttggatccccggggaacccaataatgctggtaacaacgagcactgtggaaacatcaaggcacctagcctgcaggcctggaacgacgctccgtgcgacaagactttccttttcatttgtaaaagaccctatgtcccgtccgaaccttag

SEQ ID NO: 187975 - DNA, 987 bp, Artificial Sequence
  derived and/or modified sequence
atgacggtggagaaggaggcccctgatgcccatttcacagtggacaaacagaatatctctctgtggccaagggaacctccccctaagtcaggaccctcgttggtcccagggaaaacacccactgtcagggcagccctgatatgtctcaccctggtcctggtggcctcagttctgctgcaggccgtcttgtacccgagattcatgggaacgatcagcgacgtgaagacaaatgtacagttgttaaagggacgcgtggacaacatctcgaccttagactccgaaatcaaaaaaaactctgatggtatggaagcagccggagtgcagattcagatggtcaacgagagcctaggttacgtccgcagtcagttcctgaagctcaaaacgtccgtggaaaaggccaacgctcagatccagatactcactagatcctgggaagaggtttccaccctgaacgcccagattcctgaactcaagagtgatctcgagaaggcctcggcactgaataccaaaattcgtgctctgcagggatcactggaaaacatgtccaagctgctgaaacggcagaatgacattctccaggtagtgtcacagggatggaagtatttcaagggcaatttctattacttcagtctgatcccaaagacttggtatagtgccgagcaattctgcgtgagccgaaactcgcacttgacatctgttacctccgagtctgaacaggagttcctgtacaaaactgcaggaggactgatctactggatcggcctgactaaggctggtatggaaggcgattggtcctgggtagacgacacaccattcaataaggtgcagagcgtcagattttggattcccggagaacccaacaatgcaggcaataacgagcactgtgggaacatcaaggccccaagcctgcaggcgtggaatgacgccccatgtgacaaaacttttcttttcatttgtaaacggccatatgtgccctccgagccctag

SEQ ID NO: 187976 - DNA, 1867 bp, Artificial Sequence
  derived and/or modified sequence
gcagccagaagcacctgtgctcccaggataagggtgagcactcaggatgactgtggagaaggaggcccctgatgcgcacttcactgtggacaaacagaacatctccctctggccccgagagcctcctcccaagtccggtccatctctggtcccggggaaaacacccacagtccgtgctgcattaatctgcctgacgctggtcctggtcgcctccgtcctgctgcaggccgtcctttatccccggtttatgggcaccatatcagatgtaaagaccaatgtccagttgctgaaaggtcgtgtggacaacatcagcaccctggattctgaaattaaaaagaatagtgacggcatggaggcagctggcgttcagatccagatggtgaatgagagcctgggttatgtgcgttctcagttcctgaagttaaaaaccagtgtggagaaggccaacgcacagatccagatcttaacaagaagttgggaagaagtcagtaccttaaatgcccaaatcccagagttaaaaagtgatttggagaaagccagtgctttaaatacaaagatccgggcactccagggcagcttggagaatatgagcaagttgctcaaacgacaaaatgatattctacaggtggtttctcaaggctggaagtacttcaaggggaacttctattacttttctctcattccaaagacctggtatagtgccgagcagttctgtgtgtccaggaattcacacctgacctcggtgacctcagagagtgagcaggagtttctgtataaaacagcggggggactcatctactggattggcctgactaaagcagggatggaaggggactggtcctgggtggatgacacgccattcaacaaggtccaaagtgtgaggttctggattccaggtgagcccaacaatgctgggaacaatgaacactgtggcaatataaaggctccctcacttcaggcctggaatgatgccccatgtgacaaaacgtttcttttcatttgtaagcgaccctatgtcccatcagaaccgtgacaggacaggctcccaagctcactctttgagctccaacgcttgttaaacatgaggaaatgcctctttcttccccagactccaggatgactttgcacgttaatttttcttgcttcaaaattgtcccacagtggcattctggagtccgtctgtcttggctggaaattctctgacgtcttggaggcagctggaatggaaaggagaattcaggttaaagtgggaggggtgggtagagaggatttagaagttccaattgccctgctaaggaggatcaagacccgtaatccggcataacaccctggggttttccactctttcagagaaacctcagcttcatcacatcaaagttactccagagcaaccaagcaattctcctgatattgtcatccagggcttttcttggccaaaccccctagaatttccatgtctctgcttagctgtgctggcagctagcagctggctgtgtttgcagtgcaaatagctctgttcttggaaatcctgctcatggtatgtccccagtggtttcttcatccacatcatctaaagcctgaacccgttcttctctggttcaagtcagtggctgacacggacttgtatctccttcagagctcggctggcacccagcctcccttctccttccactcccttagtacactggagtgccgagccctgccttccacccagcgtccatccagcccctgtcctcacctctccggcacctcctcctccttctgcatttcctatcttcctgtgtcttgtgcatgggaagcagccttcagtgccttcatgaattcaccttccagcttcctcagaataaaatgctgcctgggtcaagga

SEQ ID NO: 187977 - DNA, 987 bp, Artificial Sequence
  derived and/or modified sequence
atgaccgtggagaaggaggcccccgacgcccacttcaccgtggacaagcagaacatcagcctgtggcccagagagcccccccccaagagcggccccagcctggtgcccggcaagacccccaccgtgagagccgccctgatctgcctgaccctggtgctggtggccagcgtgctgctgcaggccgtgctgtaccccagattcatgggcaccatcagcgacgtgaagaccaacgtgcagctgctgaagggcagagtggacaacatcagcaccctggacagcgagatcaagaagaacagcgacggcatggaggccgccggcgtgcagatccagatggtgaacgagagcctgggctacgtgagaagccagttcctgaagctgaagaccagcgtggagaaggccaacgcccagatccagatcctgaccagaagctgggaggaggtgagcaccctgaacgcccagatccccgagctgaagagcgacctggagaaggccagcgccctgaacaccaagatcagagccctgcagggcagcctggagaacatgagcaagctgctgaagagacagaacgacatcctgcaggtggtgagccagggctggaagtacttcaagggcaacttctactacttcagcctgatccccaagacctggtacagcgccgagcagttctgcgtgagcagaaacagccacctgaccagcgtgaccagcgagagcgagcaggagttcctgtacaagaccgccggcggcctgatctactggatcggcctgaccaaggccggcatggagggcgactggagctgggtggacgacacccccttcaacaaggtgcagagcgtgagattctggatccccggcgagcccaacaacgccggcaacaacgagcactgcggcaacatcaaggcccccagcctgcaggcctggaacgacgccccctgcgacaagaccttcctgttcatctgcaagagaccctacgtgcccagcgagccctag

SEQ ID NO: 187978 - protein, 568 aa, Artificial Sequence
  derived and/or modified sequence
MMGCWILNEGLSTILVLSWLGINFYLFIDTFYWYEEEESFHYTRVILGSTLAWARASALCLNFNCMLILIPVSRNLISFIRGTSICCRGPWRRQLDKNLRFHKLVAYGIAVNATIHIVAHFFNLERYHWSQSEEAQGLLAALSKLGNTPNESYLNPVRTFPTNTTTELLRTIAGVTGLVISLALVLIMTSSTEFIRQASYELFWYTHHVFIVFFLSLAIHGTGRIVRGQTQDSLSLHNITFCRDRYAEWQTVAQCPVPQFSGKEPSAWKWILGPVVLYACERIIRFWRFQQEVVITKVVSHPSGVLELHMKKRGFKMAPGQYILVQCPAISSLEWHPFTLTSAPQEDFFSVHIRAAGDWTAALLEAFGAEGQALQEPWSLPRLAVDGPFGTALTDVFHYPVCVCVAAGIGVTPFAALLKSIWYKCSEAQTPLKLSKVYFYWICRDARAFEWFADLLLSLETRMSEQGKTHFLSYHIFLTGWDENQALHIALHWDENTDVITGLKQKTFYGRPNWNNEFKQIAYNHPSSSIGVFFCGPKALSRTLQKMCHLYSSADPRGVHFYYNKESF

SEQ ID NO: 187979 - DNA, 1707 bp, Artificial Sequence
  derived and/or modified sequence
atgatgggctgctggatcctcaatgaagggctgagcactattctcgtcctgagctggctggggatcaacttctacttatttatcgacactttctattggtacgaggaggaggaatcattccattatacccgtgttatcctggggagtacactggcgtgggccagagcttctgcgctgtgccttaatttcaactgcatgttaatcctgatccctgtgagtcggaatcttatttcatttatccggggaactagcatctgctgtcggggcccctggcgaagacaactcgacaagaacctcaggtttcacaagctggtggcctatgggatcgcagtcaacgccaccatccacatcgtggcacactttttcaacctggagaggtatcactggtctcagtccgaagaagcccagggcctgctcgctgctctaagcaagttaggcaacaccccgaacgagtcttacttgaacccggttcggacatttccaacgaatactaccaccgaattgctcaggacaattgccggtgtcaccggtcttgtgatctctttggcgctcgtgctgatcatgacaagctccacagagttcatccggcaagcaagctacgaactcttctggtacactcatcatgtgttcattgtattctttctctcgctcgcaattcacgggacaggacgcatcgtgcgaggtcaaacacaggacagtctgtcactccataatattaccttctgcagggacagatatgccgagtggcagacagtggcccagtgccccgtcccccagttttcaggaaaggagcccagcgcttggaagtggatcctcgggcctgttgtactgtacgcctgcgagaggatcatacgcttctggcgcttccaacaggaggtggtgatcactaaggtggtatcacatcccagtggtgtgttagagttacacatgaagaaacgaggatttaaaatggccccggggcaatatattcttgtgcagtgtcccgccatatcttcacttgaatggcacccctttaccttgacctccgcaccccaggaggacttcttctcagtgcacatccgtgccgcaggggactggaccgccgctctgttggaggcttttggggccgaaggacaagcattacaagaaccttggtcactgccccggctggccgtggatggaccctttgggaccgcacttaccgatgtcttccactaccccgtgtgcgtatgtgtcgccgctggcattggggtgacacctttcgctgccttgctgaagagtatatggtataagtgttccgaagcccagacaccgcttaaactcagcaaggtctatttttactggatctgccgtgacgccagagcattcgagtggttcgctgaccttctcctgtctctggaaacccgcatgtcagagcagggcaagacccacttcctctcataccatatctttctcactgggtgggatgaaaatcaggccctgcacatcgcactccactgggatgagaacacagacgtgattacggggctaaagcagaagaccttctacggacgaccaaattggaataatgagttcaaacagattgcatataaccaccctagcagcagcattggcgttttcttctgcggtccaaaggccctgtctaggaccctacaaaaaatgtgtcatttgtacagcagcgctgacccccggggggtgcatttctactataataaggaatcattttag

SEQ ID NO: 187980 - DNA, 1707 bp, Artificial Sequence
  derived and/or modified sequence
atgatgggctgctggatcctgaatgaaggcctgagcaccatcctggtgctgtcctggctgggcatcaacttctacctgttcatcgacaccttctactggtatgaggaggaggagagcttccactacaccagggtcatcctgggcagcaccctggcctgggcccgggccagcgccctgtgcctgaacttcaactgcatgctgatcctgatccctgtgtccaggaacctgatctccttcatccggggcaccagcatctgctgccggggcccctggaggcggcagctggacaagaacctgcgcttccacaagctggtggcctatggaattgctgtgaatgccaccatccacatcgtggcccacttcttcaacctggagcgctaccactggagccagagcgaggaggcccagggcctgctggccgccctgagcaagctgggcaacaccccaaatgaaagctacctgaaccctgtgaggaccttccccaccaacaccaccacagagctgctgcggaccatcgccggcgtgacaggcctggtgatcagcctggccctggtgctgatcatgaccagcagcacagagttcatccggcaggccagctatgagctgttctggtacacccaccacgtgttcatcgtgttcttcctgagcctggccatccacggcaccggcagaattgtgcggggccagacccaggacagcctgagcctgcacaacatcaccttctgccgggacagatatgcagagtggcagacagtggcccagtgccctgtgccccagttcagcggcaaggagcccagcgcctggaagtggatcctgggccctgtggtgctgtatgcctgtgagcgcatcatccgcttctggaggttccagcaggaggtggtgatcaccaaggtggtgagccaccccagcggcgtgctggagctgcacatgaagaagaggggcttcaagatggcccctggccagtacatcctggtgcagtgcccagccatcagcagcctggagtggcaccccttcaccctgaccagcgccccccaggaggacttcttctctgtgcacatccgggccgccggggactggacagctgccctgctggaggcctttggagctgagggccaggccctgcaggagccctggagcctgccccggctggccgtggatggcccctttggaacagccctgacagatgtgttccactaccctgtgtgtgtgtgtgtggccgccggcattggagtgaccccatttgctgccctgctgaagagcatctggtacaagtgcagcgaggcccagacccccctgaagctgagcaaggtgtacttctactggatctgcagagatgcccgggcctttgagtggtttgctgacctgctgctgagcctggagaccaggatgtctgagcagggcaagacccacttcctgagctaccacatcttcctgaccggctgggatgagaaccaggccctgcacatcgccctgcactgggatgaaaatacagatgtgatcaccggcctgaagcagaagaccttctacggccggcccaactggaacaatgagttcaagcagatcgcctacaaccaccccagcagcagcattggagtcttcttctgtggccccaaggccctgagcaggaccctgcagaagatgtgccacctgtacagcagcgctgacccccggggcgtgcacttctactacaacaaggagagcttctag

SEQ ID NO: 187981 - DNA, 2042 bp, Artificial Sequence
  derived and/or modified sequence
caaagacaaaataatttactagggaagcccttactaacgacccaacatccagacacaggtgagggagaagaaatttcctgacagccgaagagcaacaagtatcatgatggggtgctggattttgaatgagggtctctccaccatattagtactctcatggctgggaataaatttttatctgtttattgacacgttctactggtatgaagaggaggagtctttccattacacacgagttattttgggttcaacactggcttgggcacgagcatccgcactgtgcctgaattttaactgcatgctaattctaatacctgtcagtcgaaaccttatttcattcataagaggaacaagtatttgctgcagaggaccgtggaggaggcaattagacaaaaacctcagatttcacaaactggtcgcctatgggatagctgttaatgcaaccatccacatcgtggcgcatttcttcaacctggaacgctaccactggagccagtccgaggaggcccagggacttctggccgcactttccaagctgggcaacacccctaacgagagctacctcaaccctgtccggaccttccccacaaacacaaccactgaattgctaaggacaatagcaggcgtcaccggtctggtgatctctctggctttagtcttgatcatgacctcgtcaactgagttcatcagacaggcctcctatgagttgttctggtacacacaccatgttttcatcgtcttctttctcagcctggccatccatgggacgggtcggattgttcgaggccaaacccaagacagtctctctctgcacaacatcaccttctgtagagaccgctatgcagaatggcagacagtggcccaatgccccgtgcctcaattttctggcaaggaaccctcggcttggaaatggattttaggccctgtggtcttgtatgcatgtgaaagaataattaggttctggcgatttcaacaagaagttgtcattaccaaggtggtaagccacccctctggagtcctggaacttcacatgaaaaagcgtggctttaaaatggcgccagggcagtacatcttggtgcagtgcccagccatatcttcgctggagtggcaccccttcacccttacctctgccccccaggaggactttttcagcgtgcacatccgggcagcaggagactggacagcagcgctactggaggcctttggggcagagggacaggccctccaggagccctggagcctgccaaggctggcagtggacgggccctttggaactgccctgacagatgtatttcactacccagtgtgtgtgtgcgttgccgcggggatcggagtcactcccttcgctgctcttctgaaatctatatggtacaaatgcagtgaggcacagaccccactgaagctgagcaaggtgtatttctactggatttgccgggatgcaagagcttttgagtggtttgctgatctcttactctccctggaaacacggatgagtgagcaggggaaaactcactttctgagttatcatatatttcttaccggctgggatgaaaatcaggctcttcacatagctttacactgggacgaaaatactgacgtgattacaggcttaaagcagaagaccttctatgggaggcccaactggaacaatgagttcaagcagattgcctacaatcaccccagcagcagtattggcgtgttcttctgtggacctaaagctctctcgaggacacttcaaaagatgtgccacttgtattcatcagctgaccccagaggtgttcatttctattacaacaaggagagcttctagactttggaggtcaagtccaggcattgtgttttcaatcaagttattgattccaaagaactccaccaggaattcctgtgacggcctgttgatatgagctcccagttgggaactggtgaataataattaactattgtgaacagtacactataccatacttccttagcttataaataacatgtcatatacaacagaacaaaaacatttactgaaattaaaatatattatgtttctc

SEQ ID NO: 187982 - DNA, 1707 bp, Artificial Sequence
  derived and/or modified sequence
atgatgggctgctggatcctgaacgagggcctgagcaccatcctggtgctctcttggttaggtatcaacttttacctcttcatcgataccttctattggtatgaggaggaagaaagcttccattacacacgcgtcatactaggcagtactctcgcctgggcccgcgcctcggctctctgtctgaattttaattgtatgctaatactgatacccgttagccggaatcttatttcttttatcaggggtacctccatatgttgtcgagggccgtggaggcgccagctcgacaaaaatcttaggttccataaattggtcgcatatggaatcgcggtgaacgcgaccatccacatcgttgctcatttctttaacttagaacggtaccattggtctcagagtgaggaagcgcagggactcttggcagccttaagtaagctgggtaacacaccaaacgagtcatatctgaatccagtacgtacattcccaacaaacactacaaccgaactcctcaggacaattgcgggcgtgacaggactggtgatttctcttgcactggtgttaataatgacctcctccacggagttcatcagacaagcctcctacgagctgttttggtatacacatcacgtgtttatcgtcttctttctcagtctcgcaatccacggaaccgggcgcatcgtgcggggacagacacaagactcactcagtctgcacaatatcactttttgtcgggaccgctacgccgagtggcaaaccgttgcgcagtgcccagtcccacaattttctgggaaggagcccagtgcttggaagtggatcctggggcccgtcgtactatacgcatgcgagcggataatcaggttctggcggttccagcaggaagtagtgatcacaaaagttgtgtctcacccgagtggtgtgttggaacttcacatgaagaaacgggggttcaaaatggcccccggccaatatattctggttcagtgtccggccatatcctcactggaatggcaccccttcacacttacctcagcaccgcaggaggactttttttccgtccacattcgggctgctggtgattggacggccgctctgcttgaggcttttggcgcagaggggcaagctctccaggagccatggtcccttccgcggctggccgttgacgggccattcgggactgccctcactgacgtgtttcactaccctgtctgcgtttgcgtcgcagccggaattggggtaacccctttcgctgctctgcttaagagtatctggtataagtgctctgaagcccaaacgcccttgaagctgtctaaagtatacttttactggatttgcagagatgccagggcctttgagtggtttgctgatctgttactgtcattagagactagaatgtctgaacaggggaaaactcacttcctttcataccatatctttctgaccggttgggatgagaaccaggctctgcatattgctttgcattgggatgagaacacagacgtgataaccggcttgaaacaaaaaaccttctatgggcgacccaattggaacaatgagtttaaacagattgcctataaccatccctcaagttctataggagtgttcttctgcgggcccaaggctctttctcgcacattacagaagatgtgccatctgtatagctctgctgatccaagaggggtgcatttctattataacaaagagtctttttag

SEQ ID NO: 187983 - DNA, 1707 bp, Artificial Sequence
  derived and/or modified sequence
atgatgggctgctggattctaaatgagggtctgagcacaatactggtcctgtcctggctgggtatcaatttttacctcttcatcgataccttttactggtatgaagaggaggaatcatttcactacacacgggtgatcttgggatccactctagcatgggcacgggctagcgctctgtgcctgaacttcaactgcatgcttattcttatccctgtgtccaggaacctcatatctttcatccgtggaacaagtatttgctgtcgtggcccatggcgtcggcaactggacaagaatctcaggttccataagttggttgcctacggcattgccgttaacgccaccatccacattgtcgcgcacttcttcaacctggagcgctatcattggagccagtccgaagaagctcagggattgctcgccgctctctccaaacttggtaacactcccaatgagtcttacctaaatcccgtccgcacattcccaactaatactactacggaactgctccggaccattgctggagtcaccggacttgtaatctccttggccctggtcttaatcatgacttctagcaccgagttcattagacaggctagttacgagctgttttggtatactcaccacgtgtttatagtgtttttcttatctctggctattcacggcacgggccgaattgtgaggggccagactcaggattccctttctctgcataatatcactttctgccgcgaccggtatgcagagtggcaaactgtagctcagtgtcccgtccctcagtttagcggcaaggaaccctccgcatggaagtggattttaggccctgttgttttgtatgcttgtgaacgcatcatacggttttggcgcttccagcaagaggtcgtcattacaaaggtggtctcacatccatctggagtactagagttgcatatgaagaagagggggtttaaaatggcaccagggcagtacatcctggtccagtgtccggcaatcagttccctcgagtggcatcctttcacgttgactagcgccccacaggaggacttttttagtgttcatattagagccgcaggtgattggactgctgccctgttggaagccttcggtgctgaaggccaggccctccaggaaccttggtccctgccacgcctagccgtcgatggcccttttgggacagcactcacggatgtgttccattaccccgtgtgcgtttgcgtggcggctggaatcggggtgacacccttcgcagccttgttgaagagtatatggtacaaatgcagcgaggctcagaccccattgaaactgtctaaggtgtacttctactggatatgccgcgacgctcgagcatttgaatggtttgccgacctacttctcagtctggaaactagaatgagcgagcaaggcaagacgcattttttaagttaccacattttcctcaccgggtgggatgagaatcaggccctgcacattgcgctccactgggacgagaacaccgacgtgattaccggactaaagcagaagactttctacggacgaccaaactggaacaatgagtttaagcagatcgcttataaccacccaagttctagtatcggggtattcttctgcggtccaaaggccctgagtcgcaccctgcagaagatgtgtcacttgtattcatccgccgatccaaggggtgtgcacttctactacaataaggaaagtttctag

SEQ ID NO: 187984 - DNA, 1707 bp, Artificial Sequence
  derived and/or modified sequence
atgatgggctgctggatcctgaacgagggcctgtctacaattctggtccttagctggctgggtatcaatttctatttgtttatcgacacattctattggtacgaagaggaagaatcattccattatacacgggtgattcttggctcaactcttgcctgggctcgggcctctgctctctgcctcaatttcaactgcatgctgattctcattcccgtttctcgaaatctaatctcttttattaggggtacaagcatatgttgccgtgggccgtggcgcagacaactagacaaaaacttaagatttcataaactggttgcctatggcatcgcggtgaacgccacaatccacatcgtggcccacttttttaatcttgagcgctaccattggagccagagcgaagaggcacaaggcctccttgccgccctctccaaactgggcaacactcctaacgagtcctatcttaaccccgtgcgcaccttccctactaataccacaaccgagctgctgcggacgatcgccggcgtcaccgggctggtcatctcccttgccctcgtcttgattatgacttccagtaccgagttcattcgccaggcaagctacgagttgttctggtatactcaccatgtgttcatcgtattcttcctttctctggcaatacatggtaccggcaggatcgtgagggggcagacacaagatagcctgagcttgcacaatatcacattctgccgtgaccgatacgcagaatggcagactgtggcacagtgccccgtgcctcaattttcaggaaaggaaccctccgcctggaagtggatactgggacctgtcgtgctgtatgcctgtgagcggatcattagattttggagatttcagcaagaagtcgttataacgaaggtggtgagccacccatcgggagtcttagaactgcatatgaagaagcggggtttcaagatggccccaggacaatatattctggtccagtgtccagcaataagctccctggaatggcacccattcaccctgacaagcgctccccaggaagatttcttctccgtccatattagagccgccggagattggactgctgctctgcttgaggcttttggcgcagagggacaggcactgcaggagccttggagtttacctcgattagctgttgatggcccattcgggaccgcccttaccgacgttttccactatcccgtttgcgtgtgtgtggccgctggaatcggagtcacccccttcgcagccttgctcaaaagtatctggtacaagtgctcggaggcccagacccccctcaaactatcaaaagtctacttttattggatctgccgcgacgccagagcgttcgaatggttcgcagacctgctactgagcctcgagactaggatgagcgaacaaggtaagacccattttctctcttaccacatctttctgacaggatgggacgaaaaccaagcactccatattgctctgcattgggacgaaaatactgatgtcattacaggcttgaaacaaaagaccttctatggccgcccaaattggaacaatgaattcaaacagatagcctacaatcacccctcaagctcaattggtgtgtttttctgcggacctaaggccctgtctaggacgcttcagaagatgtgtcacctgtattccagcgccgacccaaggggggtgcacttctattataacaaagagtcgttttag

SEQ ID NO: 187985 - DNA, 1707 bp, Artificial Sequence
  derived and/or modified sequence
atgatgggatgttggatcttaaatgaaggactgtccaccatcctcgtcttgtcctggctaggtattaacttctatcttttcattgacactttttactggtacgaagaggaagaatcctttcactacacccgcgttatcttgggcagtacattggcttgggctcgagcctcagcactttgtctcaattttaattgcatgctgatccttatccctgtgagtcgcaaccttatttccttcatcagaggcacgtccatttgttgccgtgggccttggagacgccagcttgataagaacctgagattccataaactggtggcctatggcatcgcagttaacgcaaccattcacattgtcgcccactttttcaatttagaacgctaccattggtcccaaagcgaggaggcacaaggtcttcttgccgcactgtcaaagttgggtaatacaccaaacgaatcctatctcaatcctgtgaggacatttcccaccaatactactaccgaactgctgcggacaattgccggagtgactggcctagtgatctctttagccctcgtgctcattatgacgtcgtcgacggaattcatccgacaagcttcgtacgaactcttctggtacacccatcatgtcttcattgtttttttcttaagtctggctatacacgggacaggaaggattgtccgggggcaaactcaggattctctcagcctccataacattacattttgtagagataggtacgctgaatggcaaaccgtcgcccaatgtcccgttccccaattcagcgggaaagaaccttccgcctggaaatggattttggggcctgtagtattgtatgcatgcgagagaattatccgcttttggagatttcaacaggaggtggtcataacaaaggtcgtaagtcacccgtccggagtccttgagctacatatgaagaaaaggggttttaaaatggcacctggtcagtatatattagtgcagtgccctgctatatctagtctcgaatggcatccttttaccctgacttctgctcctcaggaagattttttttcagtccatataagagctgccggcgattggaccgctgccctcctggaggcctttggcgcggaaggacaggcactccaagaaccttggagcctccctcgcctggccgttgacggcccatttggaaccgcgctcaccgatgtttttcattaccccgtttgcgtgtgtgtggccgctggaatcggagtcacccccttcgcagccttgctcaaaagtatctggtacaagtgctcggaggcccagacccccctcaaactatcaaaagtctacttttattggatctgccgcgacgccagagcgttcgaatggttcgcagacctgctactgagcctcgagactaggatgagcgaacaaggtaagacccattttctctcttaccacatctttctgacaggatgggacgaaaaccaagcactccatattgctctgcattgggacgaaaatactgatgtcattaccggactgaagcaaaagacattctatggccggccgaactggaataacgagtttaagcagattgcatataaccacccatcatcatccattggcgtattcttttgcggaccaaaagccctgtcgcgtaccttgcagaagatgtgccacctttactcctccgccgatcccaggggagttcatttttactacaataaagaatctttttag

SEQ ID NO: 187986 - DNA, 1707 bp, Artificial Sequence
  derived and/or modified sequence
atgatgggctgctggatcctgaacgagggcctgagcaccatcctggtgctgagctggctgggcatcaacttctacctgttcatcgacaccttctactggtacgaggaggaggagagcttccactacaccagagtgatcctgggcagcaccctggcctgggccagagccagcgccctgtgcctgaacttcaactgcatgctgatcctgatccccgtgagcagaaacctgatcagcttcatcagaggcaccagcatctgctgcagaggcccctggagaagacagctggacaagaacctgagattccacaagctggtggcctacggcatcgccgtgaacgccaccatccacatcgtggcccacttcttcaacctggagagataccactggagccagagcgaggaggcccagggcctgctggccgccctgagcaagctgggcaacacccccaacgagagctacctgaaccccgtgagaaccttccccaccaacaccaccaccgagctgctgagaaccatcgccggcgtgaccggcctggtgatcagcctggccctggtgctgatcatgaccagcagcaccgagttcatcagacaggccagctacgagctgttctggtacacccaccacgtgttcatcgtgttcttcctgagcctggccatccacggcaccggcagaatcgtgagaggccagacccaggacagcctgagcctgcacaacatcaccttctgcagagacagatacgccgagtggcagaccgtggcccagtgccccgtgccccagttcagcggcaaggagcccagcgcctggaagtggatcctgggccccgtggtgctgtacgcctgcgagagaatcatcagattctggagattccagcaggaggtggtgatcaccaaggtggtgagccaccccagcggcgtgctggagctgcacatgaagaagagaggcttcaagatggcccccggccagtacatcctggtgcagtgccccgccatcagcagcctggagtggcaccccttcaccctgaccagcgccccccaggaggacttcttcagcgtgcacatcagagccgccggcgactggaccgccgccctgctggaggccttcggcgccgagggccaggccctgcaggagccctggagcctgcccagactggccgtggacggccccttcggcaccgccctgaccgacgtgttccactaccccgtgtgcgtgtgcgtggccgccggcatcggcgtgacccccttcgccgccctgctgaagagcatctggtacaagtgcagcgaggcccagacccccctgaagctgagcaaggtgtacttctactggatctgcagagacgccagagccttcgagtggttcgccgacctgctgctgagcctggagaccagaatgagcgagcagggcaagacccacttcctgagctaccacatcttcctgaccggctgggacgagaaccaggccctgcacatcgccctgcactgggacgagaacaccgacgtgatcaccggcctgaagcagaagaccttctacggcagacccaactggaacaacgagttcaagcagatcgcctacaaccaccccagcagcagcatcggcgtgttcttctgcggccccaaggccctgagcagaaccctgcagaagatgtgccacctgtacagcagcgccgaccccagaggcgtgcacttctactacaacaaggagagcttctag

SEQ ID NO: 187987 - protein, 1745 aa, Artificial Sequence
  derived and/or modified sequence
MGNRRDLGQPRAGLCLLLAALQLLPGTQADPVDVLKALGVQGGQAGVPEGPGFCPQRTPEGDRAFRIGQASTLGIPTWELFPEGHFPENFSLLITLRGQPANQSVLLSIYDERGARQLGLALGPALGLLGDPFRPLPQQVNLTDGRWHRVAVSIDGEMVTLVADCEAQPPVLGHGPRFISIAGLTVLGTQDLGEKTFEGDIQELLISPDPQAAFQACERYLPDCDNLAPAATVAPQGEPETPRPRRKGKGKGRKKGRGRKGKGRKKNKEIWTSSPPPDSAENQTSTDIPKTETPAPNLPPTPTPLVVTSTVTTGLNATILERSLDPDSGTELGTLETKAAREDEEGDDSTMGPDFRAAEYPSRTQFQIFPGAGEKGAKGEPAVIEKGQQFEGPPGAPGPQGVVGPSGPPGPPGFPGDPGPPGPAGLPGIPGIDGIRGPPGTVIMMPFQFAGGSFKGPPVSFQQAQAQAVLQQTQLSMKGPPGPVGLTGRPGPVGLPGHPGLKGEEGAEGPQGPRGLQGPHGPPGRVGKMGRPGADGARGLPGDTGPKGDRGFDGLPGLPGEKGQRGDFGHVGQPGPPGEDGERGAEGPPGPTGQAGEPGPRGLLGPRGSPGPTGRPGVTGIDGAPGAKGNVGPPGEPGPPGQQGNHGSQGLPGPQGLIGTPGEKGPPGNPGIPGLPGSDGPLGHPGHEGPTGEKGAQGPPGSAGPPGYPGPRGVKGTSGNRGLQGEKGEKGEDGFPGFKGDVGLKGDQGKPGAPGPRGEDGPEGPKGQAGQAGEEGPPGSAGEKGKLGVPGLPGYPGRPGPKGSIGFPGPLGPIGEKGKSGKTGQPGLEGERGPPGSRGERGQPGATGQPGPKGDVGQDGAPGIPGEKGLPGLQGPPGFPGPKGPPGHQGKDGRPGHPGQRGELGFQGQTGPPGPAGVLGPQGKTGEVGPLGERGPPGPPGPPGEQGLPGLEGREGAKGELGPPGPLGKEGPAGLRGFPGPKGGPGDPGPTGLKGDKGPPGPVGANGSPGERGPLGPAGGIGLPGQSGSEGPVGPAGKKGSRGERGPPGPTGKDGIPGPLGPLGPPGAAGPSGEEGDKGDVGAPGHKGSKGDKGDAGPPGQPGIRGPAGHPGPPGADGAQGRRGPPGLFGQKGDDGVRGFVGVIGPPGLQGLPGPPGEKGEVGDVGSMGPHGAPGPRGPQGPTGSEGTPGLPGGVGQPGAVGEKGERGDAGDPGPPGAPGIPGPKGDIGEKGDSGPSGAAGPPGKKGPPGEDGAKGSVGPTGLPGDLGPPGDPGVSGIDGSPGEKGDPGDVGGPGPPGASGEPGAPGPPGKRGPSGHMGREGREGEKGAKGEPGPDGPPGRTGPMGARGPPGRVGPEGLRGIPGPVGEPGLLGAPGQMGPPGPLGPSGLPGLKGDTGPKGEKGHIGLIGLIGPPGEAGEKGDQGLPGVQGPPGPKGDPGPPGPIGSLGHPGPPGVAGPLGQKGSKGSPGSMGPRGDTGPAGPPGPPGAPAELHGLRRRRRFVPVPLPVVEGGLEEVLASLTSLSLELEQLRRPPGTAERPGLVCHELHRNHPHLPDGEYWIDPNQGCARDSFRVFCNFTAGGETCLYPDKKFEIVKLASWSKEKPGGWYSTFRRGKKFSYVDADGSPVNVVQLNFLKLLSATARQNFTYSCQNAAAWLDEATGDYSHSARFLGTNGEELSFNQTTAATVSVPQDGCRLRKGQTKTLFEFSSSRAGFLPLWDVAATDFGQTNQKFGFELGPVCFSS

SEQ ID NO: 187988 - DNA, 5238 bp, Artificial Sequence
  derived and/or modified sequence
atgggcaacagaagagacctgggccagcccagagccggcctgtgcctgctgctggccgccctgcagctgctgcccggcacccaggccgaccccgtggacgtgctgaaggccctgggcgtgcagggcggccaggccggcgtgcccgagggccccggcttctgcccccagagaacccccgagggcgacagagccttcagaatcggccaggccagcaccctgggcatccccacctgggagctgttccccgagggccacttccccgagaacttcagcctgctgatcaccctgagaggccagcccgccaaccagagcgtgctgctgagcatctacgacgagagaggcgccagacagctgggcctggccctgggccccgccctgggcctgctgggcgaccccttcagacccctgccccagcaggtgaacctgaccgacggcagatggcacagagtggccgtgagcatcgacggcgagatggtgaccctggtggccgactgcgaggcccagccccccgtgctgggccacggccccagattcatcagcatcgccggcctgaccgtgctgggcacccaggacctgggcgagaagaccttcgagggcgacatccaggagctgctgatcagccccgacccccaggccgccttccaggcctgcgagagatacctgcccgactgcgacaacctggcccccgccgccaccgtggccccccagggcgagcccgagacccccagacccagaagaaagggcaagggcaagggcagaaagaagggcagaggcagaaagggcaagggcagaaagaagaacaaggagatctggaccagcagccccccccccgacagcgccgagaaccagaccagcaccgacatccccaagaccgagacccccgcccccaacctgccccccacccccacccccctggtggtgaccagcaccgtgaccaccggcctgaacgccaccatcctggagagaagcctggaccccgacagcggcaccgagctgggcaccctggagaccaaggccgccagagaggacgaggagggcgacgacagcaccatgggccccgacttcagagccgccgagtaccccagcagaacccagttccagatcttccccggcgccggcgagaagggcgccaagggcgagcccgccgtgatcgagaagggccagcagttcgagggcccccccggcgcccccggcccccagggcgtggtgggccccagcggcccccccggcccccccggcttccccggcgaccccggcccccccggccccgccggcctgcccggcatccccggcatcgacggcatcagaggcccccccggcaccgtgatcatgatgcccttccagttcgccggcggcagcttcaagggcccccccgtgagcttccagcaggcccaggcccaggccgtgctgcagcagacccagctgagcatgaagggcccccccggccccgtgggcctgaccggcagacccggccccgtgggcctgcccggccaccccggcctgaagggcgaggagggcgccgagggcccccagggccccagaggcctgcagggcccccacggcccccccggcagagtgggcaagatgggcagacccggcgccgacggcgccagaggcctgcccggcgacaccggccccaagggcgacagaggcttcgacggcctgcccggcctgcccggcgagaagggccagagaggcgacttcggccacgtgggccagcccggcccccccggcgaggacggcgagagaggcgccgagggcccccccggccccaccggccaggccggcgagcccggccccagaggcctgctgggccccagaggcagccccggccccaccggcagacccggcgtgaccggcatcgacggcgcccccggcgccaagggcaacgtgggcccccccggcgagcccggcccccccggccagcagggcaaccacggcagccagggcctgcccggcccccagggcctgatcggcacccccggcgagaagggcccccccggcaaccccggcatccccggcctgcccggcagcgacggccccctgggccaccccggccacgagggccccaccggcgagaagggcgcccagggcccccccggcagcgccggcccccccggctaccccggccccagaggcgtgaagggcaccagcggcaacagaggcctgcagggcgagaagggcgagaagggcgaggacggcttccccggcttcaagggcgacgtgggcctgaagggcgaccagggcaagcccggcgcccccggccccagaggcgaggacggccccgagggccccaagggccaggccggccaggccggcgaggagggcccccccggcagcgccggcgagaagggcaagctgggcgtgcccggcctgcccggctaccccggcagacccggccccaagggcagcatcggcttccccggccccctgggccccatcggcgagaagggcaagagcggcaagaccggccagcccggcctggagggcgagagaggcccccccggcagcagaggcgagagaggccagcccggcgccaccggccagcccggccccaagggcgacgtgggccaggacggcgcccccggcatccccggcgagaagggcctgcccggcctgcagggcccccccggcttccccggccccaagggcccccccggccaccagggcaaggacggcagacccggccaccccggccagagaggcgagctgggcttccagggccagaccggcccccccggccccgccggcgtgctgggcccccagggcaagaccggcgaggtgggccccctgggcgagagaggcccccccggcccccccggcccccccggcgagcagggcctgcccggcctggagggcagagagggcgccaagggcgagctgggcccccccggccccctgggcaaggagggccccgccggcctgagaggcttccccggccccaagggcggccccggcgaccccggccccaccggcctgaagggcgacaagggcccccccggccccgtgggcgccaacggcagccccggcgagagaggccccctgggccccgccggcggcatcggcctgcccggccagagcggcagcgagggccccgtgggccccgccggcaagaagggcagcagaggcgagagaggcccccccggccccaccggcaaggacggcatccccggccccctgggccccctgggcccccccggcgccgccggccccagcggcgaggagggcgacaagggcgacgtgggcgcccccggccacaagggcagcaagggcgacaagggcgacgccggcccccccggccagcccggcatcagaggccccgccggccaccccggcccccccggcgccgacggcgcccagggcagaagaggcccccccggcctgttcggccagaagggcgacgacggcgtgagaggcttcgtgggcgtgatcggcccccccggcctgcagggcctgcccggcccccccggcgagaagggcgaggtgggcgacgtgggcagcatgggcccccacggcgcccccggccccagaggcccccagggccccaccggcagcgagggcacccccggcctgcccggcggcgtgggccagcccggcgccgtgggcgagaagggcgagagaggcgacgccggcgaccccggcccccccggcgcccccggcatccccggccccaagggcgacatcggcgagaagggcgacagcggccccagcggcgccgccggcccccccggcaagaagggcccccccggcgaggacggcgccaagggcagcgtgggccccaccggcctgcccggcgacctgggcccccccggcgaccccggcgtgagcggcatcgacggcagccccggcgagaagggcgaccccggcgacgtgggcggccccggcccccccggcgccagcggcgagcccggcgcccccggcccccccggcaagagaggccccagcggccacatgggcagagagggcagagagggcgagaagggcgccaagggcgagcccggccccgacggcccccccggcagaaccggccccatgggcgccagaggcccccccggcagagtgggccccgagggcctgagaggcatccccggccccgtgggcgagcccggcctgctgggcgcccccggccagatgggcccccccggccccctgggccccagcggcctgcccggcctgaagggcgacaccggccccaagggcgagaagggccacatcggcctgatcggcctgatcggcccccccggcgaggccggcgagaagggcgaccagggcctgcccggcgtgcagggcccccccggccccaagggcgaccccggcccccccggccccatcggcagcctgggccaccccggcccccccggcgtggccggccccctgggccagaagggcagcaagggcagccccggcagcatgggccccagaggcgacaccggccccgccggcccccccggcccccccggcgcccccgccgagctgcacggcctgagaagaagaagaagattcgtgcccgtgcccctgcccgtggtggagggcggcctggaggaggtgctggccagcctgaccagcctgagcctggagctggagcagctgagaagaccccccggcaccgccgagagacccggcctggtgtgccacgagctgcacagaaaccacccccacctgcccgacggcgagtactggatcgaccccaaccagggctgcgccagagacagcttcagagtgttctgcaacttcaccgccggcggcgagacctgcctgtaccccgacaagaagttcgagatcgtgaagctggccagctggagcaaggagaagcccggcggctggtacagcaccttcagaagaggcaagaagttcagctacgtggacgccgacggcagccccgtgaacgtggtgcagctgaacttcctgaagctgctgagcgccaccgccagacagaacttcacctacagctgccagaacgccgccgcctggctggacgaggccaccggcgactacagccacagcgccagattcctgggcaccaacggcgaggagctgagcttcaaccagaccaccgccgccaccgtgagcgtgccccaggacggctgcagactgagaaagggccagaccaagaccctgttcgagttcagcagcagcagagccggcttcctgcccctgtgggacgtggccgccaccgacttcggccagaccaaccagaagttcggcttcgagctgggccccgtgtgcttcagcagctag

SEQ ID NO: 187989 - DNA, 5238 bp, Artificial Sequence
  derived and/or modified sequence
atgggcaatcgcagggatctgggacagccgcgggcaggcctttgcctgttgctcgccgccctccagctgctccccggcacacaagcggatccagtggacgtactcaaagcgttgggtgtccagggagggcaagccggcgtgccagaagggccagggttctgccctcagcgaacgcctgaaggggatagggcctttaggattggccaagctagcacacttgggattcctacatgggagctgtttccagaaggtcactttccagagaatttctcactgctgataactctgcgtggccagcctgctaaccagagtgtgctcctgtcaatctatgacgagcggggtgcccgccagctgggattggctctggggccagcactgggactgctgggagatcctttccgccctctgccccagcaagtgaatctgaccgatggaagatggcacagggtggccgtgtccatcgacggagagatggttactcttgtcgctgactgcgaagcccagccacctgtcctggggcatggtccgcgctttatctccatcgctggtttgactgtcctaggaacacaagatcttggggagaagacctttgagggagatattcaggagttattaatctctcctgatcctcaggccgcctttcaggcctgcgagcgatacctgccagactgtgataacttggcaccagccgctacagtggccccacagggtgagccagagacgcccagacctagaagaaaaggtaaagggaaaggaagaaaaaaaggacgtggtagaaaaggtaaaggtcggaagaaaaataaggaaatatggacctcaagtcccccgccagatagcgcagagaaccagactagcacggatattccaaagactgaaaccccggcgcctaacctgccgccaaccccgacgcctctcgtcgtgacttcaaccgtgaccactgggctgaatgctaccatcctggagcggtcccttgacccagattcaggcaccgagctcggcaccctcgagactaaagcggctcgtgaagacgaggagggggatgatagcactatggggcctgactttagggctgcggaatacccttcccgcacacagtttcagattttccctggagctggcgagaaaggcgccaaaggtgagccagcagtcatcgagaagggccagcaatttgagggaccccccggggcccccgggccacagggtgtcgtgggaccgagcgggcccccagggccacctggtttccctggtgacccaggccccccggggcctgctggattgcccgggattccagggattgacggcatacgcgggccaccgggcaccgtcatcatgatgccattccagttcgctggcggatcattcaagggtcccccagtgtcctttcagcaggcgcaggcccaggctgtcttgcagcagactcaactcagcatgaagggccctcccggtcccgtgggcctgaccggacgcccaggacctgtaggactcccaggccacccggggctcaaaggtgaggaaggggccgaagggccacagggtccccggggcctccagggccctcacggcccgcctggccgcgtgggcaaaatgggtaggcccggggctgatggcgcccgcgggctgccaggcgataccgggccaaagggtgatagagggttcgacggcctgccagggctgcccggcgaaaagggccagcgtggcgattttgggcacgtgggacagcccgggccacccggtgaagacggagagcgcggggccgaaggaccaccaggcccaactgggcaagcaggggaacctgggcctagggggctgttgggccctcgcgggtcacccgggcccacggggcgccccggcgtgacaggaattgacggcgcgcctggagctaaagggaatgttgggccacccggtgagccaggacctcccggccaacagggtaatcacgggagccagggtttacctggaccccaggggctgatagggacccccggcgagaagggccctcccggtaaccccggtatccctggtctaccaggtagcgatggacctctgggacatccgggccacgagggccctaccggagagaaaggggcacaaggtccccctggcagtgcaggacccccagggtatcccggaccgaggggggttaaaggaacctcaggcaacaggggcttacaaggggagaagggcgagaagggcgaggacgggttccccgggttcaaaggagatgttggcctcaaaggagaccagggaaagccaggcgccccaggccctaggggtgaagacggacctgaaggtcccaagggccaagcaggtcaagcgggcgaggaaggaccgccgggctccgcgggagaaaagggcaaactcggcgtccccgggctgcccggatacccaggtagacctggccccaaaggcagtatcgggtttcccggacctctgggcccaatcggggaaaaaggcaaatccggcaaaacaggacagcctgggctggaaggtgagcgcggaccccccggctcgcgaggggagcggggccaacctggtgcaactggacagcccgggccaaaaggagacgttggccaggacggcgccccgggtattcccggtgaaaaggggctgcctggcttacagggtccgcccggatttccgggtccaaaaggacctccaggacatcagggaaaagatggtcggcctggccacccgggtcaaaggggcgaacttgggtttcaaggtcaaacagggccgcccggacccgcaggggtccttggtccacagggcaaaaccggagaggtaggccctcttggagagcgagggcctcctgggccacccgggccacccggcgagcaggggttacctggccttgagggaagagagggggcgaagggcgagctgggccctcctggcccactcggtaaagagggaccggctggtcttcgggggtttcctggcccgaagggtggcccgggtgacccgggccctaccggccttaaaggcgataagggacccccgggccccgtgggagctaacggctctcctggcgagcgggggcctcttggcccagctggaggaatcggattgccaggccaaagtggatctgagggaccagttggacctgcggggaagaaaggctctcgtggggagcgaggcccaccaggccctactggcaaggatggcatccccgggccgctgggccccctgggcccgcccggggctgccggacctagcggggaggagggcgataaaggggacgtgggggcacctggacataagggtagcaaaggcgacaagggtgatgccggcccacccggtcagcctggaattcgggggccagcaggtcacccaggaccaccgggtgctgacggcgcacagggacgccgagggccccctgggctgttcgggcagaaaggggacgacggcgtgaggggatttgtaggggtgatcgggcccccaggcctgcagggtcttcccggacctcccggagaaaaaggggaggttggggacgtggggtcaatgggaccccacggagctccaggccctagaggtccccagggcccgactggctccgaaggcaccccgggacttcctgggggggtcggtcaacctggagcggtgggggagaaaggggaaaggggagatgcaggcgacccaggacctcctggtgcgccaggcatccctggtccgaagggggacattggggagaagggagattcaggaccatctggtgcagccggccccccgggaaagaaaggccccccgggggaggacggtgccaaaggttccgtgggacctactggcttgcctggggatctgggaccgcctggcgaccccggcgtgtccggtatcgatggatctcctggtgagaagggagaccctggtgacgtcggcggacctggtcccccaggcgcttcaggtgagccaggagcccccggaccacccggcaaacggggcccaagcggtcatatgggtagagagggcagagaaggcgagaaaggtgccaagggggaacctgggcccgatggtccgccaggacggactggcccgatgggcgcacgtggtccgcccggccgtgtgggtcccgaagggctgcgcggaatcccgggccctgtgggcgaaccaggcctcttgggcgcccctggacagatgggccctcctggccccctcggcccttctgggctgcccggcctaaaaggggataccgggcctaaaggcgaaaagggacacatcggtttgatcgggttaattgggcccccaggagaagctggcgaaaagggcgaccaaggactgccaggggttcaaggcccgcccgggcccaaaggggaccccggtccgcctggccccattggctctcttggacaccctggcccaccaggggtggctggcccacttggtcagaaggggtctaagggttcccctgggtccatgggacccagaggagatactgggccagccggaccccctggaccgccgggggctcccgcggaactgcatgggttaagacggaggcggagatttgtgccagtcccgctcccagtggtggaaggcggacttgaggaggtgcttgcatccctcacctctctgtcactggagctggaacagctgcgacgccccccgggcactgcagagcggccaggcctcgtctgccatgaactgcaccgcaatcatccccatcttccagatggagagtattggattgatcccaatcagggttgcgcccgagactcatttcgggttttctgtaattttaccgcggggggggagacctgcttatatcccgataagaagtttgagattgtcaagctggcatcatggagcaaggagaagccagggggctggtacagcacctttcgaaggggcaagaagttcagctatgtagacgccgacggcagccccgtaaatgttgtccagctgaatttcctgaagctgctctctgctacagccagacagaacttcacatacagctgtcagaacgctgcagcttggctggacgaggctacaggagattatagccattcagctaggtttctgggcaccaacggagaggaactcagcttcaaccagacaactgcagcaacagtgtcagtgccacaggacgggtgcaggctacgaaaagggcagaccaagacactgtttgaattttcttccagccgcgctggtttcttgcccctctgggatgtcgccgccaccgattttggccagacgaatcagaaattcggctttgagctcggaccagtttgcttcagttcgtag

SEQ ID NO: 187990 - DNA, 5238 bp, Artificial Sequence
  derived and/or modified sequence
atgggcaacagaagagacctgggccagccccgggccggcctgtgcctgctgctggccgccctgcagctgctgcccggcacccaggccgaccctgtggatgtgctgaaggccctgggcgtgcagggcggccaggccggcgtgcctgagggccctggcttctgcccccagaggaccccagagggggaccgggccttcagaattggccaggccagcaccctgggcatccccacctgggagctgtttcctgagggccacttccctgagaacttcagcctgctgatcaccctgcggggccagcctgccaaccagagcgtgctgctgagcatctatgatgagcggggggcccggcagctgggcctggccctgggccctgccctgggcctgctgggggaccccttccggcccctgccccagcaggtgaacctgacagatggccgctggcaccgggtggccgtgtccattgatggagagatggtgaccctggtggccgactgtgaggcccagccccctgtgctgggccacggcccccgcttcatcagcattgctggcctgactgtgctgggcacccaggacctgggggagaagacctttgaaggagacatccaggagctgctgatcagcccagacccccaggccgccttccaggcctgtgagcgctacctgcctgactgtgacaacctggccccagctgccaccgtggccccccagggcgagcctgagaccccccggcccaggaggaaaggaaaaggaaaaggaaggaagaagggccggggcaggaagggcaagggcaggaagaagaacaaggagatctggaccagcagccccccaccagattctgctgagaaccagaccagcacagacatccccaagacagagaccccagcccccaacctgccccccacccccacccccctggtggtgaccagcacagtgaccaccggcctgaatgccaccatcctggagaggagcctggaccctgacagcggcacagagctgggcaccctggagaccaaggccgcccgggaggatgaggagggagatgacagcaccatgggccctgacttccgggctgctgagtaccccagcaggacccagttccagatcttccctggggccggggagaagggggccaagggggagcctgctgtgattgagaagggccagcagtttgagggccccccaggggcccctggcccccagggcgtggtgggccccagcggccccccaggccccccaggcttccctggggaccccggccccccaggccctgctggcctgcccggcatccctggcattgatggcatccggggccccccaggcaccgtcatcatgatgcccttccagtttgctgggggcagcttcaagggcccccctgtgtccttccagcaggcccaggcccaggccgtgctgcagcagacccagctgtccatgaagggccccccaggccctgtgggcctgaccggccggcccggccctgtgggcctgcccggccaccctggcctgaagggggaggagggcgctgagggcccccagggcccccggggcctgcagggcccccacggccccccaggccgggtgggcaagatgggccggcctggagcagatggagcccggggcctgcccggggacaccggccccaagggggaccggggctttgatggcctgcccggcctgcctggagagaagggccagagaggagactttggccacgtgggccagcccggccccccaggagaagatggagagagaggagctgagggccccccaggccccaccggccaggccggggagcccggcccccggggcctgctgggcccccggggcagccctggccccaccggccggcctggggtgactggaattgatggagcccctggggccaagggaaatgtgggccccccaggagagcccggccccccaggccagcagggcaaccacggcagccagggcctgcccggcccccagggcctcatcggcaccccaggagagaagggccccccaggcaaccctggcatccctggcctgcccggcagtgatggccccctgggccaccctggccacgagggccccactggagagaagggggcccagggccccccaggcagcgctggccccccaggctacccaggcccccggggcgtgaagggcaccagcggcaacagaggcctgcagggcgagaagggggagaagggggaggatggcttccctggcttcaagggagatgtgggcctgaagggggaccagggcaagccaggggcccctggccccagaggagaagatggccctgagggccccaagggccaggccggccaggccggggaggagggccccccaggcagcgctggggagaagggcaagctgggcgtgcccggcctgcccggctacccaggccggcccggccccaagggcagcatcggcttccctggccccctgggccccatcggggagaagggcaagagcggcaagacaggccagcccggcctggagggggagcggggccccccaggcagcagaggagagcggggccagcccggggccaccggccagcccggccccaagggagatgtgggccaggatggagcccctggcatccctggagagaagggcctgcccggcctgcagggccccccaggcttccctggccccaagggccccccaggccaccagggcaaggatggccggcccggccaccctggccagagaggagagctgggcttccagggccagacaggccccccaggccctgctggggtgctgggcccccagggcaagacaggagaggtgggccccctgggggagcggggccccccaggccccccaggccccccaggagagcagggcctgcccggcctggagggccgggagggcgccaagggggagctgggccccccaggccccctgggcaaggagggccctgctggcctgcggggcttccctggccccaagggcggccctggggaccccggccccaccggcctgaagggggacaagggccccccaggccctgtgggcgccaacggcagccctggagagcggggccccctgggccctgctgggggcatcggcctgcccggccagagcggcagcgagggccctgtgggccctgctgggaagaagggcagcagaggagagcggggccccccaggccccaccgggaaggatggcatccctggccccctgggccccctgggccccccaggagctgctggccccagcggggaggagggggacaagggagatgtgggcgcccctggccacaagggcagcaagggggacaagggagatgctggccccccaggccagcccggcatccggggccctgctggccaccctggccccccaggagcagatggagcccagggccggcggggccccccaggcctgtttggccagaagggagatgatggagtgcggggctttgtgggcgtcatcggccccccaggcctgcagggcctgcccggccccccaggagagaagggggaggtgggagatgtgggctccatgggcccccatggagcccctggcccccggggcccccagggccccactggaagtgagggcaccccaggcctgcccggcggcgtgggccagcccggggctgtgggggagaagggggagagaggagatgctggggaccccggccccccaggggcccctggcatccctggccccaagggggacatcggggagaagggggacagcggccccagcggggccgccggccccccaggcaagaagggccccccaggagaagatggagccaagggctctgtgggccccaccggcctgcccggggacctgggccccccaggggaccccggggtgtctggaattgatggcagccctggagagaagggggaccctggagatgtgggcggccctggccccccaggggccagcggggagcccggggcccctggccccccaggcaagaggggccccagcggccacatgggccgggagggccgggagggggagaagggggccaagggggagcccggcccagatggccccccaggccgcacaggccccatgggcgcccggggccccccaggccgggtgggccctgagggcctgcggggcatccctggccctgtgggggagcccggcctgctgggcgcccctggccagatgggccccccaggccccctgggccccagcggcctgcccggcctgaagggggacaccggccccaagggggagaagggccacatcggcctcatcggcctgattggccccccaggagaggccggggagaagggggaccagggcctgcccggggtgcagggccccccaggccccaagggggaccccggccccccaggccccatcggcagcctgggccaccctggccccccaggagtggccggccccctgggccagaagggcagcaagggcagccctggctccatgggccccaggggggacaccggccctgctggccccccaggccccccaggggccccagctgagctgcacggcctgcggaggagaagaagatttgtgcctgtgcccctgcctgtggtggagggcggcctggaggaggtgctggccagcctgaccagcctgagcctggagctggagcagctgcggcggcccccaggcacagctgagcggcccggcctggtgtgccacgagctgcacaggaaccacccccacctgcctgatggagagtactggattgaccccaaccagggctgtgcccgggacagcttccgggtcttctgcaacttcaccgctggaggagagacctgcctgtacccagacaagaagtttgagatcgtgaagctggcctcctggagcaaggagaagccaggcggctggtacagcaccttcagaagaggcaagaagttctcctatgtggatgctgatggcagccctgtgaatgtggtgcagctgaacttcctgaagctgctgagcgccacagcccggcagaacttcacctacagctgccagaatgctgctgcctggctggatgaggccaccggggactacagccacagcgcccgcttcctgggcaccaatggagaggagctgtccttcaaccagaccacagctgccaccgtgtctgtgccccaggacggctgccgcctgaggaagggccagaccaagaccctgtttgagttcagcagcagccgggccggcttcctgcccctgtgggatgtggccgccacagactttggccagaccaaccagaagtttggatttgagctgggccctgtgtgcttcagcagctag

SEQ ID NO: 187991 - DNA, 6174 bp, Artificial Sequence
  derived and/or modified sequence
gcgagtgactgcaccgagcccgagaagtcgccgcgccccgcagccgccccgactggttccccgccttgcccgtgggccccgccgggatggggaaccgccgggacctgggccagccgcgggccggtctctgcctgctcctggccgcgctgcagcttctgccggggacgcaggccgatcctgtggatgtcctgaaggccctgggtgtgcagggaggccaggctggggtccccgaggggcctggcttctgtccccagaggactccagagggtgaccgggcattcagaattggccaggccagcacgctcggcatccccacgtgggaactctttccagaaggccactttcctgagaacttctccttgctgatcaccttgcggggacagccagccaatcagtctgtcctgctgtccatttatgatgaaaggggtgcccggcagttgggcctggcactggggccagcgctgggtctcctaggtgaccccttccgccccctcccccagcaggtcaacctcacagatggcaggtggcaccgtgtggccgtcagcatagatggtgagatggtgaccctggtagctgactgtgaagctcagccccctgttttgggccatggcccccgcttcatcagcatagctggactcactgtgctggggacccaggaccttggggaaaagactttcgagggagacattcaggagctgctgataagcccagatcctcaggctgccttccaggcttgtgagcggtacctccccgactgtgacaacctggcaccggcagccacagtggctccccagggtgaaccagaaacccctcgtcctcggcggaaggggaagggaaaagggaggaagaaagggcgaggtcgcaaggggaagggcaggaaaaagaacaaggaaatttggacctcaagtccacctcctgactccgcagagaaccagacctccactgacatccccaagacagagactccagctccaaatctgcctccgacccccacgcctttggtcgtcacctccactgtgactactggactcaatgccacgatcctagagaggagcttggaccctgacagtggaaccgagctggggaccctggagaccaaggcagccagggaggatgaagaaggagatgattccaccatgggccctgacttccgggcagcagaatatccatctcggactcagttccagatctttcctggtgctggagagaaaggagcaaaaggagagcccgcagtgattgaaaaggggcagcagtttgagggacctccaggagccccaggaccccaaggggtggttggcccctcaggccctcccggccccccaggattccctggcgaccctggtccaccgggccctgctggcctcccaggaatccccggcattgatgggatccgaggcccaccgggcactgtgatcatgatgccgttccagtttgcaggcggctcctttaaaggccccccagtctcattccagcaggcccaggctcaggcagttctgcagcagactcagctctctatgaaaggcccccctggtccagtggggctcactgggcgcccaggccctgtgggtctccccgggcatccaggtctgaaaggagaggagggagcagaagggccacagggtccccgaggcctgcagggacctcatggaccccctggccgagtgggcaagatgggccgccctggagcagatggagctcggggcctcccaggggacactggacctaagggtgatcgtggcttcgatggcctccctgggctgcctggtgagaagggccaaaggggtgactttggccatgtggggcaacccggtcccccaggagaggatggtgagaggggagcagagggacctccagggcccactggccaggctggggagccgggtccacgaggactgcttggccccagaggctctcctggccccacgggtcgcccgggtgtgactggaattgatggtgctcctggtgccaaaggcaatgtgggtcctccaggagaaccaggccctccgggacagcagggaaaccatgggtcccagggactccccggtccccagggactcattggcactcctggggagaagggtccccctggaaacccaggaattccaggcctcccaggatccgatggccctctgggtcacccaggacatgagggccccacgggagagaaaggggctcagggtccaccagggtcggcaggccctccgggctatcctggacctcggggagtgaagggcacttcaggcaaccggggcctccagggggagaaaggcgagaagggagaggacggcttcccaggcttcaagggcgatgtggggctcaaaggtgatcaggggaaacccggagctccaggtccccggggagaggatggtcctgaggggccgaaggggcaggcggggcaggctggcgaggaggggcccccaggctcagctggggagaagggcaagcttggggtgccaggcctcccaggttatccaggacgccctggacctaagggatctattggatttcccggtcccctgggacccataggagagaaagggaagtcgggaaagacagggcagccaggcctggaaggagagcggggaccaccaggttcccgtggagagagggggcaaccgggtgccacagggcaaccaggccccaagggcgatgtgggccaggatggagcccctgggatccctggagaaaagggcctccctggtctgcaaggccctccaggattccctgggccaaagggcccccctggtcaccaaggtaaagatgggcgaccagggcaccctggacagagaggagaactgggcttccaaggtcagacaggcccgcctggaccagctggtgtcttaggccctcagggaaagacaggagaagtgggacctctaggtgaaagggggcctccaggcccccctggacctcctggtgaacaaggtcttcctggcctggaaggcagagagggggccaagggggaactgggaccaccaggaccccttgggaaagaagggccagctggactcaggggctttcccggccccaaagggggccctggggacccgggacctactggcttaaagggtgataagggccccccagggcccgtgggggccaatggctcccctggtgagcgcggtcctttgggcccagcaggaggcattggacttcctggccaaagtggcagcgaaggccccgttggccctgcaggcaagaaggggtcccggggagaacgtggcccccctggccccactggcaaagatgggatcccagggcccctggggcctctgggaccccctggagctgctgggccttctggcgaggaaggggacaagggggatgtgggtgcccccggacacaaggggagtaaaggcgataaaggagacgcgggcccacctggacaaccagggatacggggtcctgcaggacacccaggtcccccgggagcagacggggctcaggggcgccggggacccccaggcctctttgggcagaaaggagatgacggagtcagaggctttgtgggggtgattggccctcctggactgcaggggctgccaggccctccgggagagaaaggggaggtcggagacgtcgggtccatgggtccccatggagctccaggtcctcggggtccccaaggccccactggatcagagggcactccagggctgcctggaggagttggtcagccaggcgccgtgggtgagaagggtgagcgaggggacgctggagacccagggcctccaggagccccaggcatcccggggcccaagggagacattggtgaaaagggggactcaggcccatctggagctgctggacccccaggcaagaaaggtccccctggagaggatggagccaaagggagcgtgggccccacggggctgcccggagatctagggcccccaggagaccctggagtttcaggcatagatggttccccaggggagaagggagaccctggtgatgttgggggaccgggtccgcctggagcttctggggagcccggcgcccccgggccccccggcaagaggggtccttcaggccacatgggtcgagaaggcagagaaggggagaaaggtgccaagggggagccaggtcctgatgggcccccagggaggacgggtccaatgggggctagagggccccctggacgtgtggggcctgagggtcttcgagggatccctggccctgtgggtgaaccaggcctcctgggagcccctggacagatgggccctcctggccccctggggccctctggcctcccagggctgaagggagacactggccccaagggggaaaagggccacattggattgatcggtctcattggccccccgggagaagctggtgagaaaggagatcaggggttgccaggcgtgcagggaccccctggtcccaagggagaccctggtccccctggtcccattggctctctgggccaccctgggcccccaggtgtggcgggccctctaggacagaaaggctcaaaagggtctccggggtccatgggcccccgtggagacactggacctgcaggcccaccaggccccccgggtgcccctgccgagctgcatgggctgcgcaggcgccggcgcttcgtcccagtcccgcttccagtcgtggagggcggcctggaggaggtgctggcctcgctcacatcgctgagcttggagctggagcagctgcggcgtcctcccggcactgcggagcgcccgggcctcgtgtgccacgagctgcaccgcaaccacccgcacctgcctgatggggaatactggattgaccccaaccagggctgcgcgcgggactcgttcagggttttttgcaacttcacggcgggaggagagacctgcctctatcccgacaagaagtttgagatcgtgaaattggcctcctggtccaaggaaaagcctggaggctggtatagcacattccgtcgagggaagaagttctcctacgtggacgccgacgggtccccagtgaatgtcgtgcagctgaacttcctgaaactgctgagtgccacagctcgccagaacttcacctactcctgccagaatgcagctgcctggctggacgaagccacgggtgactacagccactccgcccgcttccttggcaccaatggagaggagctgtctttcaaccagacgacagcagccactgtcagcgtcccccaggatggctgccggctccggaaaggacagacgaagacccttttcgaattcagctcttctcgagcgggatttctgcccctgtgggatgtggcggccactgactttggccagacgaaccaaaagtttgggtttgaactgggccccgtctgcttcagcagctgagagtgtccggggtgggagggaccatgagggagccccagaatggggtgcatttggtgctgaggctttgaagccaccgtatttttcgttacctgtgactatggagccaatgggatgtgacttcgctcatcacggacagtcattccttctcctttccagggtgctgggggctggggttccctggcccaagggtccagcctcctctcaccccattccaggtggcatactgcagtctggctctttctcccctccctccccacccaagcctcacctccccaccccttgaacccccatgcaatgagcttctaactcagagctgatgaacaaaagcccccccacccccaatgcctgcctcctcactcctccgtcgctgcccttcacaccttttggtgctacccctccccagagttaagcactggatgtctcctgatcccaggctgggacccctacccccaccccctttgatcctttctacttccacggtgaaaggactgaggtcggactacagagggaagagggacttcccttgactgggttgtgtttcttttcctgcctcagcccagctctgcaaatcccctccccctgccccccacctccccaggctcaccttgccatgccaggtggtttggggaccaagatgttgggggggtgaatcaggatcctaatggtgctgccctatttatacctgggtctgtattaaaagggaaagtcccccctgttgtagatttcatctgcttcctccttagggaaggctgggatatgatgagagattccagcccaagcctggccccccaccgccaggccatagggcataatttgcatctcaaatctgagaataaactgatgaactgtg

SEQ ID NO: 187992 - DNA, 5238 bp, Artificial Sequence
  derived and/or modified sequence
atgggcaaccggcgggacctgggccagccccgggccggcctgtgcttgctgcttgccgcactccagttgttacccggcacacaagcagacccagttgacgttttaaaagccctgggagtgcaagggggacaggcgggagtcccagaaggtccaggattctgcccccagaggacgccagaaggcgatcgcgcattcagaatcggtcaggccagcaccctggggatcccaacatgggaattgttccctgaggggcacttcccagagaacttttcactgttgatcactttaaggggacagcccgctaatcagagcgtcctgctcagtatctacgatgagcgcggagctaggcagcttggactagcccttggcccagccttaggacttttgggcgacccttttagacccttgcctcagcaggtaaatttaaccgacggcagatggcatcgcgttgccgtttcgatcgatggcgagatggtgaccttggtcgctgactgcgaagcgcaaccacctgttctcggtcacggcccccgctttatttctatcgctggacttactgtgctggggacacaggatctaggtgagaagacattcgaaggcgatattcaggagctgctaatttcacctgaccctcaggccgccttccaggcctgtgaacgctacctccccgactgcgacaacctggcgcccgctgctactgttgccccacaaggagaacctgaaacaccccgcccccgccggaagggcaagggaaagggaagaaagaagggtcgcggccggaaggggaaaggcagaaagaagaataaagagatttggacatccagccctccccctgattctgcagaaaatcagaccagtaccgatatccccaaaacagagacccccgctccaaatctccctcctacccctactccattggttgtcactagcaccgttactacagggctcaacgcaactatcctggagcgctcactcgatcccgactcaggcaccgaactgggaacgcttgagactaaagctgcaagggaggatgaggaaggtgacgattccacaatgggtcccgattttcgggcagcagagtatcccagcaggacccagtttcagatctttcccggggccggagaaaagggtgctaagggcgagcccgccgtaatcgaaaaaggtcagcagttcgaaggcccccctggagccccggggccccagggcgtggtgggaccttctggcccccccggaccacccggcttcccaggggaccccgggccccccggaccagccggtctgccagggattcctgggatcgacggcataagaggccctccaggaactgtgatcatgatgccttttcagtttgccggcgggtcatttaaaggcccccccgtttcatttcagcaggcccaagcccaggccgttttacagcaaactcagctttctatgaagggcccaccagggccagtcgggctgaccggtcgccccgggcccgtcggtctgcccggtcatcccggcctcaagggcgaggaaggggccgagggaccccagggacctcgaggactgcagggtccccacggacctccaggcagagtcggcaagatgggccggcccggtgcagacggcgcgagaggattacctggcgataccggccctaaaggtgatcgggggttcgacggccttcctggactgccgggggaaaaagggcagaggggggactttgggcacgtgggacagcctggaccacccggcgaggacggcgagaggggggccgaagggccacccgggcccacggggcaggccggggagcccggtccaagagggttacttggacctcggggctctccggggccaacgggtagacccggtgtgacaggaatcgacggggccccaggcgccaagggaaacgtgggtccacccggcgaaccagggcccccaggccagcaaggaaaccacggtagccagggcctgcccggtccgcaaggtctgatcggcactcctggcgaaaaaggaccgcctggtaatcccggtatccctggtttgcccggttccgatgggcctctcggacacccggggcatgagggccctaccggggagaaaggcgcccaggggccacctggatctgccggccctccaggttaccccggacctcggggcgtgaaggggacctccggtaatcgcggcctgcaaggagagaagggggaaaaaggagaggacggatttccagggttcaagggcgatgtcggattaaagggcgatcaaggcaagcccggcgcacccggccctcgcggagaggacggccccgaggggcccaaaggtcaggctggccaggcaggagaagagggaccaccgggtagcgctggcgagaagggcaaattaggcgtccctggcctcccggggtaccctggcaggccgggacctaaggggagtattggtttcccagggcccctcggacctattggagaaaagggaaagtcgggtaagactggacagcccggtctcgaaggtgaaagaggaccgccgggctcgagaggagagaggggccagcccggggcgaccgggcagcctggccctaaaggagatgttggacaggacggagcaccaggaatcccaggagagaaaggactgcctgggctccagggcccccctggcttccccggcccaaaagggccgcctggccaccaaggcaaggatggcaggcctggccaccccgggcagagaggggagcttggcttccagggtcagaccgggcctccaggccccgcaggcgtccttggacctcaaggaaagaccggtgaggtgggtcctctaggggagagaggcccccctggtccccccggtccgcccggggaacaaggcctaccaggtctggaaggtcgggagggagcaaagggggagctcggacccccaggccctctgggtaaagagggtccagcaggccttagagggtttcccggacctaaaggcgggcctggggatcctggcccaacgggcctcaagggcgataagggcccacctggaccagtgggggccaacggtagtccaggggagcgcggccctctgggcccagcaggcggaatcggcttacctggacagtcaggctccgaaggcccagtcgggcccgcaggcaagaaagggagcagaggggaacgcggaccacctggcccgacagggaaagacggtattccagggcccctgggaccacttgggccccccggtgcggccggcccatccggagaggagggagacaagggggacgtcggggctccaggacacaagggatccaaaggcgataaaggtgatgccggacctcctgggcagcctggcattcgaggtccggctggacacccaggccccccgggcgccgacggcgcccagggtaggcggggcccgccaggtctgtttggccagaaaggtgatgacggagttcgtgggttcgtcggcgtcattgggccaccaggcttgcagggtcttcccggacctcctggcgagaagggggaggtcggtgatgtcggtagcatgggcccacatggcgctcctggtccacgcggcccgcaaggacctactggaagcgagggtacccccggattgccaggtggagtggggcagcccggcgcagtaggcgaaaaaggggaacgtggcgatgctggagacccaggaccccccggggcccctggaattcctggaccgaagggcgacattggcgagaagggtgattccggccccagcggcgcagccgggccacctggtaaaaaaggtcccccaggggaggacggggctaaaggaagcgtagggccaaccggactcccgggtgatctcggccctcccggggacccaggggtctcaggcatagatggaagccctggagaaaaaggggatccgggagacgtgggcggaccgggtcctccaggcgcatccggagagcccggggcaccaggccctccaggcaagagaggcccaagcggtcatatggggcgcgaagggcgcgagggggagaagggcgccaaaggggagccagggcctgatgggccccctgggagaactgggcccatgggcgcaagagggccgcccggccgcgtgggacctgagggattgagaggcatcccagggccagttggagagcctggactactcggggctcccggccagatggggccccctggccccctgggaccatccggattgccaggcctcaagggagacacaggacccaagggcgaaaaggggcacataggcctgataggactgatcggtcctcccggtgaagccggcgagaagggcgaccagggcctgcctggagtacaaggcccacccggacctaagggcgaccctggtccccccggcccaatcgggtctctcggacatcccggacctcctggtgtcgccggacctctgggacagaaggggagcaagggatcccccggttctatgggaccccgaggagatactggtcctgccggcccaccagggcctccaggggctcccgccgagctgcacggacttcgcaggaggcgccgattcgtccctgtgccactacccgtagttgagggcggactggaggaagtgctggcttccttaaccagcctgtcgctggagctcgagcagcttcgtcgaccccccgggacggctgaaagaccaggtctggtgtgtcacgagctgcatcgaaatcacccacaccttcctgatggagaatactggatagatccaaaccagggctgcgcacgggattcattcagagtgttctgcaatttcaccgctggcggagaaacttgtctctacccagacaagaaattcgaaatcgtgaaactagctagctggtcaaaagagaagcctggtggctggtattccacatttcgacgtggcaagaagttttcttacgtggacgcagatggcagcccagtgaacgtcgtgcagttgaacttccttaaattgctgtctgctaccgcaagacagaattttacctattcctgccaaaacgcggctgcctggttggatgaggccaccggggactactctcactccgcccggttcctgggtactaatggcgaagagctgagctttaatcagactaccgccgccactgtttctgtaccacaggacggatgccgcctaagaaaaggacagacaaagacactgtttgaattctcttctagcagagctgggtttttacctctgtgggatgtcgctgcaaccgacttcggtcagacgaatcagaagtttgggtttgaactcggccccgtgtgtttctcttcatag

SEQ ID NO: 187993 - DNA, 5238 bp, Artificial Sequence
  derived and/or modified sequence
atggggaatagaagggacctgggccagcccagagccggactttgtctgttgttggccgcattgcagctgttgcccggaacgcaagcggatcctgttgatgtgctcaaggctctgggtgttcagggaggccaagcgggagtgcccgagggacctggtttttgcccgcagcgcacgcctgaaggagatagggcattccgaattggccaggctagcacgcttggtataccgacttgggagcttttcccagaaggacactttcctgaaaacttcagcctgctcattacgctcagggggcagccagccaaccagagtgtgctcttgagcatctacgacgagaggggtgccagacaacttggtttggctctgggtccggctttgggactgcttggagatcctttccgcccactaccgcagcaagttaacctgacggacggacgctggcaccgagtcgccgtgtccattgatggcgaaatggtaactctggtggcagactgtgaggcgcaaccgccagtcctcggacacgggccaagattcataagcatcgccggtcttactgtcctcggcacacaggaccttggggagaaaacattcgaaggcgacattcaggagctgctgatttcacccgatccccaggctgcttttcaggcctgcgagcggtacctccctgattgcgacaatctggcaccagcagctacagtcgcgcctcaaggcgaacctgagacccccagacctcgacgcaaggggaaggggaaaggacgaaagaagggccgtggcaggaagggaaaagggcgaaagaagaacaaggagatttggacaagttctcctccgcctgatagtgccgagaatcaaacttccaccgacatacctaaaaccgagacacctgccccaaatttgcccccaacacccacacctctggtcgtgacgtctaccgtcaccaccggcctgaacgcaacaattctggaacggtctctggacccagattcaggcaccgagctcggaacattggaaaccaaagccgcaagggaggatgaggagggggacgattcaaccatgggacctgatttccgggctgccgagtacccctccagaacccagtttcaaatctttccaggtgccggagaaaagggggctaaaggagagcctgccgtgatcgagaaggggcagcagttcgaagggcctcccggagccccagggccacagggcgtggtgggcccttctgggcctccgggtccgccagggttccccggagaccctggtccacccggtccagctggcctcccaggcattcccggtattgatggcataagggggcctcccggaacggttatcatgatgccatttcagttcgcaggcggttcattcaaaggccctcccgtgagttttcagcaggcgcaagcccaggctgtactgcagcagacacagctgtccatgaagggccctcccggtcctgtaggcctcaccggaaggcccggacctgtgggcttacccggtcatcccggtctgaagggagaagaaggggctgaagggcctcagggccctaggggactgcaggggcctcatggaccccctggccgagtgggaaagatgggaagaccaggcgcagatggggctagaggacttcccggagataccggcccaaaaggtgatagggggttcgatggcttgccaggcctacccggagagaaaggacaaaggggcgactttggccacgtgggacaacctggccctcctggagaggacggagaaaggggggctgagggacccccaggccctacgggacaggccggagaacctggccctcgagggttgttgggaccgcgtggatctccgggacccaccggtaggcccggtgtgacggggatcgacggggcaccaggtgctaaagggaacgtgggtccgccaggcgaaccgggtcccccaggacagcagggcaatcatggcagccagggcctgccaggccctcaaggcctcatagggacccctggcgagaaggggcctcccggaaacccaggaatcccaggcttgccagggtccgacggacctctaggacacccagggcacgagggacccaccggggagaagggagcccagggcccaccgggtagtgccggtccccctggctaccccggaccccgtggggtcaagggaaccagtggaaaccgcggtcttcagggggaaaagggggaaaaaggggaggacggattccccggattcaagggagacgtcggtctgaagggcgaccagggcaaaccaggcgcaccaggtcccaggggagaggatggcccagagggaccaaaaggtcaggccggacaagcaggcgaggagggtcccccaggatcagccggtgaaaagggaaagctgggcgttcccggtttgccaggctatccaggtcgcccagggccaaaggggtctattgggttccccggaccactcggacctattggagagaagggtaagagcgggaagacaggtcagcctggactcgaaggggagcgtgggcctcctggatctcggggtgaaagggggcagccaggggctacgggccagcccggtcctaagggagatgtggggcaggatggggctccagggatcccgggagagaaaggattaccaggactgcagggccctcctggatttccaggcccaaagggtccccctgggcaccagggaaaagacggacgccctggccaccctgggcagaggggagagctcggcttccaagggcagacaggccctccaggaccagcgggagtgctagggccacaggggaaaaccggcgaagtgggaccccttggagagaggggtcctccaggtcctccaggtccgcctggagagcaggggttgccgggtctggaggggagggagggcgctaagggggaactgggtcccccagggcctctgggaaaagaaggaccagccggactgagaggatttcccggacccaaaggcggtcccggagaccccggtcctaccgggctgaagggtgataaaggaccccctggcccagttggcgcaaatgggagtccaggcgagcgaggccctctcggcccagccggtggcataggcctacccggtcagtcgggctccgaaggccctgtagggccagccggaaagaagggatcgaggggagagaggggcccacctgggccaactgggaaggacggaatcccgggacccctaggccctctcggacctcccggagcggcaggcccatctggagaagaaggcgataagggggatgtcggggctcctggtcacaagggcagtaagggcgataagggcgacgctggcccacccggacaaccaggaatcagaggacccgcagggcacccaggaccccctggcgctgacggagcccagggtcgaagagggccaccgggtctgttcgggcagaagggagatgacggagtgcggggatttgtcggcgtgattggcccacccggactgcaagggttgccgggtccacctggggaaaagggcgaggtgggcgatgtggggagcatgggaccccacggagccccaggccctcgtgggccacagggcccaacgggatccgagggcactcccggacttccagggggagtaggccagcccggtgcagtgggagagaaaggcgaacgtggcgacgcaggcgatcctggcccaccgggagcaccaggtattccagggccaaagggggatattggggagaagggcgactccgggccatccggagccgcaggacctcctggtaagaagggccctccaggcgaagatggagccaaaggtagtgtgggcccaaccgggctacccggtgacctcggcccaccgggagacccaggtgtgagtggcatcgacggaagcccaggtgaaaagggggatcctggggatgtggggggtccgggacctcctggggcttctggtgagcctggggcacccggacctcctggtaaacggggtccttccggccatatgggtcgcgaggggagggagggcgaaaagggagctaagggggagcctggacctgatggccctccgggacgcacagggcctatgggcgctcgcggacccccaggaagagtgggcccagagggcctccgcggaataccgggacctgtcggggaacctggactgctaggggctcctggtcagatgggcccaccaggtccccttggtccgagcgggttacctggtttaaaaggagatactggtcctaagggcgaaaagggacatatcgggctgattggcctcattggccctcccggagaggcaggagaaaaaggtgatcagggtttacccggagtccagggaccaccaggccctaagggggacccgggtcccccaggacccatcgggagtctcggacacccaggaccacctggagtggccggacctttgggacaaaaggggagcaagggttccccgggttccatgggtcccagaggtgatactgggcctgccggaccacccggacctcccggagcacccgctgagctacacgggcttcggaggaggcggcgtttcgtacccgttccactccctgtagtggaaggcggtttggaggaagttctggcctccctaacttcattatcactggaattggagcagctgagaaggcctcccggaaccgccgagcgcccaggactagtgtgtcatgagctacacaggaatcatcctcacttaccagatggtgagtactggattgatccgaaccaaggatgtgccagagactcttttagggttttctgtaacttcacagcagggggtgaaacatgtctgtacccggacaagaagtttgaaattgtgaagctggcttcctggtccaaagagaaaccaggtggctggtatagcacttttaggcgaggcaagaaattcagctatgttgatgccgacggttctccagttaatgtcgtccagttgaactttttgaagctgctgagtgcaactgcacgccagaatttcacctacagctgccaaaatgcagcagcctggttagacgaagctacgggcgattacagtcattccgcccgtttcctcggaacaaatggagaagagctgtcttttaaccagaccacagctgccaccgtgagtgtcccccaggatgggtgtagattaagaaagggtcagacgaagactttgtttgagttttcatccagccgggctgggtttctgccactgtgggatgtggccgctaccgatttcgggcagaccaaccagaaattcgggttcgagctgggccctgtttgtttctcaagttag

SEQ ID NO: 187994 - protein, 1058 aa, Artificial Sequence
  derived and/or modified sequence
MDLGPLNICEEMTILHGGFLLAEQLFHPKALAELTKSDWERVGRPIVEALREISSAAAHSQPFAWKKKALIIIWAKVLQPHPVTPSDTETRWQEDLFFSVGNMIPTINHTILFELLKSLEASGLFIQLLMALPTTICHAELERFLEHVTVDTSAEDVAFFLDVWWEVMKHKGHPQDPLLSQFSAMAHKYLPALDEFPHPPKRLRSDPDACPTMPLLAMLLRGLTQIQSRILGPGRKCCALANLADMLTVFALTEDDPQEVSATVYLDKLATVISVWNSDTQNPYHQQALAEKVKEAERDVSLTSLAKLPSETIFVGCEFLHHLLREWGEELQAVLRSSQGTSYDSYRLCDSLTSFSQNATLYLNRTSLSKEDRQVVSELAECVRDFLRKTSTVLKNRALEDITASIAMAVIQQKMDRHMEVCYIFASEKKWAFSDEWVACLGSNRALFRQPDLVLRLLETVIDVSTADRAIPESQIRQVIHLILECYADLSLPGKNKVLAGILRSWGRKGLSEKLLAYVEGFQEDLNTTFNQLTQSASEQGLAKAVASVARLVIVHPEVTVKKMCSLAVVNLGTHKFLAQILTAFPALRFVEEQGPNSSATFMVSCLKETVWMKFSTPKEEKQFLELLNCLMSPVKPQGIPVAALLEPDEVLKEFVLPFLRLDVEEVDLSLRIFIQTLEANACREEYWLQTCSPFPLLFSLCQLLDRFSKYWQLPKEKRCLSLDRKDLAIHILELLCEIVSANAETFSPDVWIKSLSWLHRKLEQLDWTVGLRLKSFFEGHFKCEVPATLFEICKLSEDEWTSQAHPGYGAGTGLLAWMECCCVSSGISERMLSLLVVDVGNPEEVRLFSKGFLVALVQVMPWCSPQEWQRLHQLTRRLLEKQLLHVPYSLEYIQFVPLLNLKPFAQELQLSVLFLRTFQFLCSHSCRDWLPLEGWNHVVKLLCGSLTRLLDSVRAIQAAGPWVQGPEQDLTQEALFVYTQVFCHALHIMAMLHPEVCEPLYVLALETLTCYETLSKTNPSVSSLLQRAHEQRFLKSIAEGIGPEERRQTLLQKMSSF

SEQ ID NO: 187995 - protein, 184 aa, Artificial Sequence
  derived and/or modified sequence
MDLGPLNICEEMTILHGGFLLAEQLFHPKALAELTKSDWERVGRPIVEALREISSAAAHSQPFAWKKKALIIIWAKVLQPHPVTPSDTETRWQEDLFFSVGNMIPTINHTILFELLKSLEASGLFIQLLMALPTTICHAELERFLEHVTVDTSAEDVAFFLDVWWERTTPRRCLQPCIWTNWPR

SEQ ID NO: 187996 - DNA, 3177 bp, Artificial Sequence
  derived and/or modified sequence
atggacttgggaccattgaacatctgtgaggagatgacgatcctgcacggtgggtttttactggctgaacagctattccacccgaaggccctggccgaattaaccaagtcggattgggagagggtggggagaccaatcgtggaggccctccgagagatttcctcagccgctgcccatagccagccatttgcttggaagaagaaggctctgattattatatgggccaaggttctccagccacatcctgttacaccaagcgataccgagacacgctggcaggaggatctgtttttctcggtgggcaacatgattccaaccattaatcacaccatactctttgagttgctcaagagcctggaagccagcggcctgtttatacagctgcttatggccttgcctacaacaatctgccatgctgaacttgaacgatttctggagcacgtgactgttgatacttcagccgaggatgtggccttcttcctggatgtttggtgggaggtgatgaaacacaaaggtcacccgcaggatcctctgttgtcgcaattctctgcgatggcccacaagtatctgcctgctctcgacgagtttccacaccccccgaaaaggctccggtcggatcctgatgcctgtcccactatgccgcttctggcgatgctactgcggggtttaactcagatccaaagtagaattttgggacctggcaggaaatgctgcgccctagctaatttagctgatatgctgactgtctttgctctgaccgaggacgacccacaagaagttagtgcaacagtctaccttgataaactcgctaccgtaatctcagtttggaattcagacacccagaatccctatcaccagcaagcactggcagaaaaggtgaaggaagcagaacgggacgtgtccctgaccagcctggctaagctcccatctgagaccatctttgtgggctgcgagtttctgcaccacctcttgagggagtggggcgaggagctccaagctgtgcttagatcatcgcagggaacatcctatgactcttaccgactgtgtgactctttaacgtctttctctcagaacgcaacactctatctgaaccggacctccctgtccaaggaggacagacaggttgtttccgaactagccgagtgtgtacgcgactttctccgcaaaacctccaccgtccttaagaatcgtgccctggaggacattaccgcctccattgccatggccgtcattcaacagaagatggacaggcacatggaagtgtgttatatattcgccagcgagaaaaagtgggccttttctgacgagtgggttgcatgcttagggagcaaccgggccttattccgtcaacccgacctagtgcttcgattacttgaaactgtcatagatgtgtcaactgcagatagggctatcccggaatctcagattagacaggtaatccatcttatcctcgagtgctacgctgatctcagcttgcctggcaagaacaaggtgttggcgggcatcctcaggtcttgggggcggaagggcctgtccgaaaaacttttagcttatgttgagggttttcaggaggaccttaacacgacctttaatcaactgacgcagagtgccagtgagcaggggttggccaaagcagtcgcctccgtagccaggcttgttatcgttcaccccgaagtgaccgtgaagaaaatgtgttccctagcagtggtcaacttaggcacacataaatttcttgcccagatcctgaccgcttttcccgccctcaggtttgtcgaggaacagggaccgaacagctcggcaactttcatggtgtcatgtctcaaagaaacagtctggatgaagttttcgacccccaaggaggagaaacagttccttgagctgctgaactgtcttatgtcccctgtgaaaccacaggggattccagtcgccgccttgctggagccggatgaagtactgaaagagttcgttctacctttccttagattggacgtagaggaggtcgatttgagtctccggatattcatacagacactcgaggccaacgcttgtagggaggaatattggctgcagacttgctccccctttcctctgctctttagcctttgccagctcctcgatcgtttctccaaatattggcagctgccgaaagaaaaacggtgtctttccctcgatcgcaaggacctcgccatccatattttggaactgctatgcgaaatcgtttccgcaaatgccgaaaccttctccccagacgtgtggatcaaatcgttgtcatggctgcatcggaagctagagcagctggattggacggttggattacggctgaaatcattctttgagggtcacttcaagtgcgaagtgcccgccaccctattcgaaatctgcaaattatccgaagatgaatggacaagccaggcccatcctgggtatggggctggaactggcctcctggcatggatggagtgctgctgtgtttccagtgggatatctgaacggatgctttccctgcttgtggtcgacgtggggaaccccgaagaggtccgactgttttctaaaggtttcctcgtggcactggttcaggtcatgccgtggtgttctccccaggagtggcagcggctgcaccagctgactagacggctgctcgaaaagcaactgctacacgtgccctacagtcttgaatatatccagttcgtccccctgctgaacctgaagcctttcgcccaagaattacagctttcggtacttttcctgcgcacattccagttcctgtgctcacattcttgtcgcgactggctccctctggaggggtggaatcacgtcgtcaaactcctgtgcggcagcttgacccgtctgctggactccgtgcgggcaatacaagccgccggcccgtgggtgcaaggacctgagcaggatctgacccaagaagcactctttgtttatacacaggtattctgccacgcactacatatcatggccatgctgcaccctgaggtctgcgagcccttgtacgttctagccctggaaacattgacctgctatgagacactgtctaagacaaatccctccgtctcatcccttctccaaagggcccatgaacagaggtttctgaagtctatcgccgagggaattggtcctgaagaacggcggcagacgttgctgcaaaagatgagttccttctag

SEQ ID NO: 187997 - DNA, 3177 bp, Artificial Sequence
  derived and/or modified sequence
atggacctgggccccctgaacatctgtgaggagatgaccatcctgcacggcggcttcctgctggccgagcagctgttccaccccaaggccctggccgagctgaccaagagtgactgggagcgggtgggccggcccatcgtggaggccctgcgggagatcagcagcgctgctgcccacagccagccctttgcctggaagaagaaggccctgatcatcatctgggccaaggtgctgcagccccaccctgtgacccccagcgacacagagacccgctggcaggaggacctcttcttctctgtgggcaacatgatccccaccatcaaccacaccatcctgtttgagctgctgaagagcctggaggccagcggcctcttcatccagctgctgatggccctgcccaccaccatctgccacgccgagctggagcgcttcctggagcacgtgacagtggacaccagcgcagaagatgtggccttcttcctggatgtgtggtgggaggtgatgaagcacaagggccacccccaggaccccctgctgagccagttcagcgccatggcccacaagtacctgcctgccctggatgagttcccccacccccccaagaggctgcggagtgaccctgatgcctgccccaccatgcccctgctggccatgctgctgcggggcctgacccagatccagagccgcatcctgggccctggcaggaagtgctgtgccctggccaacctggccgacatgctgactgtgtttgccctgacagaagatgacccccaggaggtgtctgccaccgtgtacctggacaagctggccaccgtcatctctgtgtggaacagcgacacccagaacccctaccaccagcaggccctggccgagaaggtgaaggaggccgagagagatgtgtccctgaccagcctggccaagctgcccagcgagaccatctttgtgggctgtgagttcctgcaccacctgctgcgggagtggggcgaggagctgcaggccgtgctgcggagcagccagggcaccagctatgacagctaccgcctgtgtgacagcctgaccagcttcagccagaatgccaccctgtacctgaacagaaccagcctgagcaaagaagatcggcaggtggtgtctgagctggctgaatgtgtgcgggacttcctgaggaagaccagcacagtgctgaagaacagagccctggaggacatcacagccagcatcgccatggctgtgatccagcagaagatggacagacacatggaggtgtgctacatctttgccagcgagaagaagtgggccttcagtgatgagtgggtggcctgcctgggcagcaacagagccctcttccggcagcctgacctggtgctgcggctgctggagaccgtgattgatgtgtccacagctgaccgggccatccctgagagccagatccggcaggtgatccacctgatcctggagtgctacgccgacctgagcctgcccgggaagaacaaggtgctggccggcatcctgcgctcctggggcaggaagggcctgtctgagaagctgctggcctacgtggagggcttccaggaggacctgaacaccaccttcaaccagctgacccagagcgccagcgagcagggcctggccaaggctgtggcctctgtggcccggctggtgattgtgcaccctgaggtgacagtgaagaagatgtgcagcctggccgtggtgaacctgggcacccacaagttcctggcccagatcctgacagccttccctgccctgcgctttgtggaggagcagggccccaacagcagcgccaccttcatggtgtcctgcctgaaggagaccgtgtggatgaagttcagcacccccaaggaggagaagcagttcctggagctgctgaactgcctgatgagccctgtgaagccccagggcatccctgtggccgccctgctggagccagatgaggtgctgaaggagtttgtgctgcccttcctgcggctggatgtggaggaggtggacctgagcctgcgcatcttcatccagaccctggaggccaatgcctgccgggaggagtactggctgcagacctgcagccccttccccctgctcttcagcctgtgccagctgctggaccgcttcagcaagtactggcagctgcccaaggagaagcgctgcctgagcctggacaggaaggacctggccatccacatcctggagctgctgtgtgaaattgtgtctgccaatgctgagaccttctccccagatgtgtggatcaagagcctgtcctggctgcacaggaagctggagcagctggactggacagtgggcctgcggctgaagagcttctttgagggccacttcaagtgtgaggtgcctgccaccctgtttgagatctgcaagctgtctgaagatgagtggaccagccaggcccaccctggctatggagctggcaccggcctgctggcctggatggagtgctgctgcgtgagcagcggcatcagcgagaggatgctgagcctgctggtggtggatgtgggcaaccctgaggaggtgcggctcttcagcaagggcttcctggtggccctggtgcaggtgatgccctggtgcagcccccaggagtggcagaggctgcaccagctgacccggcggctgctggagaagcagctgctgcacgtgccctacagcctggagtacatccagtttgtgcccctgctgaacctgaagccctttgcccaggagctgcagctgtctgtgctcttcctgcggaccttccagttcctgtgcagccacagctgccgggactggctgcccctggagggctggaaccacgtggtgaagctgctgtgtggcagcctgacccggctgctggacagcgtgcgggccatccaggccgccggcccctgggtgcagggccctgagcaggacctgacccaggaggccctgtttgtgtacacccaggtgttctgccacgccctgcacatcatggccatgctgcaccctgaggtgtgtgagcccctgtatgtgctggccctggagaccctgacctgctatgagaccctgagcaagaccaaccccagcgtgagcagcctgctgcagagggcccacgagcagcgcttcctgaagagcattgctgagggcatcggccctgaggagcggcggcagaccctgctgcagaagatgagcagcttctag

SEQ ID NO: 187998 - DNA, 3177 bp, Artificial Sequence
  derived and/or modified sequence
atggacctgggccccctgaacatctgcgaggagatgaccatcctgcacgggggatttctcctggccgaacagctgtttcatcccaaggcactggccgagctgacaaagtccgactgggaacgggtcggccggccaattgtggaagctctccgtgaaattagttcagcagcagctcacagccagccattcgcctggaagaagaaagccctcatcattatttgggccaaggtactacagccccacccagtgacaccgtccgatacggagacgagatggcaagaggatctgtttttttcagtgggcaatatgatccccaccatcaaccacactattctgtttgagcttctgaaatccctggaggcgtcgggcctttttatccagcttctgatggccctgcctaccaccatttgtcacgcagagctggagcgatttttagaacacgttactgttgacactagcgccgaagatgttgcattcttcctggacgtgtggtgggaggtcatgaaacataagggccacccccaggatcccttgctgtctcagttctcagctatggctcacaagtatctcccagcactcgacgaatttccccacccccctaagagactccgtagtgatcctgacgcttgtcctaccatgcccctactcgccatgctcctgcgaggcctgacccagattcagagccggatactcggacctggtagaaaatgttgtgctctagcgaatttggccgacatgttgacagtcttcgcactgaccgaagacgatccccaagaagtttctgctaccgtctacctggacaaacttgcgaccgtgatctccgtctggaattctgatacgcagaacccttatcatcagcaggcactcgccgaaaaggttaaagaagcagagagggatgtcagcttgacttcactggccaaactcccctcggagaccatctttgttggatgtgaatttctgcaccacttgctccgggaatggggagaagaactgcaagccgtgttgcgttcatctcagggtacttcttacgactcttaccggctttgcgactccctgacctccttttcacagaatgctactttgtacctgaacaggacgtctttgtccaaggaggatagacaggttgtgtctgagctggctgagtgcgttagggactttctaaggaaaacctccactgttcttaaaaaccgtgccttagaggacattacagcctccatcgcaatggcagttatccagcagaaaatggatcgtcacatggaagtgtgttacatcttcgccagtgagaagaaatgggccttctcggacgagtgggtggcatgcctcggaagtaatcgagcactctttagacagcctgacctcgtcctgcggcttctggagaccgttattgatgtgagcaccgctgacagagcaatccctgaatcccagatcaggcaagtcatacatctcatcctcgagtgctatgcggatctgtctctgccaggaaagaacaaagtccttgcagggatcttgcggtcttggggcaggaaggggctcagtgaaaaactgctggcatatgtggaaggctttcaggaagacctgaatacgacgtttaatcagttgacacaatctgcttccgagcaggggcttgctaaggccgttgcatctgtggcccgccttgttattgtccaccctgaggtcacagtcaagaagatgtgctcacttgccgttgtcaatctgggcactcataagtttctcgctcagatcctaactgcgttccctgccctgcgattcgtggaggaacagggaccgaacagtagcgctacttttatggtaagctgtctgaaagaaacagtatggatgaaattttcaacacccaaagaagagaaacagttcctggaattgctgaactgtttgatgagcccagtcaagccacaggggataccggtggcagccctcctggagccggacgaggtcttgaaagaatttgttttgccgttcctcaggctcgatgtggaggaagtagatctaagcctgaggatcttcatccagacactagaggctaatgcctgtcgggaggagtattggcttcagacttgctctcccttccctctactgttctcactatgccagcttttggaccgctttagtaagtactggcaactccccaaggagaagagatgtttgtctctggacaggaaggatttggccattcacatcctcgaactgctatgtgagattgttagtgcgaacgctgagacttttagccctgatgtgtggataaaatctctgagctggctacacaggaagctcgagcagctggattggaccgtgggattacggctcaagtccttttttgaggggcattttaaatgtgaggtgcctgccactctatttgagatctgtaaactgagtgaagacgaatggacatcacaggcccaccctgggtatggagctgggaccgggcttctcgcatggatggagtgttgctgtgtgagcagtggcatctccgaacggatgctttcccttctggtcgtggacgtcggaaaccctgaggaagtccgtctgttctctaaagggtttctcgtggcattggttcaagttatgccttggtgcagtccccaggaatggcaaagactgcatcagctgacccggagactgctggagaagcagctgctgcacgtaccttactccctggaatatatccagtttgttcctctgttaaatctgaaaccctttgcccaggagttgcagctctcagtgctgttcctcagaacatttcagttcctctgtagccatagctgccgtgattggctcccactggaggggtggaaccatgtggtcaagttgctctgcggcagcctgacacgcctccttgacagtgtcagagccattcaggccgccggcccttgggttcaaggacccgagcaggatctgacccaggaagctctattcgtttacacccaagtcttctgccatgccctgcacataatggccatgctccacccagaggtgtgtgagccactgtacgtcttggcactggaaaccctaacatgttacgagacgctgtcaaagaccaatccttctgtatccagcctcctccaacgtgcccatgaacagaggtttctgaagtcaatcgcggagggtatcggccctgaggagcgtcgccaaacccttctacagaagatgagcagtttctag

SEQ ID NO: 187999 - DNA, 3177 bp, Artificial Sequence
  derived and/or modified sequence
atggacctgggaccactgaatatctgcgaggagatgaccatccttcacggagggtttctgctggccgagcagctgttccatcccaaggccctagccgaattgaccaagtcggattgggaacgggtgggacgacctatcgtggaagccctccgcgagatatctagtgctgccgctcactctcaaccatttgcctggaagaagaaggctctcatcatcatttgggccaaagtactccagccacacccagtcacccctagcgatacggaaacccgatggcaggaagatctgtttttttcagtgggcaacatgatccctaccatcaaccataccattctcttcgaactcctgaaatctcttgaggctagcgggctgtttattcagctgctgatggcgttaccgacaaccatctgtcacgccgaactggagcgcttcctcgaacacgtgacggtcgacaccagcgctgaggacgtggccttcttcttagacgtatggtgggaagtcatgaaacacaaaggtcatccacaggaccccctgctgtcccaattctctgcaatggctcataagtacctaccagcactcgacgaattccctcatcctcccaaaagattgcgatcagacccagacgcctgcccgactatgccactgctcgcaatgttgctgaggggactgacacaaatccaatcgagaatcttgggccctggcaggaaatgttgcgccctggctaatctcgccgacatgctgaccgtttttgctcttaccgaagacgaccctcaggaggttagcgctaccgtgtacctggataaactagctacagtgatcagcgtttggaactcagacacccagaatccgtaccaccaacaagctctggctgaaaaagtgaaagaggctgagcgcgacgtgtccctgactagtctagctaaactgcctagcgagacgattttcgttggctgcgaatttcttcaccacctcctccgcgagtggggggaggaacttcaggccgtgctgagatcatctcaagggaccagttacgattcttatcgactctgtgacagtctcacctctttctcccagaacgcaacactttacctaaatcgaacaagtcttagcaaggaggaccggcaagtcgtaagtgagcttgccgagtgcgttagagattttctccggaagacatcaaccgtgctgaaaaacagagcactcgaggacataactgcctcaatcgccatggcagtaattcagcagaaaatggatcgtcatatggaggtctgctacatattcgcaagcgaaaagaaatgggctttttctgacgagtgggtggcgtgtttgggttctaatcgtgcattatttcgtcagccagatctcgttcttagacttttggaaacagtgatcgatgttagcactgcagatcgcgcaattcccgagagtcagattcggcaagtcattcatctgatactggagtgctacgccgatctctcactcccagggaagaataaggtccttgcagggattctacggtcctgggggagaaaaggactttctgaaaaactgttggcctatgtggaaggattccaagaagatctgaatactaccttcaaccagctgactcagagcgcctcagaacagggacttgccaaggccgtggcttctgtcgctaggctggtgattgtacaccctgaagtgacggttaagaagatgtgttctcttgcagtagtcaaccttggaactcataaatttctcgcccagattctgacggcttttcccgctcttcggtttgtcgaagagcagggccctaatagcagcgccacattcatggtcagttgtcttaaagaaaccgtgtggatgaagtttagcacacccaaggaggagaaacagtttctcgaattgctgaactgcctgatgagtcctgttaagccgcaaggcatccctgtggcagccctactggaacccgatgaagtcctcaaggagttcgtcttgccatttctgcggctggatgtagaggaagttgatctgtcgcttaggattttcattcagaccctagaggccaacgcctgcagagaggagtattggctgcagacctgctcccccttccccctcctgtttagtttgtgtcagctgttagataggttctctaaatattggcaattaccaaaggagaagaggtgcctgagcctggaccgtaaggatctggcaatccatatccttgaactcctgtgcgagattgttagcgctaatgcagagacctttagccccgacgtatggataaagtcgctttcttggttacaccgtaagcttgagcagttggactggaccgtgggactaaggttgaaatccttcttcgagggccattttaagtgcgaggtgccagccaccctatttgagatatgtaaattaagtgaggacgaatggacctcacaagctcatcccggatacggtgcagggactggactcctcgcttggatggaatgttgctgcgtgagtagtggcattagtgaacggatgctgagtttacttgtggtggacgtgggaaatcccgaagaagtgcggctgttcagtaagggcttcctcgtggctctggtccaggtgatgccttggtgcagcccacaggagtggcaacgcctgcaccaactgacccgaaggctgttagagaagcagctgttgcacgtcccctacagcctggaatacatacagttcgtcccccttctaaatctcaagccatttgctcaggaattacagctgagtgttttattcctgcgtacattccagtttctatgctctcacagctgtagagactggctccccttggagggctggaatcatgtcgttaaactgctatgcggttctttaactcgactcctagattccgtgcgggcaatccaggcggctggtccatgggtgcagggacctgaacaggacttgacacaagaggccctgtttgtctacactcaggtgttctgtcacgctcttcacatcatggccatgctgcaccccgaggtgtgcgaacctctgtatgttttagctctggagacattgacttgttacgaaacactttctaaaaccaacccgtccgtgagctccctgctgcaacgtgcccatgaacagcgttttctgaaatccatagccgaaggtataggcccagaggaacgccgacagactctcctgcagaaaatgtcttccttctag

SEQ ID NO: 188000 - DNA, 3741 bp, Artificial Sequence
  derived and/or modified sequence
aggcctaagcgcggccgccgtggctcctgcgtctcccatcgtgccgtgcgtcccgcgccgcgttcgagttctcggaggggagggggcgttagccccgcgcagccgccggcgtcgccgccatggacctaggacccttgaacatctgtgaagaaatgactattctgcatggaggcttcttgctggccgagcagctgttccaccctaaggcactggcagaattaacaaagtctgactgggaacgtgttggacggcccatcgtggaggccttaagggagatctcctcggctgcagcacactcccagccctttgcctggaagaagaaagccctgatcatcatctgggccaaggttctgcagccgcaccccgtgaccccgtccgacacagagacacggtggcaggaagacctgttcttctcggtgggcaacatgatccccaccatcaaccacaccatcctcttcgagctgctcaaatccctggaagcttctggactctttatccagctcctgatggccctgcccaccaccatctgccatgcagaactagagcgctttctggaacatgtgaccgttgacacttctgccgaagacgtggccttcttcctggacgtctggtgggaggtgatgaagcacaagggtcacccgcaggaccccctgctctcccagtttagtgcaatggcccataagtacctgcctgccttagatgagttcccccatcctccaaagaggcttaggtcagacccagacgcgtgccccaccatgcccctgttggccatgctgctccgcgggctgacacagatccagagtcggatcctgggcccggggaggaagtgctgtgcgctggccaacctggctgacatgctgactgtgtttgcgctgacagaggacgacccccaggaggtgtctgcaaccgtgtatctggacaaactggccacggtgatctctgtgtggaactcggacacccagaatccctaccaccagcaggcgctggcagagaaggtgaaggaggcagaacgggatgtcagcctgacctcgctggccaaactccccagtgagaccattttcgtgggctgcgagttcctgcaccacctgctgcgggagtggggggaggagttgcaggccgtgctccgcagcagccaggggacaagttacgacagctaccggctgtgcgacagtctgacttccttcagccagaacgcgacgctctacctgaaccgcaccagcctgtccaaggaggacaggcaggtggtctctgagctggcggagtgtgtcagggacttcctgaggaaaacgagcacggtgctgaagaacagggccttggaggatatcacagcttccattgccatggccgtcatccagcagaagatggaccgccatatggaagtgtgctacatttttgcctctgagaagaagtgggccttctcggacgagtgggtagcctgcctggggagtaacagggccctcttccgacagccagacttggtgttgaggctgctggaaacagtgatagacgtcagcacagctgacagagccatccctgagtctcagatccggcaggtgatccacctgatcctggaatgttacgcagacctctccctgccaggtaaaaataaagtccttgcaggtatcctgcgttcctgggggcgaaagggcctctctgaaaagttgctggcttatgtggagggttttcaggaagacctcaatacaacttttaaccagctcactcagagtgcctccgaacagggcttggcaaaagctgtggcctccgtggcccgcctggtcatagtgcacccggaagtcacggtgaagaaaatgtgcagcctggctgtggtcaatctcggcacccacaagttcctggcccagattctcactgccttccctgcccttaggtttgtggaagagcagggtcccaattcatctgccactttcatggtgtcatgcctcaaagaaaccgtctggatgaagttctctacacccaaggaagaaaagcaatttttagagctcctgaactgcctgatgagtcccgtgaaaccccaagggattccagtggctgctcttcttgagccagacgaggtgctgaaggaatttgtcctgcctttcttgaggttagatgttgaagaggtagacctcagtctgaggatcttcatccagactctagaggcaaacgcgtgccgagaggaatactggctccagacctgctccccgtttccactcctcttcagcttgtgccagctcttggaccgcttcagcaaatactggcagcttcccaaggagaagcggtgcctctctttggataggaaggatctagcgatccatatcctggagctcctgtgtgagattgtatcagccaatgctgagaccttctccccggatgtctggatcaagtccctgtcctggctccaccgcaagttagaacagctagactggactgtgggcctgaggctgaagagcttcttcgaggggcacttcaagtgtgaagtgccagccacactttttgagatctgtaagctttcagaagacgagtggacctcccaggcccacccagggtacggggctggcacggggctcctggcctggatggagtgctgctgcgtctccagcggcatctcggagaggatgctgtctctcttggtggtggacgtgggcaatcctgaggaggtcagactgttcagcaaaggctttctggtggccctggtgcaagtcatgccttggtgcagccctcaggagtggcagcgccttcaccagctgaccaggagactgctggagaagcagctcctccatgtcccttatagcctggaatatattcagtttgttcccctgctcaacctgaagccctttgcccaggagttgcaactctccgtcctcttcctgaggactttccagtttctctgcagccatagctgtcgtgattggcttcctctggaaggctggaaccacgtggtcaaactcctctgtggcagtctgacccgcctcctggactcagtcagggcgatacaggcagctggcccttgggttcaaggaccagagcaggacctgacccaggaagccctgtttgtttacacccaggtgttctgccatgctctgcacatcatggccatgctccacccggaggtctgtgagccactctacgttttagccttggaaaccctcacctgctatgagactttgagcaagaccaacccttctgtcagctccttgctccagagggcacacgagcagcgcttcttaaagtccattgctgagggcatcggccctgaagaacggcgccaaaccctgttgcagaagatgagcagcttctgacttggcgtggggagctgggccccaacatggcgggtctgcagaagatcagcagcttcttacctgtgcgggagcgaaaaagctgggcttcaacatggcaggtctgtaggggtcagacccgagcagcctggactttacagttatgtgaaactgtccacaaaaagtcatggcaataatggtgtaaagaaaatagtttcttgggtatttgtaacgtacaaactatcataaaaattctcctctttcgcatctcactttgtctcttctaagtcggcctcagcaatagcccaggattaaatatgctctgaaattgggtttagtgtcttcaagatcaaatccagccaggaggaacatgttcataactggacttttccatcctagattttggcaaataagcccaaagttgaaaccatgtgagtggaaaaagcattacatggtacgtataaccccc

SEQ ID NO: 188001 - DNA, 3177 bp, Artificial Sequence
  derived and/or modified sequence
atggacctgggccccctgaacatctgcgaggagatgaccatcctgcacggcggcttcctgctggccgagcagctgttccaccccaaggccctggccgagctgaccaagagcgactgggagagagtgggcagacccatcgtggaggccctgagagagatcagcagcgccgccgcccacagccagcccttcgcctggaagaagaaggccctgatcatcatctgggccaaggtgctgcagccccaccccgtgacccccagcgacaccgagaccagatggcaggaggacctgttcttcagcgtgggcaacatgatccccaccatcaaccacaccatcctgttcgagctgctgaagagcctggaggccagcggcctgttcatccagctgctgatggccctgcccaccaccatctgccacgccgagctggagagattcctggagcacgtgaccgtggacaccagcgccgaggacgtggccttcttcctggacgtgtggtgggaggtgatgaagcacaagggccacccccaggaccccctgctgagccagttcagcgccatggcccacaagtacctgcccgccctggacgagttcccccacccccccaagagactgagaagcgaccccgacgcctgccccaccatgcccctgctggccatgctgctgagaggcctgacccagatccagagcagaatcctgggccccggcagaaagtgctgcgccctggccaacctggccgacatgctgaccgtgttcgccctgaccgaggacgacccccaggaggtgagcgccaccgtgtacctggacaagctggccaccgtgatcagcgtgtggaacagcgacacccagaacccctaccaccagcaggccctggccgagaaggtgaaggaggccgagagagacgtgagcctgaccagcctggccaagctgcccagcgagaccatcttcgtgggctgcgagttcctgcaccacctgctgagagagtggggcgaggagctgcaggccgtgctgagaagcagccagggcaccagctacgacagctacagactgtgcgacagcctgaccagcttcagccagaacgccaccctgtacctgaacagaaccagcctgagcaaggaggacagacaggtggtgagcgagctggccgagtgcgtgagagacttcctgagaaagaccagcaccgtgctgaagaacagagccctggaggacatcaccgccagcatcgccatggccgtgatccagcagaagatggacagacacatggaggtgtgctacatcttcgccagcgagaagaagtgggccttcagcgacgagtgggtggcctgcctgggcagcaacagagccctgttcagacagcccgacctggtgctgagactgctggagaccgtgatcgacgtgagcaccgccgacagagccatccccgagagccagatcagacaggtgatccacctgatcctggagtgctacgccgacctgagcctgcccggcaagaacaaggtgctggccggcatcctgagaagctggggcagaaagggcctgagcgagaagctgctggcctacgtggagggcttccaggaggacctgaacaccaccttcaaccagctgacccagagcgccagcgagcagggcctggccaaggccgtggccagcgtggccagactggtgatcgtgcaccccgaggtgaccgtgaagaagatgtgcagcctggccgtggtgaacctgggcacccacaagttcctggcccagatcctgaccgccttccccgccctgagattcgtggaggagcagggccccaacagcagcgccaccttcatggtgagctgcctgaaggagaccgtgtggatgaagttcagcacccccaaggaggagaagcagttcctggagctgctgaactgcctgatgagccccgtgaagccccagggcatccccgtggccgccctgctggagcccgacgaggtgctgaaggagttcgtgctgcccttcctgagactggacgtggaggaggtggacctgagcctgagaatcttcatccagaccctggaggccaacgcctgcagagaggagtactggctgcagacctgcagccccttccccctgctgttcagcctgtgccagctgctggacagattcagcaagtactggcagctgcccaaggagaagagatgcctgagcctggacagaaaggacctggccatccacatcctggagctgctgtgcgagatcgtgagcgccaacgccgagaccttcagccccgacgtgtggatcaagagcctgagctggctgcacagaaagctggagcagctggactggaccgtgggcctgagactgaagagcttcttcgagggccacttcaagtgcgaggtgcccgccaccctgttcgagatctgcaagctgagcgaggacgagtggaccagccaggcccaccccggctacggcgccggcaccggcctgctggcctggatggagtgctgctgcgtgagcagcggcatcagcgagagaatgctgagcctgctggtggtggacgtgggcaaccccgaggaggtgagactgttcagcaagggcttcctggtggccctggtgcaggtgatgccctggtgcagcccccaggagtggcagagactgcaccagctgaccagaagactgctggagaagcagctgctgcacgtgccctacagcctggagtacatccagttcgtgcccctgctgaacctgaagcccttcgcccaggagctgcagctgagcgtgctgttcctgagaaccttccagttcctgtgcagccacagctgcagagactggctgcccctggagggctggaaccacgtggtgaagctgctgtgcggcagcctgaccagactgctggacagcgtgagagccatccaggccgccggcccctgggtgcagggccccgagcaggacctgacccaggaggccctgttcgtgtacacccaggtgttctgccacgccctgcacatcatggccatgctgcaccccgaggtgtgcgagcccctgtacgtgctggccctggagaccctgacctgctacgagaccctgagcaagaccaaccccagcgtgagcagcctgctgcagagagcccacgagcagagattcctgaagagcatcgccgagggcatcggccccgaggagagaagacagaccctgctgcagaagatgagcagcttctag

SEQ ID NO: 188002 - DNA, 555 bp, Artificial Sequence
  derived and/or modified sequence
atggacctgggccccctgaacatctgcgaggagatgaccatcctgcacggcggcttcctgctggccgagcagctgttccaccccaaggccctggccgagctgaccaagagcgactgggagagagtgggcagacccatcgtggaggccctgagagagatcagcagcgccgccgcccacagccagcccttcgcctggaagaagaaggccctgatcatcatctgggccaaggtgctgcagccccaccccgtgacccccagcgacaccgagaccagatggcaggaggacctgttcttcagcgtgggcaacatgatccccaccatcaaccacaccatcctgttcgagctgctgaagagcctggaggccagcggcctgttcatccagctgctgatggccctgcccaccaccatctgccacgccgagctggagagattcctggagcacgtgaccgtggacaccagcgccgaggacgtggccttcttcctggacgtgtggtgggagagaaccacccccagaagatgcctgcagccctgcatctggaccaactggcccagatag

SEQ ID NO: 188003 - DNA, 555 bp, Artificial Sequence
  derived and/or modified sequence
atggacttggggccactgaatatctgcgaggaaatgaccattctgcacggcgggttcttgctggccgagcaattgtttcaccccaaggctcttgccgaactaacaaagagcgactgggagagagtaggcaggcctatcgtggaggctcttagggagattagctcagcggcggcccatagtcaaccattcgcttggaagaaaaaggctcttatcatcatttgggccaaagtgctccagcctcacccagtcactcccagcgacacagagactcgctggcaggaggatttgttctttagcgtgggtaacatgattccaactatcaatcacacaattctattcgagctgctgaagagcctggaggcttccgggctcttcattcagctgctaatggcattgcccacaaccatctgtcacgcagagttagagcgatttctggagcacgtgacagttgatacatcagcagaagatgttgctttcttcctcgatgtgtggtgggagcgcactactccccgtaggtgtctgcaaccctgtatatggacaaattggcctcgttag

SEQ ID NO: 188004 - DNA, 555 bp, Artificial Sequence
  derived and/or modified sequence
atggacctgggccccctgaacatctgtgaggagatgaccatcctgcacggcggcttcctgctggccgagcagctgttccaccccaaggccctggccgagctgaccaagagtgactgggagcgggtgggccggcccatcgtggaggccctgcgggagatcagcagcgctgctgcccacagccagccctttgcctggaagaagaaggccctgatcatcatctgggccaaggtgctgcagccccaccctgtgacccccagcgacacagagacccgctggcaggaggacctcttcttctctgtgggcaacatgatccccaccatcaaccacaccatcctgtttgagctgctgaagagcctggaggccagcggcctcttcatccagctgctgatggccctgcccaccaccatctgccacgccgagctggagcgcttcctggagcacgtgacagtggacaccagcgcagaagatgtggccttcttcctggatgtgtggtgggagaggaccaccccccggcgctgcctgcagccctgcatctggaccaactggcccaggtag

SEQ ID NO: 188005 - DNA, 555 bp, Artificial Sequence
  derived and/or modified sequence
atggacctgggccccctgaacatctgcgaggagatgaccatcctgcatggcggctttttacttgcagaacagctgtttcacccaaaagccctcgccgagctgacaaaaagtgactgggaaagggttggtagacctatcgtcgaggccttacgggagatctcgtctgccgctgctcatagccagcccttcgcatggaaaaagaaagccctgatcatcatttgggctaaggttctgcaaccccaccctgttacccccagcgacacggagaccaggtggcaggaagatctgtttttcagtgtggggaatatgatccccactataaatcacacaattctgttcgagctcttgaaatctctggaggccagtggattattcattcagctgctgatggccctgcccactactatctgtcatgctgaactggaaaggttcttggagcatgtcaccgttgacacatccgccgaggacgtagcattctttcttgacgtgtggtgggagagaactaccccccgccgctgcctccagccttgcatctggaccaactggcctcggtag

SEQ ID NO: 188006 - DNA, 555 bp, Artificial Sequence
  derived and/or modified sequence
atggatctgggtccactgaatatttgcgaggagatgacgattctccacggcggttttttattagcagagcagctgttccaccctaaagcccttgcggaactcacaaagagtgattgggaacgggtgggcaggcccattgtggaagctctccgggagatcagtagcgccgcagcccacagccagccttttgcgtggaagaagaaagcgcttatcataatttgggctaaggtgctacaaccccaccccgtgacaccaagcgatacagaaaccaggtggcaagaagatctgttctttagtgtggggaacatgatccctacaatcaaccacaccatcctgttcgagctcctcaagagcctggaggcttctgggctgttcatccagttgctgatggccctgcctactaccatttgccatgccgagctggagcgttttcttgagcatgtcacagtagatacttctgccgaagatgttgcattcttcttggacgtatggtgggagcgtacgacacctcgcaggtgtttgcagccatgtatatggacaaattggccacgttag

SEQ ID NO: 188007 - protein, 217 aa, Artificial Sequence
  derived and/or modified sequence
MVKLGCSFSGKPGKDPGDQDGAAMDSVPLISPLDISQLQPPLPDQVVIKTQTEYQLSSPDQQNFPDLEGQRLNCSHPEEGRRLPTARMIAFAMALLGCVLIMYKAIWYDQFTCPDGFLLRHKICTPLTLEMYYTEMDPERHRSILAAIGAYPLSRKHGTETPAAWGDGYRAAKEERKGPTQAGAAAAATEPPGKPSAKAEKEAARKAAGSAAPPPAQ

SEQ ID NO: 188008 - protein, 158 aa, Artificial Sequence
  derived and/or modified sequence
MVKLGCSFSGKPGKDPGDQDGAAMDSVPLISPLDISQLQPPLPDQVVIKTQTEYQLSSPDQQNFPDLEGQRLNCSHPEEGRRVTTPTPPTVGTQDRRRRWKAAGGAWVPSRPVWGPLALREERVAVSHPAQSWPHRLPCTHQAPSRGCRCRLTKQWRS

SEQ ID NO: 188009 - DNA, 654 bp, Artificial Sequence
  derived and/or modified sequence
atggtgaagctgggctgcagcttcagcggcaagcccggcaaggaccccggcgaccaggacggcgccgccatggacagcgtgcccctgatcagccccctggacatcagccagctgcagccccccctgcccgaccaggtggtgatcaagacccagaccgagtaccagctgagcagccccgaccagcagaacttccccgacctggagggccagagactgaactgcagccaccccgaggagggcagaagactgcccaccgccagaatgatcgccttcgccatggccctgctgggctgcgtgctgatcatgtacaaggccatctggtacgaccagttcacctgccccgacggcttcctgctgagacacaagatctgcacccccctgaccctggagatgtactacaccgagatggaccccgagagacacagaagcatcctggccgccatcggcgcctaccccctgagcagaaagcacggcaccgagacccccgccgcctggggcgacggctacagagccgccaaggaggagagaaagggccccacccaggccggcgccgccgccgccgccaccgagccccccggcaagcccagcgccaaggccgagaaggaggccgccagaaaggccgccggcagcgccgcccccccccccgcccagtag

SEQ ID NO: 188010 - DNA, 654 bp, Artificial Sequence
  derived and/or modified sequence
atggtgaagctcggatgttccttcagcggtaaaccaggaaaggacccaggagaccaggacggcgccgccatggactctgttcctctaattagtccacttgacatctctcagctgcagccccctctccctgatcaggtggtgattaagacacagaccgaataccaactgtcatcccctgatcaacagaattttccagatctcgagggacaacgtcttaattgttcgcatcctgaagaaggcaggcggttgccgactgcccgcatgatcgcgtttgcaatggcactcttaggctgtgtgttgattatgtataaagccatttggtatgaccaattcacatgccccgacgggttccttctgcgccacaagatctgtaccccgttaaccctggaaatgtattacacggagatggatcctgagcgccatcgtagcatcctcgccgctatcggggcatatccactgtcacggaagcacggcactgagactcctgccgcctggggggacggttacagagccgccaaggaagagagaaagggccctacacaagccggcgctgcagctgcagcaaccgaaccacccggcaaaccgtcagccaaggccgagaaggaagctgcaaggaaggcagcaggcagcgcagcacctccccccgcccagtag

SEQ ID NO: 188011 - DNA, 654 bp, Artificial Sequence
  derived and/or modified sequence
atggtgaagctgggctgcagcttcagcggcaagccaggcaaggaccccggggaccaggatggagctgccatggacagcgtgcccctcatcagccccctggacatcagccagctgcagccccccctgcctgaccaggtggtgatcaagacccagacagagtaccagctgagcagcccagaccagcagaacttcccagacctggagggccagaggctgaactgcagccaccctgaggagggccgccgcctgcccacagccaggatgattgcctttgccatggccctgctgggctgtgtgctgatcatgtacaaggccatctggtatgaccagttcacctgcccagatggcttcctgctgcggcacaagatctgcacccccctgaccctggagatgtactacacagagatggaccctgagcggcacaggagcatcctggccgccatcggggcctaccccctgagcaggaagcatggaacagagaccccagctgcctggggagatggctacagagctgccaaggaggagaggaagggccccacccaggccggggctgctgctgctgccacagagcccccaggcaagcccagcgccaaggccgagaaggaggccgccaggaaggccgccggcagcgctgcccctcctccagcccagtag

SEQ ID NO: 188012 - DNA, 654 bp, Artificial Sequence
  derived and/or modified sequence
atggtgaagctgggctgcagcttcagcggcaagcccggcaaggacccaggggatcaagatggggccgctatggattcagttccactgatttctccattagatatctctcagctgcagcccccgctgcccgaccaagttgtaatcaaaactcagaccgaataccagctgagctcacccgaccagcagaactttcctgatctggaaggccaacgtctaaactgcagtcatcccgaagagggcaggagattgccaacagcccgaatgattgcctttgcaatggccctgctgggatgtgttctcatcatgtacaaggcaatatggtacgaccaatttacctgccctgatggtttcctgttacgtcataagatctgcactcctctgaccttggagatgtattacaccgagatggaccccgagcgccatagatctatcctggccgccattggagcctacccactcagtaggaaacatggtaccgagacccctgccgcttggggggacggctatcgcgcagctaaagaagagcggaaaggccccacccaagccggcgcggcagcagctgccacagaaccccctggaaagccaagcgctaaggcggagaaggaagcagcacgcaaagcagctggaagcgctgctccaccccccgctcagtag

SEQ ID NO: 188013 - DNA, 654 bp, Artificial Sequence
  derived and/or modified sequence
atggttaagcttggttgctcattctcagggaaaccaggtaaggatccaggtgaccaggacggggctgccatggactccgttcctttaatatcccccttggacatttcgcaacttcagcctccattgcccgaccaggtagtgataaagactcagactgagtaccagctgtcttccccggatcagcagaactttccagacctcgagggccagaggcttaattgtagccatccagaggagggaagacggttacccactgccaggatgatcgccttcgctatggctctgctggggtgcgtgctcattatgtacaaggcgatttggtatgatcagtttacctgtcccgacggcttcctgctccgccataagatctgcacgcctttgacccttgagatgtactacacagaaatggacccggagaggcaccgctcgattttagctgccattggcgcataccccctgagcaggaagcacgggacggaaaccccagcagcatggggcgacgggtacagagctgccaaagaggagagaaagggccctacacaagccggagcagcggctgcggcaaccgagcccccaggcaagccgagcgcaaaggctgagaaagaagccgcaaggaaggccgcaggctccgccgcaccaccaccagcacagtag

SEQ ID NO: 188014 - DNA, 920 bp, Artificial Sequence
  derived and/or modified sequence
gcatcctccgcatccacatccgcatcgtcgtcctccccgaccgcgtcctgcagcagctgccagtggagccgcctgacaaggactgccatccaccatggtgaagctgggctgcagcttctctgggaagccaggtaaagaccctggggaccaggatggggctgccatggacagtgtgcctctgatcagccccttggacatcagccagctccagccgccactccctgaccaggtggtcatcaagacacagacagaataccagctgtcctccccagaccagcagaatttccctgacctggagggccagaggctgaactgcagccacccagaggaagggcgcaggctgcccaccgcacggatgatcgccttcgccatggcgctactgggctgcgtgctgatcatgtacaaggccatctggtacgaccagttcacctgccccgacggcttcctgctgcggcacaagatctgcacgccgctgaccctggagatgtactacacggagatggaccccgagcgccaccgcagcatcctggcggccatcggggcctacccgctgagccgcaagcacggcacggagacgccggcggcctggggggacggctaccgcgcagccaaggaggagcgcaaggggcccacccaggctggggcggcggcggcggccaccgaaccccccgggaagccgtcggccaaggcggagaaggaggcggcgcggaaggcggccgggagcgcggcgcccccgcccgcgcagtgacgtctccagccccgcagcccggcccgggcgtcctccgccagctcctgtgaccagcgcgtctcccgatgctctccgccgtgttcgtgtccccaggcgccctcgctgcagccccgcccccgtgggtctctgactctgtcgcttttctctaagtaaagatttcacgtccaccgga

SEQ ID NO: 188015 - protein, 311 aa, Artificial Sequence
  derived and/or modified sequence
MAAAPRTVLISGCSSGIGLELAVQLAHDPKKRYQVVATMRDLGKKETLEAAAGEALGQTLTVAQLDVCSDESVAQCLSCIQGEVDVLVNNAGMGLVGPLEGLSLAAMQNVFDTNFFGAVRLVKAVLPGMKRRRQGHIVVISSVMGLQGVIFNDVYAASKFALEGFFESLAIQLLQFNIFISLVEPGPVVTEFEGKLLAQVSMAEFPGTDPETLHYFRDLYLPASRKLFCSVGQNPQDVVQAIVNVISSTRPPLRRQTNIRYSPLTTLKTVDSSGSLYVRTTHRLLFRCPRLLNLGLQCLSCGCLPTRVRPR

SEQ ID NO: 188016 - DNA, 936 bp, Artificial Sequence
  derived and/or modified sequence
atggccgctgccccccgcaccgtgctaatttccggatgcagctccgggattggtctggagcttgcagtccagttggcacacgacccaaagaagaggtatcaggttgttgccactatgcgggatctgggaaagaaagagaccctggaggccgccgccggcgaagcacttggtcagacactgacagtggcccagctggacgtgtgctcagatgaatcagtggcccagtgtttgtcatgcattcagggcgaggttgacgtgctcgttaacaacgcagggatgggcctggtcgggcctctcgagggtttgtctttagccgccatgcagaacgttttcgatacgaattttttcggcgccgtccgcctggtgaaggccgtgctccctggaatgaagagacgcaggcagggtcacattgtggtaatctcaagcgttatgggattacagggcgttattttcaatgatgtctacgcggccagtaaatttgcacttgaggggttctttgagtcactggccattcagctgttacagtttaatatatttatcagcttggttgagcctggtcctgtggtaacagaattcgaggggaagcttctcgcccaggtgtccatggctgagtttcccggcactgatcccgagaccttgcattacttccgcgatctgtatctgccggcatccagaaagctgttttgctccgtggggcagaatccacaggatgttgtacaggccatagttaacgtgataagctccacgcgacccccactgaggagacagaccaacatcaggtattcccccctgacaaccctcaaaactgtggactcgtccggatctctgtacgttcgaactacacatcgactgctcttcaggtgtccccgacttttaaatctcggacttcagtgccttagctgcggatgtctgcctacccgggtccgacccaggtag

SEQ ID NO: 188017 - DNA, 936 bp, Artificial Sequence
  derived and/or modified sequence
atggctgctgcccccaggacagtgctgatcagcggctgcagcagcggcatcggcctggagctggccgtgcagctggcccatgaccccaagaagcgctaccaggtggtggccaccatgagggacctgggcaagaaggagaccctggaggccgccgccggggaggccctgggccagaccctgactgtggcccagctggatgtgtgcagtgatgagagcgtggcccagtgcctgagctgcatccagggcgaggtggatgtgctggtgaacaatgccggcatgggcctggtgggccccctggagggcctgagcctggccgccatgcagaatgtgtttgacaccaacttcttcggggctgtgcggctggtgaaggctgtgctgcccggcatgaagagaagacggcagggccacatcgtggtgatcagctctgtgatgggcctgcagggcgtcatcttcaatgatgtgtatgctgccagcaagtttgccctggagggcttctttgagagcctggccatccagctgctgcagttcaacatcttcatcagcctggtggagcccggccctgtggtgacagaatttgagggcaagctgctggcccaggtgtccatggccgagttccctggaacagatcctgagaccctgcactacttccgggacctgtacctgcctgccagcaggaagctgttctgcagcgtgggccagaacccccaggatgtggtgcaggccatcgtgaatgtcatcagcagcaccaggcctcccctgcggcggcagaccaacatccgctacagccccctgaccaccctgaagacagtggacagcagcggcagcctgtatgtgaggaccacccaccggctgctcttccgctgcccccggctgctgaacctgggcctgcagtgcctgagctgtggctgcctgcccaccagggtgcggcccaggtag

SEQ ID NO: 188018 - DNA, 936 bp, Artificial Sequence
  derived and/or modified sequence
atggccgccgccccccggaccgtgctgatcagcggctgcagcagcggtattggattggaactggcggtgcagctggcccatgaccccaagaagcgctatcaggtagttgcaaccatgcgtgatctaggcaagaaagagacactagaagcggctgccggagaggcacttggccagacacttaccgtagcccagctggacgtgtgctctgacgagtcagtggcacagtgcctgtcctgcattcaaggggaagtagacgtcctggtaaataatgccggcatgggattagtaggccccctggagggactgtctttggcagcaatgcaaaacgttttcgacacaaatttttttggcgcagtgagactggtaaaggctgtgctccccggtatgaagaggaggcgtcagggccacatcgttgtaatctcaagcgtgatgggactgcagggtgtcatctttaatgacgtgtatgctgccagtaaattcgctttggaaggattttttgaaagcttggcgattcagctattgcagtttaacattttcatcagcctggtcgaacccggaccagtggtgaccgaattcgagggcaaactgttggcccaggtgtctatggccgagttccctggcaccgatcctgaaaccctgcattacttccgcgatctatacctgcccgcttcccggaagctgttttgtagtgttgggcagaatccacaggacgtggtgcaagcaattgtgaatgtcatttcgagtacccggccccccttaagaagacagaccaatattcgttatagccccctgacaaccttgaagacagtcgacagttcaggctccctttatgtgcgcaccacccaccggctcctctttaggtgccctaggcttctcaatctgggattgcagtgcttgagttgcggatgtcttcctacacgtgtgaggcccagatag

SEQ ID NO: 188019 - DNA, 936 bp, Artificial Sequence
  derived and/or modified sequence
atggctgctgcgcctcggacggtgcttatatcaggatgttcttctggtatcggtctggaattagccgtgcaactggcccatgaccccaagaagagataccaggtggtggcgactatgagagacctagggaaaaaagagacccttgaggctgcagcaggcgaagccctggggcagacacttactgtggcacaactcgacgtgtgttcggacgaaagcgttgctcagtgcctcagttgcattcagggagaagttgacgtcctcgtgaacaacgccggtatggggttggtgggcccactagaaggcctgtctctagcagcaatgcagaatgtcttcgacacgaacttttttggggctgtacggcttgtcaaagccgttttgccaggaatgaagcggagaagacagggtcacattgtggtcattagctccgtgatggggctccagggtgtgatcttcaacgacgtgtatgctgcatcaaagtttgctttggagggtttttttgaaagcctcgcgattcagttactccaatttaacatctttataagcttggttgagcccggtccagtggtcaccgagtttgaaggcaagttgctggctcaggttagtatggcagagtttcccggaaccgaccctgagactctacactacttcagggatttatacctgcctgcctcaagaaaactgttctgttctgtgggccagaacccccaagacgtggtccaggcaatcgtgaatgtgatctcctcaacgcgccctcccttaagacggcagaccaatatccggtactctcccttaacaactctgaaaactgtggattcttctggctccctttatgtgcgcaccactcaccggctgctcttcaggtgccctagactcctgaatctgggacttcagtgtctttcttgtgggtgtctgccgacacgggtgcgacccagatag

SEQ ID NO: 188020 - DNA, 1714 bp, Artificial Sequence
  derived and/or modified sequence
tgtctatagtaggtgcggagaagaaatgtttggcagatgaagaaaatgaggtgcagagaggatttaagagattctctcttactgcctgttcagggtcagtccagaattgagggtctccgggggagggcagaggctttgccctgcaggggatctgtgggagggggttaggagggagcagatgagcccaggatgaatggtcagagtcaggtgctgcccggcggaggtcacgagtccagggaggggatcaacatggccgctgcaccccggactgtgttgatctccggctgctcatcaggaattggtctggaacttgcagtgcaactggcccatgaccccaagaagcgctaccaggtcgtggccaccatgagggacctggggaagaaggagacactggaggcagctgctggggaggctctggggcagaccctcaccgtggcccagctggacgtgtgcagtgatgagtcggtggcccagtgtctcagctgtatccagggagaagtggacgtgctggtgaataatgctggaatgggcctggtggggcccctggaggggctcagccttgctgccatgcagaatgtctttgacaccaactttttcggagctgtccgtctcgtcaaagctgtgcttccaggcatgaagaggaggcggcagggccacatcgtggtgatcagcagtgtcatgggcctgcagggtgtcatcttcaacgatgtctatgcagcttccaagttcgccctggagggattcttcgaaagcctcgctatccagctgctgcagttcaacatcttcatctccctggtggagccaggccccgtggtcaccgagtttgaggggaagcttctggcgcaggtttctatggctgagttcccaggcactgaccctgagaccctgcactacttccgggacctctatctcccagcctccaggaagctgttttgctccgtgggacagaacccacaggacgtggttcaggccattgtcaacgtcatcagctcgactcgaccacccctgcgccgacagaccaacatccgctactcgccgctgaccacgctcaaaaccgtggattcctctggcagcctgtatgtgcgaacgacccaccgcctcctcttccgctgtccacgcctcctcaaccttggccttcaatgtctgtcctgcggctgcctcccaacgcgggtgcggccaagatgagcagaacagagcttcacgatccccatccctgaacaaccagacctcttcattccacatctaattcaaaggatgaacagactcttcatttattcattctgcaaactccccctcccctcctctgtgcctagacatggctagaatcccagaagggcctttattttcaggcatagactcctctgtggtcacagctggagcacagagagggaccctgggaacttggcctgggaagcccagagcaggaagccacagctgtctctgggaaagcaagggaggcttcctggaggaagcggcattgttatgagccttgaaggaagagacagactctgctacattcaacctcgtgacttcatgatcctgggcctgagaacacaggaatgattcatagcccaccccccacctccatgcatacaccagagctctgtggaccaaggggtcattcctggtcacacactccatcagcaaaatgtatttgagcacacaccagcaatgtatgtatattttttccattaaatatatatttataaccaca

SEQ ID NO: 188021 - DNA, 936 bp, Artificial Sequence
  derived and/or modified sequence
atggccgccgcccccagaaccgtgctgatcagcggctgcagcagcggcatcggcctggagctggccgtgcagctggcccacgaccccaagaagagataccaggtggtggccaccatgagagacctgggcaagaaggagaccctggaggccgccgccggcgaggccctgggccagaccctgaccgtggcccagctggacgtgtgcagcgacgagagcgtggcccagtgcctgagctgcatccagggcgaggtggacgtgctggtgaacaacgccggcatgggcctggtgggccccctggagggcctgagcctggccgccatgcagaacgtgttcgacaccaacttcttcggcgccgtgagactggtgaaggccgtgctgcccggcatgaagagaagaagacagggccacatcgtggtgatcagcagcgtgatgggcctgcagggcgtgatcttcaacgacgtgtacgccgccagcaagttcgccctggagggcttcttcgagagcctggccatccagctgctgcagttcaacatcttcatcagcctggtggagcccggccccgtggtgaccgagttcgagggcaagctgctggcccaggtgagcatggccgagttccccggcaccgaccccgagaccctgcactacttcagagacctgtacctgcccgccagcagaaagctgttctgcagcgtgggccagaacccccaggacgtggtgcaggccatcgtgaacgtgatcagcagcaccagaccccccctgagaagacagaccaacatcagatacagccccctgaccaccctgaagaccgtggacagcagcggcagcctgtacgtgagaaccacccacagactgctgttcagatgccccagactgctgaacctgggcctgcagtgcctgagctgcggctgcctgcccaccagagtgagacccagatag

SEQ ID NO: 188022 - protein, 597 aa, Artificial Sequence
  derived and/or modified sequence
MSSKGSSTDGRTDLANGSLSSSPEEMSGAEEGRETSSGIEVEASDLSLSLTGDDGGPNRTSTESRGTDTESSGEDKDSDSMEDTGHYSINDENRVHDRSEEEEEEEEEEEEEQPRRRVQRKRANRDQDSSDDERALEDWVSSETSALPRPRWQALPALRERELGSSARFVYEACGARVFVQRFRLQHGLEGHTGCVNTLHFNQRGTWLASGSDDLKVVVWDWVRRQPVLDFESGHKSNVFQAKFLPNSGDSTLAMCARDGQVRVAELSATQCCKNTKRVAQHKGASHKLALEPDSPCTFLSAGEDAVVFTIDLRQDRPASKLVVTKEKEKKVGLYTIYVNPANTHQFAVGGRDQFVRIYDQRKIDENENNGVLKKFCPHHLVNSESKANITCLVYSHDGTELLASYNDEDIYLFNSSHSDGAQYVKRYKGHRNNATVKGVNFYGPKSEFVVSGSDCGHIFLWEKSSCQIIQFMEGDKGGVVNCLEPHPHLPVLATSGLDHDVKIWAPTAEASTELTGLKDVIKKNKRERDEDSLHQTDLFDSHMLWFLMHHLRQRRHHRRWREPGVGATDADSDESPSSSDTSDEEEGPDRVQCMPS

SEQ ID NO: 188023 - protein, 106 aa, Artificial Sequence
  derived and/or modified sequence
MSSKGSSTDGRTDLANGSLSSSPEEMSGAEEGRETSSGIEVEASDLSLSLTGDDGGPNRTSTESRGTDTESSGEDKDSDSMEDTGHYSINDENRVHDRSEEEEEEE

SEQ ID NO: 188024 - protein, 41 aa, Artificial Sequence
  derived and/or modified sequence
MSSKGSSTDGRTDLANGSLSSSPEEMSGAEEGRETSSGIEV

SEQ ID NO: 188025 - protein, 109 aa, Artificial Sequence
  derived and/or modified sequence
MSSKGSSTDGRTDLANGSLSSSPEEMSGAEEGRETSSGIEVEASDLSLSLTGDDGGPNRTSTESRGTDTESSGEDKDSDSMEDTGHYSINDENRVHDRSEEEEEEEEEE

SEQ ID NO: 188026 - protein, 212 aa, Artificial Sequence
  derived and/or modified sequence
MSSKGSSTDGRTDLANGSLSSSPEEMSGAEEGRETSSGIEVEASDLSLSLTGDDGGPNRTSTESRGTDTESSGEDKDSDSMEDTGHYSINDENRVHDRSEEEEEEEEEEEEEQPRRRVQRKRANRDQDSSDDERALEDWVSSETSALPRPRWQALPALRERELGSSARFVYEACGARVFVQRFRLQHGLEGHTGCVNTLHFNQRGTWLASGS

SEQ ID NO: 188027 - protein, 578 aa, Artificial Sequence
  derived and/or modified sequence
MSSKGSSTDGRTDLANGSLSSSPEEMSGAEEGRETSSGIEVEASDLSLSLTGDDGGPNRTSMEDTGHYSINDENRVHDRSEEEEEEEEEEEEEQPRRRVQRKRANRDQDSSDDERALEDWVSSETSALPRPRWQALPALRERELGSSARFVYEACGARVFVQRFRLQHGLEGHTGCVNTLHFNQRGTWLASGSDDLKVVVWDWVRRQPVLDFESGHKSNVFQAKFLPNSGDSTLAMCARDGQVRVAELSATQCCKNTKRVAQHKGASHKLALEPDSPCTFLSAGEDAVVFTIDLRQDRPASKLVVTKEKEKKVGLYTIYVNPANTHQFAVGGRDQFVRIYDQRKIDENENNGVLKKFCPHHLVNSESKANITCLVYSHDGTELLASYNDEDIYLFNSSHSDGAQYVKRYKGHRNNATVKGVNFYGPKSEFVVSGSDCGHIFLWEKSSCQIIQFMEGDKGGVVNCLEPHPHLPVLATSGLDHDVKIWAPTAEASTELTGLKDVIKKNKRERDEDSLHQTDLFDSHMLWFLMHHLRQRRHHRRWREPGVGATDADSDESPSSSDTSDEEEGPDRVQCMPS

SEQ ID NO: 188028 - protein, 751 aa, Artificial Sequence
  derived and/or modified sequence
MSEEELTKAMEGLGMDEGDGEGNILPIMQSIMQNLLSKDVLYPSLKEITEKYPEWLQSHRESLPPEQFEKYQEQHSVMCKICEQFEAETPTDSETTQKARFEMVLDLMQQLQDLGHPPKELAGEMLTWLFFCGSQWVYGPWLTYVGWLQQTSFKMSSKGSSTDGRTDLANGSLSSSPEEMSGAEEGRETSSGIEVEASDLSLSLTGDDGGPNRTSTESRGTDTESSGEDKDSDSMEDTGHYSINDENRVHDRSEEEEEEEEEEEEEQPRRRVQRKRANRDQDSSDDERALEDWVSSETSALPRPRWQALPALRERELGSSARFVYEACGARVFVQRFRLQHGLEGHTGCVNTLHFNQRGTWLASGSDDLKVVVWDWVRRQPVLDFESGHKSNVFQAKFLPNSGDSTLAMCARDGQVRVAELSATQCCKNTKRVAQHKGASHKLALEPDSPCTFLSAGEDAVVFTIDLRQDRPASKLVVTKEKEKKVGLYTIYVNPANTHQFAVGGRDQFVRIYDQRKIDENENNGVLKKFCPHHLVNSESKANITCLVYSHDGTELLASYNDEDIYLFNSSHSDGAQYVKRYKGHRNNATVKGVNFYGPKSEFVVSGSDCGHIFLWEKSSCQIIQFMEGDKGGVVNCLEPHPHLPVLATSGLDHDVKIWAPTAEASTELTGLKDVIKKNKRERDEDSLHQTDLFDSHMLWFLMHHLRQRRHHRRWREPGVGATDADSDESPSSSDTSDEEEGPDRVQCMPS

SEQ ID NO: 188029 - DNA, 1794 bp, Artificial Sequence
  derived and/or modified sequence
atgagcagcaagggcagcagcaccgacggcagaaccgacctggccaacggcagcctgagcagcagccccgaggagatgagcggcgccgaggagggcagagagaccagcagcggcatcgaggtggaggccagcgacctgagcctgagcctgaccggcgacgacggcggccccaacagaaccagcaccgagagcagaggcaccgacaccgagagcagcggcgaggacaaggacagcgacagcatggaggacaccggccactacagcatcaacgacgagaacagagtgcacgacagaagcgaggaggaggaggaggaggaggaggaggaggaggaggagcagcccagaagaagagtgcagagaaagagagccaacagagaccaggacagcagcgacgacgagagagccctggaggactgggtgagcagcgagaccagcgccctgcccagacccagatggcaggccctgcccgccctgagagagagagagctgggcagcagcgccagattcgtgtacgaggcctgcggcgccagagtgttcgtgcagagattcagactgcagcacggcctggagggccacaccggctgcgtgaacaccctgcacttcaaccagagaggcacctggctggccagcggcagcgacgacctgaaggtggtggtgtgggactgggtgagaagacagcccgtgctggacttcgagagcggccacaagagcaacgtgttccaggccaagttcctgcccaacagcggcgacagcaccctggccatgtgcgccagagacggccaggtgagagtggccgagctgagcgccacccagtgctgcaagaacaccaagagagtggcccagcacaagggcgccagccacaagctggccctggagcccgacagcccctgcaccttcctgagcgccggcgaggacgccgtggtgttcaccatcgacctgagacaggacagacccgccagcaagctggtggtgaccaaggagaaggagaagaaggtgggcctgtacaccatctacgtgaaccccgccaacacccaccagttcgccgtgggcggcagagaccagttcgtgagaatctacgaccagagaaagatcgacgagaacgagaacaacggcgtgctgaagaagttctgcccccaccacctggtgaacagcgagagcaaggccaacatcacctgcctggtgtacagccacgacggcaccgagctgctggccagctacaacgacgaggacatctacctgttcaacagcagccacagcgacggcgcccagtacgtgaagagatacaagggccacagaaacaacgccaccgtgaagggcgtgaacttctacggccccaagagcgagttcgtggtgagcggcagcgactgcggccacatcttcctgtgggagaagagcagctgccagatcatccagttcatggagggcgacaagggcggcgtggtgaactgcctggagccccacccccacctgcccgtgctggccaccagcggcctggaccacgacgtgaagatctgggcccccaccgccgaggccagcaccgagctgaccggcctgaaggacgtgatcaagaagaacaagagagagagagacgaggacagcctgcaccagaccgacctgttcgacagccacatgctgtggttcctgatgcaccacctgagacagagaagacaccacagaagatggagagagcccggcgtgggcgccaccgacgccgacagcgacgagagccccagcagcagcgacaccagcgacgaggaggagggccccgacagagtgcagtgcatgcccagctag

SEQ ID NO: 188030 - DNA, 321 bp, Artificial Sequence
  derived and/or modified sequence
atgagcagcaagggcagcagcaccgacggcagaaccgacctggccaacggcagcctgagcagcagccccgaggagatgagcggcgccgaggagggcagagagaccagcagcggcatcgaggtggaggccagcgacctgagcctgagcctgaccggcgacgacggcggccccaacagaaccagcaccgagagcagaggcaccgacaccgagagcagcggcgaggacaaggacagcgacagcatggaggacaccggccactacagcatcaacgacgagaacagagtgcacgacagaagcgaggaggaggaggaggaggagtag

SEQ ID NO: 188031 - DNA, 126 bp, Artificial Sequence
  derived and/or modified sequence
atgagcagcaagggcagcagcaccgacggcagaaccgacctggccaacggcagcctgagcagcagccccgaggagatgagcggcgccgaggagggcagagagaccagcagcggcatcgaggtgtag

SEQ ID NO: 188032 - DNA, 330 bp, Artificial Sequence
  derived and/or modified sequence
atgagcagcaagggcagcagcaccgacggcagaaccgacctggccaacggcagcctgagcagcagccccgaggagatgagcggcgccgaggagggcagagagaccagcagcggcatcgaggtggaggccagcgacctgagcctgagcctgaccggcgacgacggcggccccaacagaaccagcaccgagagcagaggcaccgacaccgagagcagcggcgaggacaaggacagcgacagcatggaggacaccggccactacagcatcaacgacgagaacagagtgcacgacagaagcgaggaggaggaggaggaggaggaggaggagtag

SEQ ID NO: 188033 - DNA, 639 bp, Artificial Sequence
  derived and/or modified sequence
atgagcagcaagggcagcagcaccgacggcagaaccgacctggccaacggcagcctgagcagcagccccgaggagatgagcggcgccgaggagggcagagagaccagcagcggcatcgaggtggaggccagcgacctgagcctgagcctgaccggcgacgacggcggccccaacagaaccagcaccgagagcagaggcaccgacaccgagagcagcggcgaggacaaggacagcgacagcatggaggacaccggccactacagcatcaacgacgagaacagagtgcacgacagaagcgaggaggaggaggaggaggaggaggaggaggaggaggagcagcccagaagaagagtgcagagaaagagagccaacagagaccaggacagcagcgacgacgagagagccctggaggactgggtgagcagcgagaccagcgccctgcccagacccagatggcaggccctgcccgccctgagagagagagagctgggcagcagcgccagattcgtgtacgaggcctgcggcgccagagtgttcgtgcagagattcagactgcagcacggcctggagggccacaccggctgcgtgaacaccctgcacttcaaccagagaggcacctggctggccagcggcagctag

SEQ ID NO: 188034 - DNA, 1737 bp, Artificial Sequence
  derived and/or modified sequence
atgagcagcaagggcagcagcaccgacggcagaaccgacctggccaacggcagcctgagcagcagccccgaggagatgagcggcgccgaggagggcagagagaccagcagcggcatcgaggtggaggccagcgacctgagcctgagcctgaccggcgacgacggcggccccaacagaaccagcatggaggacaccggccactacagcatcaacgacgagaacagagtgcacgacagaagcgaggaggaggaggaggaggaggaggaggaggaggaggagcagcccagaagaagagtgcagagaaagagagccaacagagaccaggacagcagcgacgacgagagagccctggaggactgggtgagcagcgagaccagcgccctgcccagacccagatggcaggccctgcccgccctgagagagagagagctgggcagcagcgccagattcgtgtacgaggcctgcggcgccagagtgttcgtgcagagattcagactgcagcacggcctggagggccacaccggctgcgtgaacaccctgcacttcaaccagagaggcacctggctggccagcggcagcgacgacctgaaggtggtggtgtgggactgggtgagaagacagcccgtgctggacttcgagagcggccacaagagcaacgtgttccaggccaagttcctgcccaacagcggcgacagcaccctggccatgtgcgccagagacggccaggtgagagtggccgagctgagcgccacccagtgctgcaagaacaccaagagagtggcccagcacaagggcgccagccacaagctggccctggagcccgacagcccctgcaccttcctgagcgccggcgaggacgccgtggtgttcaccatcgacctgagacaggacagacccgccagcaagctggtggtgaccaaggagaaggagaagaaggtgggcctgtacaccatctacgtgaaccccgccaacacccaccagttcgccgtgggcggcagagaccagttcgtgagaatctacgaccagagaaagatcgacgagaacgagaacaacggcgtgctgaagaagttctgcccccaccacctggtgaacagcgagagcaaggccaacatcacctgcctggtgtacagccacgacggcaccgagctgctggccagctacaacgacgaggacatctacctgttcaacagcagccacagcgacggcgcccagtacgtgaagagatacaagggccacagaaacaacgccaccgtgaagggcgtgaacttctacggccccaagagcgagttcgtggtgagcggcagcgactgcggccacatcttcctgtgggagaagagcagctgccagatcatccagttcatggagggcgacaagggcggcgtggtgaactgcctggagccccacccccacctgcccgtgctggccaccagcggcctggaccacgacgtgaagatctgggcccccaccgccgaggccagcaccgagctgaccggcctgaaggacgtgatcaagaagaacaagagagagagagacgaggacagcctgcaccagaccgacctgttcgacagccacatgctgtggttcctgatgcaccacctgagacagagaagacaccacagaagatggagagagcccggcgtgggcgccaccgacgccgacagcgacgagagccccagcagcagcgacaccagcgacgaggaggagggccccgacagagtgcagtgcatgcccagctag

SEQ ID NO: 188035 - DNA, 2256 bp, Artificial Sequence
  derived and/or modified sequence
atgagcgaggaggagctgaccaaggccatggagggcctgggcatggacgagggcgacggcgagggcaacatcctgcccatcatgcagagcatcatgcagaacctgctgagcaaggacgtgctgtaccccagcctgaaggagatcaccgagaagtaccccgagtggctgcagagccacagagagagcctgccccccgagcagttcgagaagtaccaggagcagcacagcgtgatgtgcaagatctgcgagcagttcgaggccgagacccccaccgacagcgagaccacccagaaggccagattcgagatggtgctggacctgatgcagcagctgcaggacctgggccacccccccaaggagctggccggcgagatgctgacctggctgttcttctgcggcagccagtgggtgtacggcccctggctgacctacgtgggctggctgcagcagaccagcttcaagatgagcagcaagggcagcagcaccgacggcagaaccgacctggccaacggcagcctgagcagcagccccgaggagatgagcggcgccgaggagggcagagagaccagcagcggcatcgaggtggaggccagcgacctgagcctgagcctgaccggcgacgacggcggccccaacagaaccagcaccgagagcagaggcaccgacaccgagagcagcggcgaggacaaggacagcgacagcatggaggacaccggccactacagcatcaacgacgagaacagagtgcacgacagaagcgaggaggaggaggaggaggaggaggaggaggaggaggagcagcccagaagaagagtgcagagaaagagagccaacagagaccaggacagcagcgacgacgagagagccctggaggactgggtgagcagcgagaccagcgccctgcccagacccagatggcaggccctgcccgccctgagagagagagagctgggcagcagcgccagattcgtgtacgaggcctgcggcgccagagtgttcgtgcagagattcagactgcagcacggcctggagggccacaccggctgcgtgaacaccctgcacttcaaccagagaggcacctggctggccagcggcagcgacgacctgaaggtggtggtgtgggactgggtgagaagacagcccgtgctggacttcgagagcggccacaagagcaacgtgttccaggccaagttcctgcccaacagcggcgacagcaccctggccatgtgcgccagagacggccaggtgagagtggccgagctgagcgccacccagtgctgcaagaacaccaagagagtggcccagcacaagggcgccagccacaagctggccctggagcccgacagcccctgcaccttcctgagcgccggcgaggacgccgtggtgttcaccatcgacctgagacaggacagacccgccagcaagctggtggtgaccaaggagaaggagaagaaggtgggcctgtacaccatctacgtgaaccccgccaacacccaccagttcgccgtgggcggcagagaccagttcgtgagaatctacgaccagagaaagatcgacgagaacgagaacaacggcgtgctgaagaagttctgcccccaccacctggtgaacagcgagagcaaggccaacatcacctgcctggtgtacagccacgacggcaccgagctgctggccagctacaacgacgaggacatctacctgttcaacagcagccacagcgacggcgcccagtacgtgaagagatacaagggccacagaaacaacgccaccgtgaagggcgtgaacttctacggccccaagagcgagttcgtggtgagcggcagcgactgcggccacatcttcctgtgggagaagagcagctgccagatcatccagttcatggagggcgacaagggcggcgtggtgaactgcctggagccccacccccacctgcccgtgctggccaccagcggcctggaccacgacgtgaagatctgggcccccaccgccgaggccagcaccgagctgaccggcctgaaggacgtgatcaagaagaacaagagagagagagacgaggacagcctgcaccagaccgacctgttcgacagccacatgctgtggttcctgatgcaccacctgagacagagaagacaccacagaagatggagagagcccggcgtgggcgccaccgacgccgacagcgacgagagccccagcagcagcgacaccagcgacgaggaggagggccccgacagagtgcagtgcatgcccagctag

SEQ ID NO: 188036 - DNA, 1794 bp, Artificial Sequence
  derived and/or modified sequence
atgagcagcaaaggatctagcacagacggtcggacagatctcgccaacggtagtctctccagtagtcccgaagaaatgagtggggctgaagaaggcagagagacaagcagtggaatcgaggtggaagcaagtgatctctcactgtcactgaccggagacgacgggggcccaaaccgcacatccaccgagtcaagggggacagacacagagtcttcgggcgaggacaaagactcagactcgatggaagataccggacactacagcataaatgatgaaaaccgggtccacgatagaagtgaggaagaagaggaggaggaggaggaagaagaggaagagcagccgcggaggcgagtgcagcgcaagagggccaacagagaccaggacagctctgacgatgaacgagcccttgaggactgggtttcttcggagaccagcgcactcccaagaccaagatggcaggccctgcctgccttgcgcgagagagaactgggatcatccgcacgattcgtgtacgaggcctgtggcgcaagggtgtttgtccagagattcagactccaacatgggctggagggacataccggatgtgtcaacactctccattttaaccagagggggacatggttagcttctggttcagatgatctgaaggtagtcgtgtgggactgggtccgtagacagcccgtcctggattttgaaagcggccacaagtcaaatgtattccaagccaagtttctccccaattccggtgattctaccttagctatgtgtgccagagacgggcaggtccgagttgccgagctttccgctacacaatgttgtaagaacactaagagagtggcacagcacaagggtgcatcccacaagctagctctagagccagatagtccatgcaccttcctatctgcaggcgaggacgcggttgtttttaccatcgacctgaggcaagaccgacccgcatccaaactggttgtgacaaaggagaaagaaaagaaggttgggctctatactatctacgtgaatccggccaatacccaccagtttgccgtgggtggcagggatcaatttgttaggatttacgatcagcgaaagatcgacgagaatgaaaataacggcgttttgaagaagttttgtccccaccatctcgtcaactcagaaagcaaagccaatatcacatgcttagtgtacagccatgacgggacagagttgttagccagctataacgatgaggacatatatctgtttaacagttcccattctgatggggcccaatacgttaaaagatataagggccaccgcaataatgcaaccgtgaagggtgtgaacttttacggcccgaaatctgaattcgtcgttagcggcagcgattgcgggcacatttttctgtgggagaagtctagttgccaaattattcagttcatggagggggacaaggggggagtcgtgaactgtctggagccccatcctcatttgcccgtgcttgcaacatctggacttgaccacgatgtcaaaatctgggcccccaccgcagaggctagtaccgagttaacagggctgaaggatgtgattaagaagaacaaacgggaacgggacgaggactctctgcaccagaccgatctcttcgatagccacatgctgtggtttctgatgcaccatctgcggcagaggcggcaccatagacgctggagggagcccggtgtgggagcgacagacgctgacagtgatgaatctccctccagctccgacacatctgacgaagaggaaggtcctgaccgagtacagtgcatgccgagctag

SEQ ID NO: 188037 - DNA, 1794 bp, Artificial Sequence
  derived and/or modified sequence
atgtcttccaaggggagtagcaccgacggccgaaccgacttggcgaacggaagcctgagttcaagtcccgaagaaatgtccggggccgaagagggacgggaaacttcatctggtatcgaagtggaagcaagtgatctgtcgctgtcgctcacaggagatgatggcgggcctaataggacctctactgaaagtcggggcaccgacacagaaagtagtggagaggataaggactccgattctatggaagatactggccactattcaattaacgatgagaacagagtgcatgataggtccgaggaggaggaagaagaagaggaggaagaggaagaagagcaacctcggagacgcgtccagcggaagcgggccaaccgtgatcaggacagctccgacgatgagcgggccttagaagattgggtgagctctgagacgagcgcgcttcccaggccaaggtggcaagcgcttcccgccttacgcgagcgcgagttaggcagctcagcacgatttgtgtacgaggcctgcggcgccagggtcttcgtgcagagatttcgccttcaacacggcctcgagggccatacagggtgcgtgaatacgcttcactttaatcaacgggggacgtggttagctagtgggagcgatgatctcaaggtggttgtgtgggattgggtgagaaggcagccggtgctggactttgaaagcggccataagtcaaacgtttttcaggccaaattcctgcccaatagcggcgactccaccttagccatgtgcgctagggatggccaggttcgagtggccgagctgtcagcaacccaatgttgtaagaacactaagcgagttgctcagcacaaaggcgcctcccacaagctggcgctggaacctgattccccctgtacatttctatctgcaggcgaagatgcggtcgtgttcaccatcgacctgagacaggacagacctgccagcaaacttgtagtcactaaggaaaaggagaaaaaagtagggctgtacaccatctacgtgaatcctgctaatactcatcagtttgctgtcggcgggagggaccagttcgtgaggatttacgatcaacgaaaaatcgatgaaaacgagaataacggcgtcttgaagaaattctgcccccatcatcttgtgaactcggagtcgaaggctaatatcacctgcttggtttactctcacgatggtacagaattgctggcctcctacaatgatgaagacatttatttatttaactcttcccatagcgacggagcacagtacgtcaagcgttataaaggccaccgcaacaacgcgactgtcaaaggcgtgaacttctatggaccgaagagcgagttcgtggtctctggatctgactgcggtcatatctttctgtgggagaaatcttcctgtcagataattcagtttatggagggagataaagggggggtcgtgaattgcctggagcctcacccccacctgcctgtcctggctacaagcggcttggaccatgacgtgaagatctgggcgcctacggccgaggcctctaccgagcttactggcctgaaggacgtgatcaaaaagaacaagcgagaaagggatgaggattctctccaccagactgacctctttgacagccatatgttatggttcctaatgcaccatttacgccaaaggcggcatcatagacggtggcgggaacccggggtcggtgccactgatgctgacagcgatgagagtccttcaagctcagatacatcggatgaagaagagggtcccgacagagtacagtgcatgccatcttag

SEQ ID NO: 188038 - DNA, 1794 bp, Artificial Sequence
  derived and/or modified sequence
atgtcaagtaagggtagcagtacagatggcagaactgaccttgctaatggaagcttgagctctagtcccgaggagatgtcaggggcagaggaaggaagggagacctcttctggcatcgaggttgaagcctctgacctgagcttatccctcacaggggacgatgggggaccgaaccggaccagtaccgagtctcgcgggaccgacacagagagctccggcgaagataaagattccgacagtatggaggatacggggcactactctattaacgatgagaacagagttcacgaccgtagcgaggaggaggaggaggaggaagaagaggaggaagaggaacaacctcggagacgtgtgcaaagaaagcgggccaatcgagatcaggattcatctgacgacgaacgtgcactggaagattgggtctcttcagaaacctctgctctccccaggccgcggtggcaggccttacccgcccttcgtgaacgtgagctggggtcttccgcgcggttcgtctatgaggcctgcggagccagagtgttcgtgcagagattccgcctccagcacgggttagagggtcatactggctgtgtcaacacccttcactttaatcagcgaggcacttggctggcaagcggttctgacgatctcaaagtcgtggtatgggattgggtgcgtcgccaacccgtcctggacttcgagtcaggacacaagtctaatgtgtttcaggccaagttcctgccgaattccggagatagcaccctcgcaatgtgcgcacgagacgggcaagttcgcgtggcggagctgagtgcaacccagtgctgcaaaaataccaagagagttgctcaacacaagggggccagtcataagctcgctctggagccagatagcccttgcacattcctttcagccggcgaagatgcggtcgttttcactatcgatcttcggcaagacaggccggctagcaagttagtggtcactaaggaaaaagagaagaaggtaggactttacaccatatacgtgaacccagccaatacgcatcagttcgctgttggcgggcgggaccaattcgtgagaatctacgatcaacgaaagatcgatgaaaatgagaacaatggagtcttgaagaagttttgtcctcaccatcttgtcaactccgagagcaaagctaacatcacctgtctcgtgtattctcatgacggtaccgaactgctggccagctacaacgatgaagatatttatttgtttaacagcagccacagcgatggggcacagtacgtgaagagatacaaagggcaccggaacaacgcgacagtcaagggcgtcaatttctatggcccgaagtccgagtttgtcgtatctgggtccgactgcgggcatatctttctgtgggagaagagctcatgtcagataatccagtttatggagggcgataagggcggagtagtcaattgtttagagcctcacccccatctgcccgtgcttgcgacatccggccttgatcatgacgtcaaaatttgggcccctaccgcggaggcctcgaccgaactgactggactgaaagatgttatcaagaaaaacaagcgagagcgcgacgaggatagtcttcaccagacggacttgtttgattcccacatgctgtggtttctgatgcatcacctccggcagcgacgccatcaccggcgatggagagagcctggcgtcggggcaaccgatgctgactctgacgagtcccctagtagtagcgatacatcagacgaagaggaaggccctgatagggtacagtgtatgccatcttag

SEQ ID NO: 188039 - DNA, 321 bp, Artificial Sequence
  derived and/or modified sequence
atgagtagtaagggctcaagcaccgacggaaggaccgacctggcaaacgggtctctgtcctcctcccccgaggaaatgagcggagcagaagagggacgcgaaacttcttctggaatcgaagtggaggctagcgatttgagcctgagtttaaccggcgatgatggtgggcctaaccggacatcaaccgagagccgagggaccgacaccgagtcctccggtgaggacaaggacagcgacagcatggaggacacagggcactactctataaatgatgagaacagagtacatgacaggtccgaggaggaggaggaagaagagtag

SEQ ID NO: 188040 - DNA, 4106 bp, Artificial Sequence
  derived and/or modified sequence
agtgtaagatggcggcggcgttggtggtggcagtggacggggcggctgggcctggaacagtcggagcagccgctagcagaaggatgacccaagacgggaagcgggctgctgagcctcgccgattcccgtgcttgtaactgccccagccggacaccccccctcccttgacctacccggtctgtgtctcgttccggctcggcctgcgccccccctcgcttcccagccggtttcccctaaggatgggcctgacccgtatcccaagctcttagcgctcaggtcttttccttccgccgacccgaagtcatcgctgggagtactggttgccctttcctcagtccttcagtgaatctacagacctattttctcaggagctcagcctggccttacttcagtgataaaaggaggaaaggctggctacagcaaacatcattcaagatgtccagcaaagggagcagcacagatggcagaacagacttagctaatggaagcctgtctagcagtccagaggagatgtctggagctgaagaggggagggagacatcctcaggcattgaagtggaggcctcagacctgagtttgagcttgactggggatgatggtggccccaaccgcaccagcacagaaagtcgaggcacagacacagagagctcaggtgaagataaggactctgacagcatggaggacactggtcattactccattaatgatgaaaatcgagtccatgaccgctcagaggaagaggaagaggaggaagaagaggaggaagaagagcagcctcggcgccgtgtacagcgcaagcgggctaaccgtgaccaggactcatcagatgatgagcgggccctagaggactgggtgtcctcagaaacatcagctctaccccgacctcgctggcaagccctccctgcccttcgggagcgggagctgggttcaagtgcccgctttgtctatgaggcctgtggggcaagagtctttgtgcagcgtttccgcctgcagcatgggcttgagggccatactggttgtgtcaataccctgcactttaaccagcgcggcacctggctggccagtggcagcgatgacctgaaggtggtggtgtgggattgggtacggcggcagccagtactggactttgagagtggccacaaaagtaatgtgttccaggccaagtttcttcctaacagtggtgattctactctggccatgtgtgcccgtgacgggcaggttcgagtagcagaactgtctgccacacagtgttgcaagaatacaaaacgtgtggcccagcacaagggagcgtcccacaagttggcactggaaccagactctccctgtacgttcttatctgcaggtgaagatgcagttgttttcaccattgacctgagacaagaccgcccagcgtcgaaactggtggtgacaaaagagaaagagaagaaagtggggctgtatacgatctatgtgaatcctgccaatacccaccagtttgcagtgggtggacgagatcagtttgtaaggatttatgaccagaggaaaattgatgagaatgagaacaatggagtactcaagaagttctgtcctcatcacctggtgaacagtgagtccaaagcaaacatcacctgtcttgtgtacagccacgacggcacagagctcctggccagttacaatgatgaagacatttacctcttcaactcctctcacagtgatggggcccagtatgttaagagatacaagggccacagaaataatgccacagtaaaaggcgtcaatttctatggccccaagagtgagtttgtggtgagcggtagtgactgtgggcacatcttcctctgggagaaatcatcctgccagattattcagttcatggagggggacaagggaggcgtggtaaactgtcttgagccccaccctcacctgcctgtgctggcaaccagtggcctagaccatgatgtgaagatctgggcacccacagctgaagcttccactgagctgacagggttaaaagatgtgattaagaagaacaagcgggagcgggatgaagatagcttgcaccaaactgacctgtttgatagtcacatgctgtggttccttatgcatcacctgagacagagacgccatcaccggcgctggcgagaacctggggttggggccacagacgcggactctgatgagtctcccagctcctcagacacatcggacgaggaggagggccctgaccgggtgcagtgcatgccatcttgaggcctcatacctaggtggggcaggctggggctgccaacctgatcctgcctgggcaaccctttcctgtcccaggccctacattcagcagaaacgcactttggactttttgctttagataaaagaaagacatcccaggagaaggacaaaccagaggagtgaaccaacaaagagtacctaggaatgggagttgagccctggaatggggctctatggagaggtgcataggactcggcagaaatggcctctccccaaagcctctttttgagaggagagggaagcctattttgttaactggtttgggatagggaatggggtttctttttctttaatctcccttgtttcttgggctgggggaggggtggggggaacaactggctattcagtaccaaggggccagagtggagggtaggagtgccactctctctttggtttaggtttttgaccttttcttcctttgttttttaaaagtttatgacagttggctccccccccacccccagcaaccccatcccagaatcctattttcctgggaagtccttaaagcccctaaccatcccacactcttcactttcctttccaccttattcattctctgtacttaccacagtattttgcacttgattacatatccttcactctcttctcttcatcccatcaccccctaaataggtcaggtgagggaggctgggaagaggtgggaggaggggcagaagtgaaggaagaataggaaggatattacctcttctgttatttttttaagaaacattgtttggtggcagcaatctccctgtccctatcactgttagaggcctaattttatatctataaatatattaaaaagcaagtcaaacttggatgtatcaaggtaaaattattgtcaaagtttaaatacctatatattctctgaatgcaataaagggacttaagagtgaacaagagtaatggtgtggaagtgacacctggggtcagtttacctctgtgtatggtcactagagattgggacttaccctttaggttttaggaggcttgagaatggaaggatcctcatttctgcccttcctggttccctgctttggtgtaggggttgggaaaaacaggaaattcctctcagctctgcctcagatctcctacctctccttaagtcttgtagggggttccaaggatggctcttctaaccagaggctggcctgtctttaaaacttaactactttagggtggtgccaccactgcagactattgtggtactttgtgacagaagacatgtacacacacaccacacacatacatacacactctctcactctgtctctcttacctttagctgcttgatcattaagccatccaacttcatgccagttcccttctttatagaagagtgaagggaaagacttcctgggtttgacttaaaccttgtccacctcttgatattttaggattgaggaataagtcattaatctaaggactgattacagtggctggagcttgggcacttgtcttatcactggtcactgagtctgaaagtcccagctgaattcttgcccttaagtgcttttgctgctatttttttgcccccagttccacaagatccaaccaagaattctgtatcctgggacagtcagattcttctaaatcaggccaggaaggaggggaaaagagtgagagaatggtattcccagatacttcttcctcctgccccttttcccagcagctctgagaccagatgttggctgctgtacttactccctgaggtagggaatgtgtggtgatcgagtggtctgtgttcctattgctggtggggtgatagggtgggctaaaaaccatgcactctggaatttgttgtattttctcccagtaaagcttttcttctcccgactgct

SEQ ID NO: 188041 - DNA, 3824 bp, Artificial Sequence
  derived and/or modified sequence
gcaggcgcaagcgcagagagcggaggcggtggtggtggcggccgctggccagttccttcagtgaatctacagacctattttctcaggagctcagcctggccttacttcagtgataaaaggaggaaaggctggctacagcaaacatcattcaagatgtccagcaaagggagcagcacagatggcagaacagacttagctaatggaagcctgtctagcagtccagaggagatgtctggagctgaagaggggagggagacatcctcaggcattgaagtggaggcctcagacctgagtttgagcttgactggggatgatggtggccccaaccgcaccagcacagaaagtcgaggcacagacacagagagctcaggtgaagataaggactctgacagcatggaggacactggtcattactccattaatgatgaaaatcgagtccatgaccgctcagaggaagaggaagaggaggaagaagaggaggaagaagagcagcctcggcgccgtgtacagcgcaagcgggctaaccgtgaccaggactcatcagatgatgagcgggccctagaggactgggtgtcctcagaaacatcagctctaccccgacctcgctggcaagccctccctgcccttcgggagcgggagctgggttcaagtgcccgctttgtctatgaggcctgtggggcaagagtctttgtgcagcgtttccgcctgcagcatgggcttgagggccatactggttgtgtcaataccctgcactttaaccagcgcggcacctggctggccagtggcagcgatgacctgaaggtggtggtgtgggattgggtacggcggcagccagtactggactttgagagtggccacaaaagtaatgtgttccaggccaagtttcttcctaacagtggtgattctactctggccatgtgtgcccgtgacgggcaggttcgagtagcagaactgtctgccacacagtgttgcaagaatacaaaacgtgtggcccagcacaagggagcgtcccacaagttggcactggaaccagactctccctgtacgttcttatctgcaggtgaagatgcagttgttttcaccattgacctgagacaagaccgcccagcgtcgaaactggtggtgacaaaagagaaagagaagaaagtggggctgtatacgatctatgtgaatcctgccaatacccaccagtttgcagtgggtggacgagatcagtttgtaaggatttatgaccagaggaaaattgatgagaatgagaacaatggagtactcaagaagttctgtcctcatcacctggtgaacagtgagtccaaagcaaacatcacctgtcttgtgtacagccacgacggcacagagctcctggccagttacaatgatgaagacatttacctcttcaactcctctcacagtgatggggcccagtatgttaagagatacaagggccacagaaataatgccacagtaaaaggcgtcaatttctatggccccaagagtgagtttgtggtgagcggtagtgactgtgggcacatcttcctctgggagaaatcatcctgccagattattcagttcatggagggggacaagggaggcgtggtaaactgtcttgagccccaccctcacctgcctgtgctggcaaccagtggcctagaccatgatgtgaagatctgggcacccacagctgaagcttccactgagctgacagggttaaaagatgtgattaagaagaacaagcgggagcgggatgaagatagcttgcaccaaactgacctgtttgatagtcacatgctgtggttccttatgcatcacctgagacagagacgccatcaccggcgctggcgagaacctggggttggggccacagacgcggactctgatgagtctcccagctcctcagacacatcggacgaggaggagggccctgaccgggtgcagtgcatgccatcttgaggcctcatacctaggtggggcaggctggggctgccaacctgatcctgcctgggcaaccctttcctgtcccaggccctacattcagcagaaacgcactttggactttttgctttagataaaagaaagacatcccaggagaaggacaaaccagaggagtgaaccaacaaagagtacctaggaatgggagttgagccctggaatggggctctatggagaggtgcataggactcggcagaaatggcctctccccaaagcctctttttgagaggagagggaagcctattttgttaactggtttgggatagggaatggggtttctttttctttaatctcccttgtttcttgggctgggggaggggtggggggaacaactggctattcagtaccaaggggccagagtggagggtaggagtgccactctctctttggtttaggtttttgaccttttcttcctttgttttttaaaagtttatgacagttggctccccccccacccccagcaaccccatcccagaatcctattttcctgggaagtccttaaagcccctaaccatcccacactcttcactttcctttccaccttattcattctctgtacttaccacagtattttgcacttgattacatatccttcactctcttctcttcatcccatcaccccctaaataggtcaggtgagggaggctgggaagaggtgggaggaggggcagaagtgaaggaagaataggaaggatattacctcttctgttatttttttaagaaacattgtttggtggcagcaatctccctgtccctatcactgttagaggcctaattttatatctataaatatattaaaaagcaagtcaaacttggatgtatcaaggtaaaattattgtcaaagtttaaatacctatatattctctgaatgcaataaagggacttaagagtgaacaagagtaatggtgtggaagtgacacctggggtcagtttacctctgtgtatggtcactagagattgggacttaccctttaggttttaggaggcttgagaatggaaggatcctcatttctgcccttcctggttccctgctttggtgtaggggttgggaaaaacaggaaattcctctcagctctgcctcagatctcctacctctccttaagtcttgtagggggttccaaggatggctcttctaaccagaggctggcctgtctttaaaacttaactactttagggtggtgccaccactgcagactattgtggtactttgtgacagaagacatgtacacacacaccacacacatacatacacactctctcactctgtctctcttacctttagctgcttgatcattaagccatccaacttcatgccagttcccttctttatagaagagtgaagggaaagacttcctgggtttgacttaaaccttgtccacctcttgatattttaggattgaggaataagtcattaatctaaggactgattacagtggctggagcttgggcacttgtcttatcactggtcactgagtctgaaagtcccagctgaattcttgcccttaagtgcttttgctgctatttttttgcccccagttccacaagatccaaccaagaattctgtatcctgggacagtcagattcttctaaatcaggccaggaaggaggggaaaagagtgagagaatggtattcccagatacttcttcctcctgccccttttcccagcagctctgagaccagatgttggctgctgtacttactccctgaggtagggaatgtgtggtgatcgagtggtctgtgttcctattgctggtggggtgatagggtgggctaaaaaccatgcactctggaatttgttgtattttctcccagtaaagcttttcttctcccgactgct

SEQ ID NO: 188042 - DNA, 126 bp, Artificial Sequence
  derived and/or modified sequence
atgagtagcaagggtagttccaccgatggaaggactgacttagcaaatggtagtctctcaagttcacccgaggagatgtccggggcggaggagggtcgggaaacctcctcaggcattgaggtatag

SEQ ID NO: 188043 - DNA, 330 bp, Artificial Sequence
  derived and/or modified sequence
atgtccagcaaagggtcctccacagacggccgcaccgaccttgctaatgggagcttgtcttcgagtcctgaagagatgtccggagccgaagagggtagggagacaagctctggcatagaggttgaggcatccgatctcagccttagcctgaccggcgacgatggtgggcctaatcgcacctctaccgaaagcagaggaacagacacagaatcgtcaggcgaagacaaggactccgacagcatggaagacacggggcactactccatcaatgatgaaaaccgcgtgcatgacagatccgaggaggaagaagaggaggaagaggaggagtag

SEQ ID NO: 188044 - DNA, 639 bp, Artificial Sequence
  derived and/or modified sequence
atgtcttccaaaggctcatcaaccgatggcagaactgacctcgccaatggctccctcagctccagccccgaggagatgtcaggagctgaggaaggtagagagacatcctcaggaatcgaagtcgaagcatctgacctgagcctttcactgactggcgatgacggcggtcctaataggactagtacagaaagtagaggtacggacactgagtcctctggggaggacaaagattccgattcgatggaggatacgggccactattctatcaacgatgagaaccgcgtgcacgatcggagtgaggaggaagaggaggaagaggaggaggaagaagaggaacagccacggaggcgagtacagagaaaacgcgctaacagggatcaggactctagtgatgacgaacgggctcttgaggactgggtatcttccgaaaccagcgcccttccgcggccaaggtggcaagccctgcctgccctccgcgaacgtgaactcgggtcctctgctcgcttcgtatacgaggcttgtggggcccgtgtttttgtccagcgattcaggctgcagcacggccttgaggggcataccggctgtgtgaacacgcttcatttcaaccaacgaggtacctggcttgccagcggctcatag

SEQ ID NO: 188045 - DNA, 1737 bp, Artificial Sequence
  derived and/or modified sequence
atgagcagcaaggggtcttcaaccgatggaaggacagacctcgccaacggctcgctgagcagttcccccgaggagatgtccggagccgaggagggacgggagacaagttccggcatcgaggtggaggcctccgatctcagtctgagcctcaccggggacgatggcggcccaaacagaacttctatggaggatacaggccactattctataaacgatgaaaatagagtgcacgatcgcagcgaggaagaagaggaggaggaggaagaagaagaagaggaacagccacgacggagagtacagaggaagagagccaaccgagaccaggacagtagcgacgatgagcgcgctttggaagactgggtgagctctgagacttctgccctgccacggccgcggtggcaggctcttcctgccctgcgagagagggaactcggaagtagcgctcgcttcgtgtacgaggcctgtggagcccgggtctttgtccagaggttcaggttgcagcacgggctcgaaggccacaccggttgtgtgaacacccttcattttaaccaaagagggacttggctagcttcgggatctgacgatctaaaagtggtggtctgggattgggtgaggagacagcccgtacttgatttcgaatctggtcataaaagtaatgtgtttcaagctaaattcctacctaactccggagattccacgctggccatgtgcgctagagacggtcaggtccgtgtggcagagctgtctgccactcagtgttgcaagaacactaagcgagtggctcaacacaaaggtgcatctcataaattagccctcgaaccggattccccctgcacgttcctgtccgctggggaggacgcagtggtattcaccatcgatctgcggcaggacaggcccgcctccaagctcgtcgttaccaaggagaaggaaaaaaaggtcggattatacaccatctatgtgaacccagcgaacacacaccaattcgcagtaggcgggcgcgatcaatttgtgcgcatctacgaccaaagaaaaatcgatgagaatgagaataacggcgttctcaagaaattttgcccccaccatttggtgaacagcgagagtaaggcgaacattacctgcctggtgtacagccatgatggcaccgagttgttggcctcctataacgacgaggatatttatttattcaattcaagccactcggatggagcccagtacgtcaaacgatacaaaggccacaggaacaacgccacagtaaaaggggtcaatttctatgggcccaagagcgagttcgttgtgtcaggcagcgactgtggccacatcttcttgtgggaaaagagcagctgccaaataattcagttcatggagggtgacaagggcggcgtcgtaaactgcttggaacctcatccccaccttcctgtgttggccactagtggcctggaccacgacgtcaagatctgggcccccactgcagaggcgagtacagaactaaccggcttgaaggatgttattaaaaaaaacaaacgagagcgggacgaggacagcctacaccagactgatttattcgactcacacatgctctggtttctgatgcatcaccttcgccagcggcggcaccaccggcggtggcgggagccaggtgtgggcgccactgatgccgacagtgacgagtccccatcatcatcagatacctcagacgaggaggaagggcctgacagggtacagtgcatgccttcttag

SEQ ID NO: 188046 - DNA, 2256 bp, Artificial Sequence
  derived and/or modified sequence
atgtccgaggaggaactcaccaaggccatggagggactcgggatggatgagggagatggagaaggtaacattctgcccatcatgcagtcaatcatgcagaacttactgtcaaaggatgtgctttatccaagtctcaaggagataacagagaagtatcctgaatggcttcagagtcacagagagtctctgcccccggagcagtttgaaaaatatcaggagcagcacagcgtgatgtgtaagatctgtgagcaatttgaagctgagactcccactgacagtgagactacacagaaagcccggtttgagatggtccttgacctcatgcagcagttacaagatctgggacatccaccaaaagaacttgccggggagatgttgacttggctgtttttctgcggctcacaatgggtctacggtccctggttgacttatgtcggttggctacaacagacctctttcaagatgagttccaaggggagcagcacggatggccgcactgatctggctaacggtagcctctcttctagccctgaagaaatgagcggggccgaggaggggagagaaaccagctccggaatcgaagtggaggcctcagatctgtcacttagtttgactggagatgacggcggccctaaccgcacctctactgagtctagaggaacagataccgagagctcaggggaggataaggattcagactccatggaggataccggacattatagtattaatgatgaaaacagagttcacgaccgatctgaggaagaggaggaggaggaggaagaggaggaagaggaacagccgcgcagacgagttcagagaaaacgagccaacagagaccaggacagctccgacgacgagcgggcgctggaggattgggtgtcaagcgagacatcagcactccccagaccccgatggcaggctctaccggcgctcagagagagggagctgggatcttctgcaagattcgtctatgaagcttgcggagcccgagtgttcgtgcagcgatttcgtctgcagcacggtcttgagggccacactgggtgcgtgaacaccctgcactttaatcagaggggtacctggttggcaagtgggagtgacgacctgaaggtggttgtctgggattgggtgcgtagacagcccgttctagacttcgagtccgggcataagagcaacgtgttccaggcaaagtttctccccaactctggcgactctacgctcgccatgtgcgcccgcgacggacaagtgcgggtggccgaactgagtgccacacagtgctgtaaaaacacaaaaagagtggcacagcacaagggtgcttctcacaagcttgctttggaacctgactctccttgcactttccttagtgccggcgaggatgccgtcgtgttcaccattgacctccgacaggacagaccagcatctaaattggtcgtgaccaaggagaaggagaaaaaagtcgggctctacactatctatgtgaatcccgcaaacacccaccagttcgcggtggggggcagagaccagtttgtgagaatctacgatcagcgcaagatcgacgaaaatgagaacaatggagttctcaagaaattctgtccacatcaccttgtgaactcagaaagtaaggctaatattacgtgtctcgtgtacagtcatgacggaactgaactgttggccagctacaacgatgaggacatatacctctttaacagctctcattccgatggagctcagtatgttaagagatacaaggggcatcgcaataatgctacggtgaaaggtgtcaacttctatgggcctaagagcgaattcgtcgtgtcaggttcagactgcgggcatatctttctttgggaaaaaagttcctgtcaaatcatccagttcatggagggggacaaagggggggtggtgaactgcctggagccgcatccccacctcccagtgttagccacatccggcctggatcacgacgtgaaaatctgggccccaacagccgaagccagtacagaactgactgggctgaaggatgtcattaagaaaaacaaaagggagcgtgatgaggatagcctccaccagacggacttatttgattcccatatgctctggtttttgatgcatcacttgcgccagagacggcaccatcggcgctggagggagccaggtgtcggcgccacagacgccgatagtgatgagagtccctcgagcagcgatactagcgatgaagaggagggccctgatcgtgtccaatgcatgccatcgtag

SEQ ID NO: 188047 - DNA, 2256 bp, Artificial Sequence
  derived and/or modified sequence
atgtcagaagaggagctaaccaaagccatggagggactgggaatggacgaaggtgatggtgagggtaacattcttcccattatgcagtccatcatgcaaaatctgctgtctaaggacgttctttacccatcccttaaagaaattactgagaagtatccagaatggctgcaatcgcaccgcgagtccctgcccccagagcagtttgagaaataccaggaacagcattcagttatgtgtaaaatctgtgagcaattcgaggccgaaacaccgaccgacagtgagaccacacagaaggctcggttcgagatggtattggatctcatgcagcaattacaggatctggggcaccctcccaaggagttggcaggagagatgctcacatggctgtttttctgcggctcacagtgggtgtatggtccttggttaacatacgttggctggctgcagcagaccagcttcaagatgagttccaaagggagttctaccgacggaaggacggacctggccaatggctcactgtccagctcccccgaagagatgagcggagcagaggagggccgagaaacctcgtccggtatagaggtcgaggcctctgacctgagcctaagccttactggggacgacggtgggccaaatcgaacctcaaccgagtcccgcggcacagacacggagtcctcgggagaggataaagactctgacagtatggaggacactggacactattccatcaatgacgagaatagggtgcacgaccgctccgaggaagaggaggaggaggaagaggaggaagaggaggagcagcctagaagaagggtccaacgcaagcgcgctaatcgggaccaggactcgagcgatgacgagagggcattagaggattgggtgtccagtgagacctccgctttgccgagaccacgctggcaggcactccccgccctgcgagagagggagttagggagttctgctcggtttgtgtacgaggcctgtggcgcacgcgtgtttgtccagaggttccgtctgcagcacgggttggagggtcataccggctgcgtgaacaccctgcattttaatcagcgggggacatggctcgcatccggctctgacgatctgaaagtggttgtttgggactgggtccgtcgtcagcccgtgctggacttcgaatcaggtcacaagtctaacgtgttccaggccaagttcctgccaaatagtggggattccacgctcgccatgtgtgcaagggacggccaggttcgcgtagctgaactgtccgcaacccaatgctgcaagaatacaaagagggtggcacagcacaagggggcctctcataaactggccctggagcccgactccccttgtaccttcctgagcgccggtgaggatgccgtggtgttcacaattgatctcagacaggatcgacccgcatccaagctggtagtgacaaaggaaaaggagaagaaggtaggtttgtacaccatctatgtgaatcctgccaatactcatcagtttgctgtgggcggccgagatcaattcgtcaggatctacgaccaacggaagatcgacgagaatgagaacaacggtgtgctcaaaaagttctgcccccatcacttggtcaacagtgagagcaaggccaatattacgtgtctggtgtactcccacgatgggaccgaactcctggcttcctacaacgatgaggacatttacctgttcaatagttcccacagcgacggagcccaatatgtgaaaaggtacaagggccacaggaataatgccaccgtcaaaggagtaaatttctacggacccaagtccgaattcgtcgtgagcggctccgactgcgggcacatctttctgtgggagaagtcttcttgtcagattatccagtttatggagggggacaaaggtggtgtcgtcaactgtctagaacctcacccacatttgccagttctggccacatcggggttggatcacgacgttaagatatgggcgcctacggcagaggctagtaccgaactaacaggcctgaaggacgtgattaagaagaacaagagggagcgagacgaggactccctacatcaaacagacctgttcgattctcatatgctctggtttcttatgcatcatctacggcagcgaaggcatcataggcgttggagagagccgggcgtaggagcaactgacgctgattctgacgaaagtccttctagctctgatacttccgacgaagaggaaggccctgaccgcgtccaatgcatgcctagttag

SEQ ID NO: 188048 - DNA, 1794 bp, Artificial Sequence
  derived and/or modified sequence
atgagcagcaagggcagcagcacagatggccgcacagacctggccaacggcagcctgagcagcagccctgaggagatgtctggagctgaggagggccgggagaccagcagcggcatcgaggtggaggccagtgacctgagcctgagcctgactggagatgatggcggccccaacagaaccagcacagagagccggggcacagacacagagagcagcggggaggacaaggacagcgacagcatggaggacaccggccactacagcatcaatgatgagaacagagtgcatgacagaagtgaggaggaggaggaggaggaggaggaggaggaggaggagcagccccggcggcgggtgcagaggaagagggccaacagagaccaggacagcagtgatgatgagcgggccctggaggactgggtgagcagcgagaccagcgccctgccccggccccgctggcaggccctgcctgccctgcgggagcgggagctgggcagcagcgccaggtttgtgtatgaggcctgtggggcccgggtgtttgtgcagcgcttccggctgcagcacggcctggagggccacacaggctgtgtgaacaccctgcacttcaaccagaggggcacctggctggccagcggcagtgatgacctgaaggtggtggtgtgggactgggtgcggcggcagcctgtgctggactttgaaagtggccacaagagcaatgtgttccaggccaagttcctgcccaacagcggggacagcaccctggccatgtgtgccagagatggccaggtgcgggtggccgagctgagcgccacccagtgctgcaagaacaccaagagggtggcccagcacaagggggccagccacaagctggccctggagccagacagcccctgcaccttcctgtctgctggggaggatgctgtggtgttcaccatcgacctgcggcaggacaggcctgccagcaagctggtggtgaccaaggagaaggagaagaaggtgggcctgtacaccatctacgtgaacccagccaacacccaccagtttgctgtgggcggccgggaccagtttgtgcgcatctatgaccagaggaagattgatgaaaatgaaaacaacggggtgctgaagaagttctgcccccaccacctggtgaacagcgagagcaaggccaacatcacctgcctggtgtacagccatgatggaacagagctgctggccagctacaatgatgaggacatctacctgttcaacagcagccacagtgatggagcccagtatgtgaagcgctacaagggccacaggaacaatgccaccgtgaagggcgtgaacttctacggccccaagtcagaatttgtggtgtctggcagtgactgtggccacatcttcctgtgggagaagagcagctgccagatcatccagttcatggagggggacaagggcggcgtggtgaactgcctggagccccacccccacctgcctgtgctggccaccagcggcctggaccatgatgtgaagatctgggcccccacagctgaggccagcacagagctgaccggcctgaaggatgtgatcaagaagaacaagcgggagagagatgaggacagcctgcaccagacagacctgtttgacagccacatgctgtggttcctgatgcaccacctgcggcagaggaggcaccaccggcgctggagggagcccggggtgggcgccacagatgctgacagtgatgagagccccagcagcagtgacaccagtgatgaggaggagggccctgacagagtgcagtgcatgcccagctag

SEQ ID NO: 188049 - DNA, 321 bp, Artificial Sequence
  derived and/or modified sequence
atgagcagcaagggcagcagcacagatggccgcacagacctggccaacggcagcctgagcagcagccctgaggagatgtctggagctgaggagggccgggagaccagcagcggcatcgaggtggaggccagtgacctgagcctgagcctgactggagatgatggcggccccaacagaaccagcacagagagccggggcacagacacagagagcagcggggaggacaaggacagcgacagcatggaggacaccggccactacagcatcaatgatgagaacagagtgcatgacagaagtgaggaggaggaggaggaggagtag

SEQ ID NO: 188050 - DNA, 126 bp, Artificial Sequence
  derived and/or modified sequence
atgagcagcaagggcagcagcacagatggccgcacagacctggccaacggcagcctgagcagcagccctgaggagatgtctggagctgaggagggccgggagaccagcagcggcatcgaggtgtag

SEQ ID NO: 188051 - DNA, 330 bp, Artificial Sequence
  derived and/or modified sequence
atgagcagcaagggcagcagcacagatggccgcacagacctggccaacggcagcctgagcagcagccctgaggagatgtctggagctgaggagggccgggagaccagcagcggcatcgaggtggaggccagtgacctgagcctgagcctgactggagatgatggcggccccaacagaaccagcacagagagccggggcacagacacagagagcagcggggaggacaaggacagcgacagcatggaggacaccggccactacagcatcaatgatgagaacagagtgcatgacagaagtgaggaggaggaggaggaggaggaggaggagtag

SEQ ID NO: 188052 - DNA, 639 bp, Artificial Sequence
  derived and/or modified sequence
atgagcagcaagggcagcagcacagatggccgcacagacctggccaacggcagcctgagcagcagccctgaggagatgtctggagctgaggagggccgggagaccagcagcggcatcgaggtggaggccagtgacctgagcctgagcctgactggagatgatggcggccccaacagaaccagcacagagagccggggcacagacacagagagcagcggggaggacaaggacagcgacagcatggaggacaccggccactacagcatcaatgatgagaacagagtgcatgacagaagtgaggaggaggaggaggaggaggaggaggaggaggaggagcagccccggcggcgggtgcagaggaagagggccaacagagaccaggacagcagtgatgatgagcgggccctggaggactgggtgagcagcgagaccagcgccctgccccggccccgctggcaggccctgcctgccctgcgggagcgggagctgggcagcagcgccaggtttgtgtatgaggcctgtggggcccgggtgtttgtgcagcgcttccggctgcagcacggcctggagggccacacaggctgtgtgaacaccctgcacttcaaccagaggggcacctggctggccagcggcagctag

SEQ ID NO: 188053 - DNA, 1737 bp, Artificial Sequence
  derived and/or modified sequence
atgagcagcaagggcagcagcacagatggccgcacagacctggccaacggcagcctgagcagcagccctgaggagatgtctggagctgaggagggccgggagaccagcagcggcatcgaggtggaggccagtgacctgagcctgagcctgactggagatgatggcggccccaacagaacctccatggaggacaccggccactacagcatcaatgatgaaaatagagtgcatgacagaagtgaggaggaggaggaggaggaggaggaggaggaggaggagcagcccaggagaagagtgcagaggaagagggccaacagagaccaggacagcagtgatgatgagcgggccctggaggactgggtgtcctctgagaccagcgccctgccccggccccgctggcaggccctgcctgccctgcgggagcgggagctgggcagcagcgccaggtttgtgtatgaggcctgtggggcccgggtgtttgtgcagcgcttccggctgcagcacggcctggagggccacacaggctgtgtgaacaccctgcacttcaaccagaggggcacctggctggccagcggcagtgatgacctgaaggtggtggtgtgggactgggtgcggcggcagcctgtgctggactttgagagcggccacaagagcaatgtgttccaggccaagttcctgcccaacagcggggacagcaccctggccatgtgtgccagagatggccaggtgcgggtggccgagctgagcgccacccagtgctgcaagaacaccaagagggtggcccagcacaagggggccagccacaagctggccctggagccagacagcccctgcaccttcctgtctgctggagaagatgctgtggtgttcaccatcgacctgcggcaggacaggcctgccagcaagctggtggtgaccaaggagaaggagaagaaggtgggcctgtacaccatctacgtgaacccagccaacacccaccagtttgctgtgggcggccgggaccagtttgtgcgcatctatgaccagaggaagattgatgaaaatgaaaataatggagtgctgaagaagttctgcccccaccacctggtgaacagcgagagcaaggccaacatcacctgcctggtgtacagccatgatggaacagagctgctggccagctacaatgatgaggacatctacctgttcaacagcagccacagtgatggagcccagtatgtgaagcgctacaagggccacagaaataatgccaccgtgaagggcgtgaacttctacggccccaagtcagaatttgtggtgtctggcagtgactgtggccacatcttcctgtgggagaagagcagctgccagatcatccagttcatggagggggacaagggcggcgtggtgaactgcctggagccccacccccacctgcctgtgctggccaccagcggcctggaccatgatgtgaagatctgggcccccacagctgaggccagcacagagctgaccggcctgaaggatgtgatcaagaagaacaagcgggagagagatgaggacagcctgcaccagacagacctgtttgacagccacatgctgtggttcctgatgcaccacctgcggcagaggaggcaccaccggcgctggagggagcccggggtgggcgccacagatgctgacagtgatgagagccccagcagcagtgacaccagtgatgaggaggagggccctgacagagtgcagtgcatgcccagctag

SEQ ID NO: 188054 - DNA, 2256 bp, Artificial Sequence
  derived and/or modified sequence
atgtctgaggaggagctgaccaaggccatggagggcctgggcatggatgaaggagatggagagggcaacatcctgcccatcatgcagagcatcatgcagaacctgctgagcaaggatgtgctgtaccccagcctgaaggagatcacagagaagtacccagagtggctgcagagccaccgggagagcctgcccccagagcagtttgagaagtaccaggagcagcacagcgtgatgtgcaagatctgtgagcagtttgaagctgagacccccacagattctgagaccacccagaaggccaggtttgagatggtgctggacctgatgcagcagctgcaggacctgggccacccccccaaggagctggccggggagatgctgacctggctgttcttctgtggcagccagtgggtgtatggcccctggctgacctacgtgggctggctgcagcagaccagcttcaagatgagcagcaagggcagcagcacagatggccgcacagacctggccaacggcagcctgagcagcagccctgaggagatgtctggagctgaggagggccgggagaccagcagcggcatcgaggtggaggccagtgacctgagcctgagcctgactggagatgatggcggccccaacagaaccagcacagagagccggggcacagacacagagagcagcggggaggacaaggacagcgacagcatggaggacaccggccactacagcatcaatgatgagaacagagtgcatgacagaagtgaggaggaggaggaggaggaggaggaggaggaggaggagcagccccggcggcgggtgcagaggaagagggccaacagagaccaggacagcagtgatgatgagcgggccctggaggactgggtgagcagcgagaccagcgccctgccccggccccgctggcaggccctgcctgccctgcgggagcgggagctgggcagcagcgccaggtttgtgtatgaggcctgtggggcccgggtgtttgtgcagcgcttccggctgcagcacggcctggagggccacacaggctgtgtgaacaccctgcacttcaaccagaggggcacctggctggccagcggcagtgatgacctgaaggtggtggtgtgggactgggtgcggcggcagcctgtgctggactttgaaagtggccacaagagcaatgtgttccaggccaagttcctgcccaacagcggggacagcaccctggccatgtgtgccagagatggccaggtgcgggtggccgagctgagcgccacccagtgctgcaagaacaccaagagggtggcccagcacaagggggccagccacaagctggccctggagccagacagcccctgcaccttcctgtctgctggggaggatgctgtggtgttcaccatcgacctgcggcaggacaggcctgccagcaagctggtggtgaccaaggagaaggagaagaaggtgggcctgtacaccatctacgtgaacccagccaacacccaccagtttgctgtgggcggccgggaccagtttgtgcgcatctatgaccagaggaagattgatgaaaatgaaaacaacggggtgctgaagaagttctgcccccaccacctggtgaacagcgagagcaaggccaacatcacctgcctggtgtacagccatgatggaacagagctgctggccagctacaatgatgaggacatctacctgttcaacagcagccacagtgatggagcccagtatgtgaagcgctacaagggccacaggaacaatgccaccgtgaagggcgtgaacttctacggccccaagtcagaatttgtggtgtctggcagtgactgtggccacatcttcctgtgggagaagagcagctgccagatcatccagttcatggagggggacaagggcggcgtggtgaactgcctggagccccacccccacctgcctgtgctggccaccagcggcctggaccatgatgtgaagatctgggcccccacagctgaggccagcacagagctgaccggcctgaaggatgtgatcaagaagaacaagcgggagagagatgaggacagcctgcaccagacagacctgtttgacagccacatgctgtggttcctgatgcaccacctgcggcagaggaggcaccaccggcgctggagggagcccggggtgggcgccacagatgctgacagtgatgagagccccagcagcagtgacaccagtgatgaggaggagggccctgacagagtgcagtgcatgcccagctag

SEQ ID NO: 188055 - DNA, 1794 bp, Artificial Sequence
  derived and/or modified sequence
atgagcagcaagggcagcagcaccgacggccggaccgacctggccaacggatcattgagtagctccccggaggagatgtctggggctgaggaaggccgcgaaacaagcagcggaatcgaagtggaggcttctgatctcagtctctccctgaccggcgacgacggcggacctaaccggactagcaccgagtccagaggtactgacaccgaatcgagcggggaggacaaggattcagattctatggaagataccggacattattccataaacgacgagaacagagtgcacgaccgctctgaggaagaggaggaggaagaggaggaagaagaggaggagcagcctcgacgaagggtgcagcgtaagagggcgaacagggatcaggacagcagcgacgatgaacgggccctcgaagactgggtgagcagtgaaacgtcagccctgcctcgtccaaggtggcaggccctcccagcgctgcgcgagagagagctggggtcatcggctcgcttcgtgtatgaagcttgtggggctcgagttttcgtgcagcggttcaggttacagcatggtctggagggccatacaggatgcgtgaatactctgcactttaaccaacgaggcacttggctggcatctggaagcgatgatctgaaagtcgtcgtgtgggactgggtgcgaagacagcctgtgctggatttcgaaagcgggcacaagtctaacgttttccaggctaagtttctgccaaatagcggggactctacactcgctatgtgtgcccgcgacgggcaggtgcgggtggctgagctgtccgcaacacaatgttgcaagaacacgaagagggtggcccagcacaaaggggcgtcacacaaactggccctcgaaccggactctccttgtacattcctgagtgcaggcgaagatgcagtggtcttcaccatcgacctccgccaggaccgacctgcaagcaaacttgtcgtgaccaaggaaaaggaaaagaaagtggggttgtacaccatttatgtaaaccccgctaacacacatcagttcgccgtggggggccgcgaccagttcgtgagaatctatgaccaaagaaaaattgatgaaaacgaaaacaatggggtgctgaagaagttctgtccacaccacttggtgaacagcgaaagcaaggcgaacatcacttgcctcgtctacagtcacgatggtaccgaactccttgcctcgtataatgatgaggatatctatcttttcaattcctcccacagcgacggggctcaatacgttaaacggtataagggccatagaaacaatgctaccgtgaagggcgttaacttttacgggcccaagtcagagtttgtcgtgtccgggtcggactgtggccacattttcctgtgggagaagtcttcctgccagatcattcaatttatggaaggcgacaagggaggcgtggttaactgtttggaaccccatccccacttgccggtgcttgccacctccggactggaccatgacgtcaaaatatgggcgcccacggctgaggccagcaccgaactaaccggactgaaggatgtgatcaaaaaaaataagcgcgaacgggatgaagactcgttgcaccagactgatctcttcgacagccatatgttgtggtttctgatgcaccaccttagacagagaagacatcacagacggtggcgggagcccggggttggggccaccgatgccgatagcgacgagtctcctagcagctccgacacgtccgacgaggaggaagggcctgatcgcgtacaatgcatgccgtcctag

SEQ ID NO: 188056 - DNA, 1794 bp, Artificial Sequence
  derived and/or modified sequence
atgagcagcaagggcagcagcaccgacggccggaccgacctggccaatgggagtctaagcagcagccctgaagaaatgtctggtgccgaggaggggcgcgaaacaagctccggaatcgaggttgaggccagtgatctgtccctttctctgactggcgatgacggggggcccaatagaactagtactgaatcaagaggtaccgacacagaaagctccggcgaagataaggactctgacagtatggaggataccggtcattactctatcaatgacgaaaatcgtgtccatgaccgtagcgaggaggaggaggaggaagaagaagaggaagaggaggagcaaccgcgacgtcgtgtgcaacgtaagcgggccaatcgtgaccaggatagctctgacgacgaacgggctctggaggattgggtcagttctgaaacaagcgcactgccacggcctcgatggcaggctctcccagccttgagagaacgtgaactgggctctagcgccaggtttgtctacgaagcttgcggggcccgcgtgttcgtccagcgtttccggctgcagcacggcctagaagggcatacagggtgcgtgaatacactgcattttaatcaacgcggcacatggcttgccagtggatcggacgacttaaaagtggtggtttgggattgggtcagaagacagcctgtcctggatttcgagtccggacacaagtccaatgtcttccaggcaaaattccttccaaacagtggagattctacgctggccatgtgcgcgagggatggtcaagtgcgtgtggctgaactgtccgctactcagtgctgcaagaataccaagcgggtggcacaacataagggggcctctcacaagctggcccttgaaccagattccccttgcacgtttctctccgccggtgaggacgctgtggtatttacaatcgacctgaggcaggatcgtccggcgtccaaactggtggttaccaaagaaaaagaaaagaaggtgggtctgtacactatctatgttaacccagccaatacccaccagtttgcagttgggggacgagatcagttcgtgcgcatttacgatcagcgcaaaattgatgaaaatgagaacaatggcgtcctcaagaaattttgtcctcaccatcttgtgaatagcgaaagtaaagcgaatatcacttgcctggtgtacagtcatgatggcacggagttactggcatcctataatgacgaagatatttatctcttcaatagttcccacagcgatggcgcccagtacgttaaacgctacaaagggcaccggaacaatgctacagtcaagggcgttaacttttatggccctaagagcgagttcgtggtgagcggctcagattgtggacacatcttcctgtgggagaagagctcttgccaaattattcaatttatggagggcgataaggggggggtcgtcaactgtcttgaaccacacccgcacctcccagtgctggccacatcaggcctcgaccacgacgtgaaaatttgggcgcctacggccgaagctagtaccgagctgacgggccttaaggacgtaatcaaaaaaaacaagcgcgagagggatgaggatagtctccatcaaacagacctgtttgatagccacatgctgtggttcctgatgcatcatctgaggcagcgccgacaccacagacgatggagagagccaggcgtgggagctacggatgctgactcagatgaatctccaagcagctcagataccagcgatgaagaggagggcccagatagagtccagtgtatgccatcatag

SEQ ID NO: 188057 - DNA, 1794 bp, Artificial Sequence
  derived and/or modified sequence
atgagcagcaagggcagcagcaccgacggccggaccgacctggccaacggttcattgagctctagcccggaggaaatgtccggagctgaggagggcagagaaacctccagcggaatagaggtggaggcctctgacctgagcctcagcctgacaggcgacgatggcggtcctaatcggacgagtaccgagtccagaggcacagataccgaaagctccggtgaagataaggattccgatagtatggaggataccggacactactccattaacgacgagaacagggtccacgatagaagtgaagaggaggaggaagaggaggaagaggaagaggaggaacagcccaggcggagggtacaacggaaaagggccaaccgcgaccaagatagttctgatgacgaacgtgcactggaagactgggtgtcgagcgagacaagcgcccttccgcgaccccgttggcaggcacttccagccttacgggaaagagagctggggagttccgcacgattcgtgtatgaagcctgcggcgccagggtttttgttcagcgcttcagactgcaacacggtttggagggtcataccggatgtgtgaacaccctgcacttcaaccagcgtggcacttggctagccagtggctcggatgatttaaaagtagtggtgtgggactgggtgcggaggcagcccgtcctcgacttcgaaagtggacacaagagcaacgtttttcaagccaaattcctcccaaactcaggggactcaacactggccatgtgcgcaagagatgggcaagttagggttgctgagctgagcgccactcaatgctgcaaaaataccaagagagtggcccaacacaagggagcctcacacaagctcgctcttgaacccgactccccctgcacgttcctgtcagcgggtgaagacgccgtcgttttcaccatcgacctgaggcaggaccgacccgcctccaagctggtggtgaccaaggagaaggaaaaaaaggtcgggctgtataccatttacgtaaatccagcaaatacgcaccagtttgcggtgggtggccgggaccagtttgttcgcatctacgatcagagaaagatagacgaaaacgagaataacggcgttctcaagaagttctgccctcaccacctggtgaacagtgagagtaaggcaaatattacttgtctggtatactcccatgatggtacggaattgctggccagctataacgatgaagatatttacctgttcaactcatctcactcagatggtgcacagtacgtgaagagatataaggggcaccgcaataacgcgaccgtgaagggtgtcaacttctatggacctaaaagtgaatttgtggtcagtggctcagattgcggccacattttcctatgggaaaaatctagctgccaaataatccagtttatggaaggagataagggcggcgttgtgaactgtttggagccacatcctcacctgccagtgttggccacatcaggtctggatcacgatgtgaaaatttgggctcctacagccgaagctagtacggagttaacgggcctcaaggatgtgatcaagaagaataaacgggagcgcgacgaagattccctgcatcagacagacctatttgactcacacatgctgtggtttctgatgcatcacctgcgccaacgcagacaccaccgccggtggagggagcccggcgtgggggctaccgatgccgatagtgatgaatctccatccagcagtgacacttccgacgaggaagaaggccccgatagagtacagtgcatgccatcctag

SEQ ID NO: 188058 - DNA, 321 bp, Artificial Sequence
  derived and/or modified sequence
atgagcagcaagggcagcagcaccgacggccggaccgacctggccaatggtagcctctccagcagccctgaagagatgagcggggcagaagaagggagagagacctcatcgggaatcgaggtggaagcaagcgatctctccctttccctcaccggagatgacggcgggccgaatcgaaccagcacagaatctcggggtaccgacactgagagcagcggcgaagataaagactctgactccatggaagacaccggccactactccatcaacgacgagaaccgcgtccatgatcgcagcgaggaagaagaggaggaggagtag

SEQ ID NO: 188059 - DNA, 126 bp, Artificial Sequence
  derived and/or modified sequence
atgagcagcaagggcagcagcaccgacggccggaccgacctggccaacggcagtctaagttcttcaccggaggagatgtcaggcgctgaggaaggtagggagacatcgtctgggatcgaggtgtag

SEQ ID NO: 188060 - DNA, 330 bp, Artificial Sequence
  derived and/or modified sequence
atgagcagcaagggcagcagcaccgacggccggaccgacctggccaacggtagcttgtcttcctctccagaagagatgtctggggccgaggaggggcgggagacatcctccggaattgaggtggaggcaagcgacttatcactgtctctgacaggtgacgatggcgggcccaaccggactagcaccgagagcagaggaaccgacactgaatcctccggcgaggacaaggacagcgactccatggaggacaccggacattattccattaacgacgaaaatcgcgtccacgatcggtcggaggaagaggaggaggaagaggaagaagaatag

SEQ ID NO: 188061 - DNA, 639 bp, Artificial Sequence
  derived and/or modified sequence
atgagcagcaagggcagcagcaccgacggccggaccgacctggccaatggctcactcagcagctctcccgaagaaatgtccggcgctgaagaggggcgggaaacatccagcggcatcgaggtggaagccagcgatctttctctaagcctaacaggggatgacggagggcctaaccgcacctcaacagagagtcggggtacggacaccgagtcttcaggcgaagacaaggacagcgactctatggaggacacaggacactacagtattaatgacgagaacagagtgcatgaccgctctgaggaggaggaggaagaggaagaggaggaggaggaagagcagcctaggcgccgtgtgcagcgaaaaagagctaacagggaccaggacagcagcgacgacgagcgagccctcgaggactgggtgagcagcgagacttctgcattgccacggcctaggtggcaggccctccctgccctgcgggagcgagagctgggctccagcgcccgattcgtgtatgaggcctgcggcgccagggtgttcgtgcagcggttccgactgcagcatggcctcgaagggcatactgggtgtgtgaataccctccacttcaaccagcgcggaacatggctggcctctggctcttag

SEQ ID NO: 188062 - DNA, 517 bp, Artificial Sequence
  derived and/or modified sequence
gtaagatggcggcggcgttggtggtggcagtggacggggcggctgggcctggaacagtcggagcagccgctagcagaaggatgacccaagacgggaagcgggctgctgagcctcgccgattcccgtgcttgtaactgccccagccggacaccccccctcccttgacctacccggctggctacagcaaacatcattcaagatgtccagcaaagggagcagcacagatggcagaacagacttagctaatggaagcctgtctagcagtccagaggagatgtctggagctgaagaggggagggagacatcctcaggcattgaagtggaggcctcagacctgagtttgagcttgactggggatgatggtggccccaaccgcaccagcacagaaagtcgaggcacagacacagagagctcaggtgaagataaggactctgacagcatggaggacactggtcattactccattaatgatgaaaatcgagtccatgaccgctcagaggaagaggaagaggaggaa

SEQ ID NO: 188063 - DNA, 1737 bp, Artificial Sequence
  derived and/or modified sequence
atgagcagcaagggcagcagcaccgacggccggaccgacctggccaacggttctctctccagtagccccgaagaaatgagcggtgctgaggaaggacgggaaacgagcagcgggatagaggttgaagcatcagacttgtcacttagtctcaccggggatgacggtgggcctaaccggacttctatggaggatacgggacattactcaattaatgacgagaatagggtgcatgaccgcagtgaggaggaggaggaggaggaggaggaggaggaggaggaacagcctcgtagacgggtgcagcgtaagagagctaatcgggatcaggatagctctgatgacgagcgggccctggaagactgggtttccagtgagactagcgccctgcccaggccccgttggcaggcgctccctgcacttagagagcgagaactgggatcctccgctaggttcgtgtatgaggcatgcggtgccagggtgttcgtgcagagatttcggctacaacacggcctggaaggccacactggctgcgtgaacactctccactttaatcagagggggacatggctggctagcggtagcgacgatctaaaggtggtggtttgggattgggtgaggaggcaacctgtgctggatttcgagtcaggacataaatctaatgtgtttcaggcaaagtttctgcctaatagcggcgattccaccctggcaatgtgtgctagagatggacaggttcgcgtggcagagctgtccgccactcaatgttgcaagaataccaaaagggtggcacagcacaaaggggcctcccataagctggcgctcgagccagattcaccctgtacctttctgagtgcgggcgaagatgccgttgtgtttaccatcgatctgaggcaggatcgaccggccagcaagttggtggtgactaaagagaaagagaagaaagtcggcttatacaccatctacgtcaatcctgctaacactcaccaattcgccgtgggcggccgggaccagttcgttcgaatttatgatcagcgcaaaatcgatgaaaatgagaataacggggtgctcaagaaattctgtccccatcatcttgtcaatagtgagagtaaggccaacatcacctgcctagtttactcacatgatggtaccgaactgctggcatcgtacaatgatgaggatatctatctatttaacagcagccattcagatggggcccaatacgtgaaacgatataagggccacaggaataacgccacagttaaaggagtgaacttttatggccccaagtcagagtttgtagtgagcggttccgattgtggacacatctttctgtgggaaaagagttcttgtcagattatccagttcatggaaggggacaaaggcggtgtggtgaactgtctcgagccacacccccacctccctgtactagccacatcgggacttgatcatgacgtgaaaatctgggctcctacggctgaagcatccacagagctgaccggtctaaaagatgtaataaagaagaacaagagggagcgtgatgaggattctctgcaccagactgacttattcgactcccacatgctttggtttcttatgcaccacctgcgacagcgtaggcaccacaggaggtggagggaacccggggtgggagcaacagatgccgacagcgacgagtcaccgagctcgtccgacacttcagacgaagaggagggccctgacagagtccagtgtatgccctcctag

SEQ ID NO: 188064 - DNA, 2256 bp, Artificial Sequence
  derived and/or modified sequence
atgagcgaggaggagctgaccaaggccatggagggcctgggcatggatgaaggagacggtgagggcaacatacttcccattatgcaatctattatgcagaatttattgagtaaagatgtgttgtacccctctttaaaagagattacggaaaagtaccctgaatggcttcaatcacaccgcgagagcctcccacctgaacagttcgaaaagtatcaagagcaacactcggtgatgtgtaaaatatgtgagcaattcgaggccgaaacgccgaccgacagcgagaccacacaaaaggctcgctttgagatggttttagacctgatgcagcagctccaggacctggggcatccccccaaggagctggccggtgagatgctgacctggttgtttttctgcggaagtcaatgggtgtacggcccatggctgacctatgttggttggctgcagcagactagtttcaagatgtcctcgaagggcagcagtactgacgggcgcacagatcttgccaacggcagcctgtccagctctccagaagaaatgtccggggccgaggaaggccgagaaacatccagtggtatagaagttgaggctagtgacctgagcttaagtctcactggagacgatggaggccccaaccgcacttctacagagagcaggggcactgacacagaaagtagcggcgaggacaaagattctgattcaatggaggatacaggccactattctattaacgatgaaaacagagttcacgatcgtagtgaagaagaagaggaggaagaggaagaggaagaggaagaacagcccaggcgaagagttcaacgaaagagggctaatcgcgatcaggactcctcagatgatgagagggcccttgaggactgggtcagcagtgagacaagcgctctgcccaggccccgctggcaagcactgccggcgctgagagagagggagctgggcagcagtgccagattcgtgtatgaggcatgcggtgcgcgggtcttcgtgcaaaggttccgactgcaacacggactcgaggggcacacaggctgtgtcaacaccctgcatttcaatcaacggggtacctggctcgcatccggcagtgacgacctgaaagttgtcgtgtgggattgggttcgaaggcaaccagtattagattttgaatctgggcacaaatctaatgtgttccaagctaagtttttgccaaactctggggattcaaccctggcaatgtgtgcaagagacggacaggttcgcgtggcagagctatcagctacccagtgctgtaaaaacacgaaacgtgtcgcgcaacacaaaggtgcgtcccataaactagccttagaacctgactcaccttgcaccttcctgtctgcgggtgaggatgccgtcgtgtttacaatcgatctcaggcaggacaggcccgcaagcaagctagtagtcactaaggaaaaagagaaaaaggtgggcttatacacaatttatgtgaatcctgccaatacccatcagtttgcggtaggtggtcgagaccagtttgtccgaatctacgatcagcgaaaaatagacgaaaacgagaataatggagtactaaagaaattctgtccacatcacctggtgaacagcgagtccaaggctaacattacgtgcttggtgtactcacatgatggaactgagctgctggcctcttacaacgatgaagatatctacctgtttaattcctcacactccgacggggctcagtatgtaaagcgatacaaggggcaccgcaacaacgctaccgtgaaaggtgtaaacttttatggacctaagtctgagtttgtagtgtcgggctcagattgcggccatatttttctctgggagaagagttcctgtcagatcattcagtttatggagggagataaaggtggagtagtgaattgtctggaacctcaccctcacctgcccgtgctggcaacatcgggcttagaccatgacgtgaaaatttgggcacctactgccgaagcgtcaactgagctgactggtctgaaagatgtgatcaagaagaacaaacgagaacgggatgaggatagcctgcaccagactgacctgttcgactcgcatatgctgtggtttttgatgcaccacctgcgacaaagacggcaccacaggcgttggcgtgaacctggcgtaggtgccaccgacgccgactcagatgagagcccatctagctccgacacttccgatgaagaggaagggccagatcgcgtgcagtgtatgcctagttag

SEQ ID NO: 188065 - DNA, 2256 bp, Artificial Sequence
  derived and/or modified sequence
atgagcgaggaggagctgaccaaggccatggagggcctgggcatggacgaaggagatggtgagggtaacatcctcccaatcatgcagtccataatgcaaaatctattaagtaaagatgtgttataccccagcttaaaggaaataactgagaaatacccagagtggcttcagtcacaccgggaatccctcccaccagagcagtttgaaaaataccaagagcagcatagcgttatgtgtaaaatatgcgagcaatttgaggcagagacccctaccgactccgagacgacacagaaagcaaggttcgagatggtccttgacctaatgcagcagctgcaagatcttggacaccctcctaaagaattagcaggagagatgctcacgtggttgtttttctgcgggagccagtgggtttatgggccgtggctgacttacgtgggttggcttcagcaaaccagtttcaagatgagtagtaagggtagctcaaccgacggacgcaccgatctggcaaatggatccttgtccagctctcctgaagaaatgtcgggggccgaggaaggtcgcgaaacctcttctgggatcgaggttgaagcatcagatttgagtctcagcctgacaggcgacgacggagggccaaatcggacgtctactgaatcacgtggaaccgataccgagagctcaggagaggacaaagactcagattccatggaagatacaggccattattcgattaatgacgagaaccgagtccatgatcgcagcgaagaagaagaagaagaggaggaggaggaagaggaggagcagcctaggagaagagtccaacgtaaacgtgctaatcgggaccaggacagtagtgacgatgagcgagccttagaggattgggtgtcctctgagacctcagcactacctcgcccacgctggcaggcgctgcccgcgctgcgggagcgcgaactgggatcttcagcaaggtttgtatatgaggcttgtggcgcgcgcgtcttcgtccagaggtttaggctgcaacatggactggaaggacacacgggttgcgtcaatactttacacttcaaccagagagggacatggttggcaagcgggtcagatgatctgaaggtcgttgtgtgggactgggtgagaagacagcccgtcttggattttgagtccggacataaaagcaatgtgttccaagctaagttcttaccaaattcaggggattctaccctagcaatgtgcgcccgagacggccaagttcgggtggcagaacttagcgccacgcagtgctgtaagaacactaaacgcgtggctcaacacaaaggtgcctcgcataaactggctttagagcctgattccccgtgtacattcttgagcgctggagaagatgcagttgttttcacaatcgacttgcggcaggacaggcctgccagcaagctagttgtgaccaaggaaaaggaaaaaaaggtcggactttacaccatttatgtgaaccctgccaacactcaccagttcgcggtgggaggacgggatcagttcgtgcgtatctatgaccaaaggaaaatcgacgaaaatgagaacaatggggttctgaaaaagttttgtcctcatcacctagttaacagtgaatctaaagctaacatcacatgcctcgtctattcccatgacgggactgagctgcttgccagctacaacgatgaggacatctatctgttcaattcatcccacagcgacggcgcgcaatacgtgaagaggtacaaaggccaccggaataacgctacagtcaagggggtgaatttctacgggcctaaatccgaattcgtggtgtctggttcagactgtggacacatatttttatgggagaagagtagctgtcaaattatccagtttatggagggggacaagggtggcgtagtgaattgtctggagccacatccacacttgcctgttctcgccactagcggcctggaccatgatgttaaaatctgggccccaaccgctgaggcatccacagagctcactgggctgaaggatgtcattaagaagaataagagagaaagggatgaggactcactccatcagactgatctgtttgacagtcacatgctttggttccttatgcaccatctgcgacagcgccgccaccaccgccggtggcgtgagcccggcgtgggagccacagacgcagattccgatgagtcaccctccagttccgacacctcagatgaggaagagggccccgaccgggtgcagtgcatgccgagttag

SEQ ID NO: 188066 - DNA, 1794 bp, Artificial Sequence
  derived and/or modified sequence
atgtcaagcaaagggagttctacagacgggagaaccgatctggcaaacggcagtctttcttcatctcctgaggaaatgtcaggcgcagaggaaggcagggaaacaagctccgggattgaggtagaagccagtgacctcagcctgtctctgactggagacgacggcggtcctaatcgaacaagcacagagtctcgaggcacagacaccgagtcttctggagaggacaaagatagtgattctatggaggacacaggccattacagcatcaatgatgagaacagagtgcatgataggtctgaggaagaagaggaagaagaggaggaagaggaggaagagcaaccacggcgtagggtgcagcggaagcgtgccaacagagaccaggactcgtctgacgatgagagagcactggaagattgggtctccagcgaaaccagcgctttacctagaccaaggtggcaggctcttccagcactgcgtgagcgggagctgggcagctccgctagattcgtgtacgaagcatgtggcgcacgcgtctttgtgcagaggtttcggcttcaacatggattggaaggtcatacgggatgcgtgaataccctgcatttcaatcagcgtggcacatggctggcctccggctctgacgatctgaaggtcgtagtttgggactgggtacggaggcagcctgtactggatttcgaatctggacacaaatcaaacgttttccaggcaaagttcctcccaaactccggggactcaaccttagcaatgtgcgctcgagacggacaggtgcgcgttgccgagctatcagctacgcaatgctgcaaaaataccaaaagagtagcacaacataaaggcgcaagtcacaagttggctctggaacctgactccccctgtaccttcctatccgcaggggaggacgccgtggtgttcacaattgacctgaggcaggatcgacccgctagcaagcttgtagtaacaaaggaaaaggagaagaaggtgggtttatacaccatctacgtcaaccccgcaaacacgcatcagttcgctgttggcggtcgagaccagtttgtccgcatttatgaccagcgtaagatagacgagaatgagaataatggagtactgaagaaattctgtcctcaccacttggtgaattctgagagcaaagctaacattacctgtttggtgtacagccatgatggcacggaactgttggcaagctacaacgacgaggatatttatctcttcaactcctctcacagcgatggtgcacaatacgttaaaagatataaaggccaccggaacaatgccacggtgaaaggcgtgaacttctacggcccaaagtccgaatttgtagtgtccgggagcgactgtggccatattttcctgtgggagaaaagcagttgccaaatcatacagttcatggagggagataaggggggtgttgtgaactgtcttgaaccccacccccacctcccagtactggccacgtctggccttgaccacgatgtcaaaatctgggccccaacggccgaggcttcaaccgagcttactggtcttaaagacgtgattaaaaaaaacaagcgcgaaagggatgaagatagcttgcaccagaccgatctgttcgactcacacatgctgtggttccttatgcatcacctgcgacagcgaagacatcaccggcgatggcgagaacctggcgtcggggcaaccgacgccgattcagatgagagcccctccagctctgacacttccgacgaagaagaggggcctgaccgcgtgcaatgcatgccatcctag

SEQ ID NO: 188067 - DNA, 439 bp, Artificial Sequence
  derived and/or modified sequence
gctgggcctggaacagtcggagcagccgctagcagaaggatgacccaagacgggaagcgggctgctgagcctcgccgattcccgtgcttgtaactgccccagccggacaccccccctcccttgacctacccggtctgtgtctcgttccggctcggcctgcgccccccctcgcttcccagccggtttcccctaaggatgggcctgacccgtatcccaagctcttagcgctcaggtcttttccttccgccgacccgaagtcatcgctgggagtactggttgccctttcctcaggctggctacagcaaacatcattcaagatgtccagcaaagggagcagcacagatggcagaacagacttagctaatggaagcctgtctagcagtccagaggagatgtctggagctgaagaggggagggagacatcctcaggcattgaagt

SEQ ID NO: 188068 - DNA, 1794 bp, Artificial Sequence
  derived and/or modified sequence
atgtcaagcaaagggtcctccacagacgggaggaccgacttggcaaacgggtcactttcaagctccccagaggaaatgtctggcgcagaggaaggcagggaaacttcatctggaatcgaggttgaagcctcggatttaagccttagcttgaccggagatgatggcggaccgaaccggacctccaccgaatcccgtgggacagacacagagagcagtggcgaggacaaggattcggattcaatggaagatacgggacactacagtatcaacgatgaaaatagggtgcatgatagaagcgaggaggaggaagaggaagaagaggaggaggaggaggagcagccacgacgaagggtccaaaggaaaagagccaatagagatcaggattctagtgacgacgagcgggctctggaggactgggtatccagtgaaacctccgcccttcccaggccacgatggcaggcacttccggcactgagagaaagggaactcgggagcagcgctcggtttgtgtacgaagcgtgtggggcacgagtatttgtacagagatttagattacagcatgggctggagggtcacaccggctgcgtaaacaccctgcattttaaccagcggggaacatggctggcttctggttcagatgatctgaaggtagtagtgtgggactgggtccgtcgccagccagtcctggactttgagtcaggccataaatcgaacgtgtttcaggctaagtttcttccaaacagcggcgactccacattggcaatgtgcgcaagggacgggcaggtccgcgtcgcagaacttagtgcaacccagtgttgtaaaaatactaagagggtagcccagcataagggagcctcacataaactggctctggagccggattctccctgtactttcctctctgcaggggaggatgccgtggtattcacaatagatctgaggcaggatcggcctgcctctaaattggttgtgaccaaggagaaagagaagaaagtgggtctttacacaatctatgtgaaccccgcaaatactcaccagttcgccgtgggagggagagaccaatttgtaagaatttatgatcagcgcaagatcgatgagaatgagaataacggggtccttaagaagttttgcccccatcatctggtcaattcagagagcaaggccaacattacttgtctcgtgtacagccacgatggaactgagttacttgcctcctacaacgacgaagacatctatctcttcaactcctcccattcagatggcgctcagtacgtaaagagatataagggccaccgcaacaacgccactgtgaaaggagtgaacttctatggacccaagtctgaattcgtggtctctggaagcgactgtggccacattttcctgtgggaaaagagctcctgccagattattcagtttatggagggagacaaggggggagttgtaaattgccttgagccccaccctcacctcccggtactcgcgaccagcggactggaccatgacgtgaagatttgggcgccaaccgctgaggcctcaactgagctgacgggtctgaaggacgtcatcaagaagaacaagcgggagagggacgaagattctctgcatcagaccgacctgttcgactctcacatgctgtggttcctgatgcaccatctgagacagcggagacaccatcggaggtggcgagagccaggcgtgggcgctaccgacgccgattccgacgagagccctagcagcagtgatacgagcgacgaggaagaaggacccgatcgcgtccagtgcatgccttcttag

SEQ ID NO: 188069 - DNA, 1794 bp, Artificial Sequence
  derived and/or modified sequence
atgtcttctaaaggatcatctacagacggtaggaccgatctggcaaacggttcgctttcttctagtcccgaagaaatgtccggggcagaagaaggacgggagacctccagcggcatcgaggtcgaggccagtgacctttccctttcgctgaccggagatgatggcggtcccaacaggacaagtaccgagagccgtggaactgacaccgaatcctctggagaagataaagacagcgattccatggaagatactggccattatagcatcaacgatgaaaaccgggtgcacgatcgatctgaggaggaggaagaggaagaagaggaggaggaggaagaacaacctcgtcgcagagttcagcgaaaacgtgctaatcgagatcaagattccagcgacgatgagagagcattggaggattgggtctcctcagagacttccgccctgccacggccaaggtggcaggcactgccagctctcagagagcgtgagctaggtagttcagctcgtttcgtgtacgaagcatgcggagcacgagtgtttgtacagcgctttcggttacagcacggactggagggtcacacaggctgcgtcaatactctacacttcaatcagcgcggtacctggttagcgagtggatctgacgatttgaaggtggtggtatgggactgggtccggaggcagcctgtgctggacttcgagagcggacataagtccaacgtgtttcaggcgaaatttcttcccaactctggagactcgacattggctatgtgcgcacgggatgggcaagtgcgcgtggctgagctgtctgccactcaatgttgtaagaacaccaaacgggtggcacagcacaaaggagcgtcccacaagctggccctagagcccgactcgccctgtacattcctgagcgcgggtgaagacgcggtggtatttactatagacctgcggcaggaccgtccagcttccaagcttgtggtaaccaaggaaaaggaaaagaaagtaggtttatacacaatctatgtcaaccctgccaacacccatcagttcgcagtcgggggtagggatcagttcgtgcgtatctacgatcaaaggaagatcgatgagaatgaaaataacggagtgctgaagaagttctgcccacatcatttggtgaacagtgagtcaaaggccaacattacatgcctcgtttatagccacgacggaaccgaactgcttgctagctataacgacgaagatatttaccttttcaatagctctcattctgatggcgcacagtacgtcaaaagatacaaagggcacaggaataatgctacagtgaagggcgtgaatttctatggacccaaatctgaatttgttgttagcggatccgattgcgggcatatattcctctgggagaaatctagttgtcagataatccagtttatggagggtgataagggaggggtcgtgaactgtttagagccccatcctcatctgcccgtgctggcaaccagcggccttgaccacgacgtgaagatctgggcccctaccgctgaagcctctaccgagctgacaggactcaaagacgttataaagaagaataaaagggagcgtgacgaggacagcttgcatcaaacagaccttttcgacagccatatgttgtggttcttaatgcaccatctgagacaacggaggcatcacaggagatggcgtgagcccggagtgggcgctacggacgctgatagtgacgagtcacccagctctagcgatacctctgacgaggaagaggggccagatcgtgttcagtgtatgccctcatag

SEQ ID NO: 188070 - DNA, 321 bp, Artificial Sequence
  derived and/or modified sequence
atgtcttccaagggaagttccacagacggccgtactgatttggctaatggctctctgtcatcttcccctgaggagatgagcggggcagaagagggccgtgagacgagttctgggatcgaagtggaagccagcgacctcagcctcagcctcaccggcgatgatgggggacctaaccgcacgagcactgaaagcaggggcacagacactgagtcttccggcgaggataaggatagtgactctatggaagatactggacactattccatcaacgacgaaaatcgggtacacgaccgatcagaggaggaggaggaggaggaatag

SEQ ID NO: 188071 - DNA, 126 bp, Artificial Sequence
  derived and/or modified sequence
atgtccagcaagggcagttcaacagatggcagaactgatctggccaatggtagtctgtctagttctcccgaagagatgagcggcgcagaggagggaagagaaacaagttctggaattgaggtttag

SEQ ID NO: 188072 - DNA, 330 bp, Artificial Sequence
  derived and/or modified sequence
atgtctagtaaggggtcttcgaccgacggccgaacggacctggccaatgggagcctctcctctagtccagaggagatgtcaggcgctgaggaaggcagggagacgtcttctggtatcgaggttgaggcttctgacctttcattgagcctgacgggagacgacggcggacccaaccgcacgagcacggaaagcaggggcaccgataccgagagtagtggtgaggataaagattctgatagcatggaggacaccggacactacagcattaacgacgaaaatagggtacacgaccgatcagaagaggaagaagaagaggaggaagaggaatag

SEQ ID NO: 188073 - DNA, 639 bp, Artificial Sequence
  derived and/or modified sequence
atgtcatccaagggatcctccaccgacggcaggactgacctcgctaatggctcccttagcagcagccccgaggagatgagcggcgctgaagaaggccgagaaacctcaagcgggatagaggtggaggccagcgacctgtcgctgtccctcaccggcgatgacggcggaccaaacaggacttctacggagtccagaggcactgataccgaatcgtccggtgaagataaagatagcgactctatggaagatactggtcattattcgattaacgacgaaaatcgtgtgcatgaccgcagcgaagaagaagaagaagaagaggaggaggaagaggaggaacagcctcgcagaagagttcagagaaaaagggccaatcgggatcaggattcttccgatgatgaacgtgctctagaggattgggtctcttctgagacatccgcattgccccgtccacgatggcaggccttgcccgctttacgagaacgggagttagggtctagcgctcggtttgtctatgaagcgtgtggcgcaagggtattcgtgcagcgattccggctgcagcatgggctcgaaggacataccggatgtgtaaacaccctccactttaatcaacgtggcacatggctagcctcaggaagctag

SEQ ID NO: 188074 - DNA, 1737 bp, Artificial Sequence
  derived and/or modified sequence
atgagtagcaagggatcttccaccgacggccgaacagaccttgcaaatggcagtctgagtagcagccccgaggagatgtcgggcgcagaagagggtagagagaccagttcaggcattgaggtggaagcttccgacctctcattgtccttgaccggtgacgacgggggacctaacagaacgagcatggaggatactggacactattctattaacgatgaaaaccgcgtacatgataggtccgaggaggaggaagaagaagaggaggaagaggaagaagaacaacccaggagacgtgttcagcgaaagagagcgaaccgggatcaggactccagtgatgacgagcgggctctcgaggactgggtgtctagcgagactagcgcgcttccgcgaccacgatggcaagccttgccggcattaagggagagggagctagggagctccgctaggtttgtgtacgaggcctgtggcgcacgtgtcttcgtgcagcgctttcgactgcagcacgggttagaaggacacacagggtgcgtaaacaccttacacttcaatcagagagggacatggctcgcatctggcagcgatgatctgaaagtggtggtttgggattgggtgagacgtcaacccgtgctggatttcgagtcagggcacaagtccaatgtgttccaggccaagttcctgcctaacagtggggactccacacttgcgatgtgtgccagagatgggcaagtgcgagtcgccgagctcagcgcgacacagtgttgtaaaaatactaagcgagtggcccagcataagggcgcttcacacaagctggcactggaaccggactccccatgtacctttctatcagccggtgaggatgctgtggttttcaccatcgaccttcggcaagatcgccctgctagcaagctggtcgtgactaaagaaaaggagaagaaagttggcctgtatacaatttatgtcaatcctgcaaacacccatcagttcgccgtgggtgggcgagaccaatttgtgcgaatctacgatcagcggaagatcgacgagaacgagaacaatggagtactcaaaaagttctgcccacaccacctggtcaactctgaaagtaaagctaatattacctgtctcgtctatagccatgatggcaccgagctgctcgcatcctacaatgatgaggacatttatttgtttaatagctctcatagtgatggtgcacaatacgtcaagcggtataagggacaccgcaacaatgccacagttaagggtgtgaacttctacggaccaaagagcgaatttgtagtttccggttccgattgtgggcatatcttcctgtgggaaaagtccagctgccagattatccaatttatggagggagacaaaggaggcgttgtgaattgcctggaaccacacccgcacctgcccgtactcgcaacctcgggacttgaccatgatgttaagatctgggctccaactgctgaagcctcaactgagcttacaggcctgaaagatgtcattaaaaaaaacaagcgagagcgggacgaggacagcctgcatcaaacagatttgtttgacagccatatgctgtggtttctgatgcatcatctacggcagcggagacaccaccgcaggtggagggagccgggtgtaggggctactgacgcagatagcgacgagagcccatctagctctgataccagtgatgaggaggagggacctgatcgcgtgcagtgcatgcccagttag

SEQ ID NO: 188075 - DNA, 2256 bp, Artificial Sequence
  derived and/or modified sequence
atgtccgaggaggagctgaccaaagccatggaaggcctcggaatggacgaaggggatggagagggaaacatcctccctattatgcaaagcattatgcaaaatctgctctccaaagacgtcctttaccctagcctaaaagagattactgagaagtacccagaatggctgcaaagccatcgggagtcgctgccccctgaacaattcgagaagtatcaagaacagcattccgtcatgtgcaaaatctgtgaacagttcgaggccgagacacccacagattcagaaacgactcagaaggccagatttgagatggtcctggatttaatgcaacagttgcaggacctggggcacccaccaaaggaactcgcgggagagatgctgacctggctgttcttctgcggatcccaatgggtatacggaccgtggctaacatatgtcggctggctccagcagacatctttcaaaatgagtagcaaggggtcaagcaccgatggacggacggacctggctaatggctccctttctagtagcccagaagaaatgagtggggcagaggaaggacgggaaacttcgtcagggattgaggtggaggcaagcgatctgtctttaagcctgacgggcgatgatgggggtcccaaccgcacttctacagaaagcaggggcaccgatacagaaagctctggtgaggacaaagatagcgacagcatggaggacacaggtcattactcaatcaacgatgaaaacagagtacacgacaggagtgaagaagaagaggaagaggaagaagaggaagaagaagagcagccaaggcgacgagtacagaggaaacgcgcaaatagagatcaggactcctctgacgacgaacgcgctctggaggactgggtgagctctgagacatcagccctaccccgaccccgttggcaggcccttcccgctctgagagagcgggaattaggttcgtccgccagattcgtatatgaagcgtgcggcgctagggttttcgtgcagaggttccgactgcagcacgggctggaagggcacacaggctgcgtgaacacacttcatttcaatcagagaggaacttggttggcaagtggcagcgatgatttaaaggtcgtcgtttgggattgggtgaggcgtcagccggtgctggactttgagagcggtcacaagagtaatgtctttcaagcaaagtttttgccaaactccggggacagtaccttggccatgtgtgctcgggatgggcaggttagggtcgccgagctgagcgctacacagtgctgcaagaacactaagagggtcgcccaacacaagggtgcctcccacaaacttgcattggagcctgacagtccctgcacgttcctgtctgctggcgaagatgccgtggtcttcacaatcgacctccggcaggatcgaccggcttccaagctggtggtgaccaaagaaaaagaaaaaaaagtgggcttgtataccatctacgtcaatcctgccaacactcaccagttcgccgtcgggggaagggaccaattcgtacgcatctatgatcagcgcaagatcgatgaaaacgaaaataatggcgttttaaagaagttttgcccacatcatctggtgaatagcgaatctaaagctaacataacatgcctggtgtattcgcacgacggaaccgagctgctcgcatcctataacgatgaggatatatacttgttcaattcctcccactctgacggggctcagtacgtgaagcgctacaagggccacagaaacaatgccacagtgaaaggggtaaatttttacggccctaaatcagaattcgtcgtcagtggcagcgactgcggacacattttcttatgggagaagtcttcttgccaaatcatccagttcatggagggcgacaaggggggtgtggtgaattgcctagagcctcaccctcacctgccagtgctcgctacgagcggcctcgaccacgatgtgaagatttgggcccctacagccgaagcatctacagaattaacagggcttaaggacgtgattaagaagaacaagcgcgaaagggatgaagattccctccaccagaccgatctgttcgactctcacatgctgtggttcctcatgcaccacctccgacaaaggcgacatcatcgaaggtggcgtgaacccggagtgggcgcaaccgacgccgactcggatgaatctccttccagtagcgacacctccgacgaggaagaaggcccagaccgtgtgcagtgcatgcccagctag

SEQ ID NO: 188076 - DNA, 2256 bp, Artificial Sequence
  derived and/or modified sequence
atgtccgaggaagagctgacgaaggcgatggagggcctggggatggatgagggtgacggagagggaaatattctacccattatgcagtccatcatgcaaaatctgctttcaaaagacgttctctacccttctctcaaagagattactgaaaaatatcctgaatggctgcagagtcaccgtgaatcactgccaccagaacaatttgagaaatatcaggagcagcactcagtcatgtgcaaaatctgcgagcagttcgaggctgagacaccaaccgacagcgagaccactcagaaggcccgattcgagatggtcctcgacctcatgcaacagctgcaagatctgggacatccgcctaaggagctagcaggggagatgcttacttggctctttttctgtggatcccagtgggtctacggaccctggctgacctatgttggctggctgcaacagacctctttcaagatgtcttccaaggggtcaagtaccgatggtagaaccgacctggccaatggaagtctgtctagctcacccgaagaaatgtccggggctgaagaaggtcgggagacgtcctctggaatcgaagtggaagcctcagatctttctctttcattgacaggcgacgatgggggacctaaccgcaccagcacggaaagcagaggcactgacaccgagagtagtggggaggacaaggattcagatagcatggaagataccggccactatagcattaacgatgagaatcgggtccatgaccgttcagaagaggaagaagaggaggaagaagaggaggaggaggagcagccacggagaagagttcagcgtaaacgggctaacagagaccaggattcctcagacgatgaacgcgcattagaagactgggtgagctctgaaaccagtgccctgccacggcctcggtggcaagccctgcctgctctgagggagcgggaactcgggtcatccgctcgattcgtgtatgaggcatgcggcgctcgggtgtttgtgcaacgcttccgcttgcagcacggcctggaaggacataccggttgtgtgaacactcttcatttcaatcagcgtggcacttggctcgccagcgggtctgatgacttgaaagtggttgtatgggactgggtcaggaggcagcctgtgctggattttgagagcggacacaaatccaatgtcttccaggccaagtttctgcccaattccggcgattcaacccttgcaatgtgcgcgagagatggccaggtaagagtggctgaactctctgcaacccagtgttgcaagaacactaagagagttgcacagcataaaggggcttctcacaagcttgccctcgaaccggattcaccgtgtacatttctctcagccggtgaggacgcagtcgttttcacaatcgatttgagacaggatcgccctgctagtaagctcgtagtgacgaaagagaaggagaagaaggtcgggttatacaccatctacgttaaccctgcaaatactcatcagtttgcagtgggcggaagggatcagtttgttcggatctatgatcagcgcaaaatcgatgagaacgaaaataacggggtgctaaaaaaattttgcccacatcatctggtgaacagcgagtctaaggccaatatcacctgcctggtgtactcccacgacggaactgagctcctggcgtcgtataatgacgaagacatctacttatttaatagctctcacagtgatggggctcaatacgtgaagaggtacaaaggacaccggaataatgctaccgttaagggggtcaatttttatggccctaagtccgaatttgtagtgagcggctccgactgcggccacatctttttgtgggagaagagttcttgtcaaattatccagtttatggagggagataaaggtggggtcgttaattgtcttgaaccgcatccacacctcccggtgcttgcaacaagcggtctggaccacgacgttaagatttgggcgcctacggccgaggccagtactgagctcactggactgaaggatgtaataaaaaaaaataaaagggagcgtgacgaagacagcctgcatcagaccgacctgttcgacagtcacatgctgtggttcttgatgcaccacttacgacagcggcgacaccatcgaaggtggcgtgaacctggagtgggcgcaacggacgccgacagcgatgagtctccttcctctagtgatacctccgacgaagaagagggtccggatcgcgtgcaatgtatgcccagttag

SEQ ID NO: 188077 - DNA, 501 bp, Artificial Sequence
  derived and/or modified sequence
gcaaacggggccggaaagcgtggcagcgcaggcgcaagcgcagagagcggaggcggtggtggtggcggccgctggccagttgaatctacagacctattttctcaggagctcagcctggccttacttcagtgataaaaggaggaaaggctggctacagcaaacatcattcaagatgtccagcaaagggagcagcacagatggcagaacagacttagctaatggaagcctgtctagcagtccagaggagatgtctggagctgaagaggggagggagacatcctcaggcattgaagtggaggcctcagacctgagtttgagcttgactggggatgatggtggccccaaccgcaccagcacagaaagtcgaggcacagacacagagagctcaggtgaagataaggactctgacagcatggaggacactggtcattactccattaatgatgaaaatcgagtccatgaccgctcagaggaagaggaagaggaggaagaagaggagga

SEQ ID NO: 188078 - DNA, 728 bp, Artificial Sequence
  derived and/or modified sequence
aaagcgtggcagcgcaggcgcaagcgcagagagcggaggcggtggtggtggcggccgctggccagtgctggctacagcaaacatcattcaagatgtccagcaaagggagcagcacagatggcagaacagacttagctaatggaagcctgtctagcagtccagaggagatgtctggagctgaagaggggagggagacatcctcaggcattgaagtggaggcctcagacctgagtttgagcttgactggggatgatggtggccccaaccgcaccagcacagaaagtcgaggcacagacacagagagctcaggtgaagataaggactctgacagcatggaggacactggtcattactccattaatgatgaaaatcgagtccatgaccgctcagaggaagaggaagaggaggaagaagaggaggaagaagagcagcctcggcgccgtgtacagcgcaagcgggctaaccgtgaccaggactcatcagatgatgagcgggccctagaggactgggtgtcctcagaaacatcagctctaccccgacctcgctggcaagccctccctgcccttcgggagcgggagctgggttcaagtgcccgctttgtctatgaggcctgtggggcaagagtctttgtgcagcgtttccgcctgcagcatgggcttgagggccatactggttgtgtcaataccctgcactttaaccagcgcggcacctggctggccagtggcagc

SEQ ID NO: 188079 - DNA, 1991 bp, Artificial Sequence
  derived and/or modified sequence
agagcggaggcggtggtggtggcggccgctggccagttccttcagtgaatctacagacctattttctcaggagctcagcctggccttacttcagtgataaaaggaggaaaggctggctacagcaaacatcattcaagatgtccagcaaagggagcagcacagatggcagaacagacttagctaatggaagcctgtctagcagtccagaggagatgtctggagctgaagaggggagggagacatcctcaggcattgaagtggaggcctcagacctgagtttgagcttgactggggatgatggtggccccaaccgcaccagcatggaggacactggtcattactccattaatgatgaaaatcgagtccatgaccgctcagaggaagaggaagaggaggaagaagaggaggaagaagagcagcctcggcgccgtgtacagcgcaagcgggctaaccgtgaccaggactcatcagatgatgagcgggccctagaggactgggtgtcctcagaaacatcagctctaccccgacctcgctggcaagccctccctgcccttcgggagcgggagctgggttcaagtgcccgctttgtctatgaggcctgtggggcaagagtctttgtgcagcgtttccgcctgcagcatgggcttgagggccatactggttgtgtcaataccctgcactttaaccagcgcggcacctggctggccagtggcagcgatgacctgaaggtggtggtgtgggattgggtacggcggcagccagtactggactttgagagtggccacaaaagtaatgtgttccaggccaagtttcttcctaacagtggtgattctactctggccatgtgtgcccgtgacgggcaggttcgagtagcagaactgtctgccacacagtgttgcaagaatacaaaacgtgtggcccagcacaagggagcgtcccacaagttggcactggaaccagactctccctgtacgttcttatctgcaggtgaagatgcagttgttttcaccattgacctgagacaagaccgcccagcgtcgaaactggtggtgacaaaagagaaagagaagaaagtggggctgtatacgatctatgtgaatcctgccaatacccaccagtttgcagtgggtggacgagatcagtttgtaaggatttatgaccagaggaaaattgatgagaatgagaacaatggagtactcaagaagttctgtcctcatcacctggtgaacagtgagtccaaagcaaacatcacctgtcttgtgtacagccacgacggcacagagctcctggccagttacaatgatgaagacatttacctcttcaactcctctcacagtgatggggcccagtatgttaagagatacaagggccacagaaataatgccacagtaaaaggcgtcaatttctatggccccaagagtgagtttgtggtgagcggtagtgactgtgggcacatcttcctctgggagaaatcatcctgccagattattcagttcatggagggggacaagggaggcgtggtaaactgtcttgagccccaccctcacctgcctgtgctggcaaccagtggcctagaccatgatgtgaagatctgggcacccacagctgaagcttccactgagctgacagggttaaaagatgtgattaagaagaacaagcgggagcgggatgaagatagcttgcaccaaactgacctgtttgatagtcacatgctgtggttccttatgcatcacctgagacagagacgccatcaccggcgctggcgagaacctggggttggggccacagacgcggactctgatgagtctcccagctcctcagacacatcggacgaggaggagggccctgaccgggtgcagtgcatgccatcttgaggcctcatacctaggtggggcaggctggggctgccaacctgatcctgcctgggcaaccctttcctgtcccaggccctacattcagcagaaacgcactttggactttttgctttagat

SEQ ID NO: 188080 - DNA, 2635 bp, Artificial Sequence
  derived and/or modified sequence
agcaagatggccgccgctgaggaaggctgtagtgtcggggccgaagcggacagggaattggaggagcttctggaaagatgccctcttcgcttcccaagagaagtttttccaggaactattcgacagtgaactggcttcccaagccactgcggagttcgagaaggcaatgaaggagttggctgaggaagaaccccacctggtggagcagttccaaaagctctcagaggctgcagggagagtggaactccagcatgtcggaagaagagctgaccaaggccatggaggggctaggcatggacgaaggggatggggaagggaacatcctccccatcatgcagagtattatgcagaacctactctccaaggatgtgctgtacccatcactgaaggagatcacagaaaagtatccagaatggttgcagagtcatcgggaatctctacctccagagcagtttgaaaaatatcaggagcagcacagcgtcatgtgcaaaatatgtgagcagtttgaggcagagacccccacagacagtgaaaccactcaaaaggctcgttttgagatggtgctggatcttatgcagcagctacaagatttaggccatcctccaaaagagctggctggagagatgctgacgtggctttttttctgtggctcccagtgggtctacggaccttggctgacatatgttggctggctacagcaaacatcattcaagatgtccagcaaagggagcagcacagatggcagaacagacttagctaatggaagcctgtctagcagtccagaggagatgtctggagctgaagaggggagggagacatcctcaggcattgaagtggaggcctcagacctgagtttgagcttgactggggatgatggtggccccaaccgcaccagcacagaaagtcgaggcacagacacagagagctcaggtgaagataaggactctgacagcatggaggacactggtcattactccattaatgatgaaaatcgagtccatgaccgctcagaggaagaggaagaggaggaagaagaggaggaagaagagcagcctcggcgccgtgtacagcgcaagcgggctaaccgtgaccaggactcatcagatgatgagcgggccctagaggactgggtgtcctcagaaacatcagctctaccccgacctcgctggcaagccctccctgcccttcgggagcgggagctgggttcaagtgcccgctttgtctatgaggcctgtggggcaagagtctttgtgcagcgtttccgcctgcagcatgggcttgagggccatactggttgtgtcaataccctgcactttaaccagcgcggcacctggctggccagtggcagcgatgacctgaaggtggtggtgtgggattgggtacggcggcagccagtactggactttgagagtggccacaaaagtaatgtgttccaggccaagtttcttcctaacagtggtgattctactctggccatgtgtgcccgtgacgggcaggttcgagtagcagaactgtctgccacacagtgttgcaagaatacaaaacgtgtggcccagcacaagggagcgtcccacaagttggcactggaaccagactctccctgtacgttcttatctgcaggtgaagatgcagttgttttcaccattgacctgagacaagaccgcccagcgtcgaaactggtggtgacaaaagagaaagagaagaaagtggggctgtatacgatctatgtgaatcctgccaatacccaccagtttgcagtgggtggacgagatcagtttgtaaggatttatgaccagaggaaaattgatgagaatgagaacaatggagtactcaagaagttctgtcctcatcacctggtgaacagtgagtccaaagcaaacatcacctgtcttgtgtacagccacgacggcacagagctcctggccagttacaatgatgaagacatttacctcttcaactcctctcacagtgatggggcccagtatgttaagagatacaagggccacagaaataatgccacagtaaaaggcgtcaatttctatggccccaagagtgagtttgtggtgagcggtagtgactgtgggcacatcttcctctgggagaaatcatcctgccagattattcagttcatggagggggacaagggaggcgtggtaaactgtcttgagccccaccctcacctgcctgtgctggcaaccagtggcctagaccatgatgtgaagatctgggcacccacagctgaagcttccactgagctgacagggttaaaagatgtgattaagaagaacaagcgggagcgggatgaagatagcttgcaccaaactgacctgtttgatagtcacatgctgtggttccttatgcatcacctgagacagagacgccatcaccggcgctggcgagaacctggggttggggccacagacgcggactctgatgagtctcccagctcctcagacacatcggacgaggaggagggccctgaccgggtgcagtgcatgccatcttgaggcctcatacctaggtggggcaggctggggctgccaacctgatcctgcctgggcaaccctttcctgtcccaggccctacattcagcagaaacgcactttggactttttgctttagataaaagaaagac

SEQ ID NO: 188081 - DNA, 3972 bp, Artificial Sequence
  derived and/or modified sequence
gcggtggtggtggcggccgctggccagtgtaagatggcggcggcgttggtggtggcagtggacggggcggctgggcctggaacagtcggagcagccgctagcagaaggatgacccaagacgggaagcgggctgctgagcctcgccgattcccgtgcttgtaactgccccagccggacaccccccctcccttgacctacccgtccttcagtgaatctacagacctattttctcaggagctcagcctggccttacttcagtgataaaaggaggaaaggctggctacagcaaacatcattcaagatgtccagcaaagggagcagcacagatggcagaacagacttagctaatggaagcctgtctagcagtccagaggagatgtctggagctgaagaggggagggagacatcctcaggcattgaagtggaggcctcagacctgagtttgagcttgactggggatgatggtggccccaaccgcaccagcacagaaagtcgaggcacagacacagagagctcaggtgaagataaggactctgacagcatggaggacactggtcattactccattaatgatgaaaatcgagtccatgaccgctcagaggaagaggaagaggaggaagaagaggaggaagaagagcagcctcggcgccgtgtacagcgcaagcgggctaaccgtgaccaggactcatcagatgatgagcgggccctagaggactgggtgtcctcagaaacatcagctctaccccgacctcgctggcaagccctccctgcccttcgggagcgggagctgggttcaagtgcccgctttgtctatgaggcctgtggggcaagagtctttgtgcagcgtttccgcctgcagcatgggcttgagggccatactggttgtgtcaataccctgcactttaaccagcgcggcacctggctggccagtggcagcgatgacctgaaggtggtggtgtgggattgggtacggcggcagccagtactggactttgagagtggccacaaaagtaatgtgttccaggccaagtttcttcctaacagtggtgattctactctggccatgtgtgcccgtgacgggcaggttcgagtagcagaactgtctgccacacagtgttgcaagaatacaaaacgtgtggcccagcacaagggagcgtcccacaagttggcactggaaccagactctccctgtacgttcttatctgcaggtgaagatgcagttgttttcaccattgacctgagacaagaccgcccagcgtcgaaactggtggtgacaaaagagaaagagaagaaagtggggctgtatacgatctatgtgaatcctgccaatacccaccagtttgcagtgggtggacgagatcagtttgtaaggatttatgaccagaggaaaattgatgagaatgagaacaatggagtactcaagaagttctgtcctcatcacctggtgaacagtgagtccaaagcaaacatcacctgtcttgtgtacagccacgacggcacagagctcctggccagttacaatgatgaagacatttacctcttcaactcctctcacagtgatggggcccagtatgttaagagatacaagggccacagaaataatgccacagtaaaaggcgtcaatttctatggccccaagagtgagtttgtggtgagcggtagtgactgtgggcacatcttcctctgggagaaatcatcctgccagattattcagttcatggagggggacaagggaggcgtggtaaactgtcttgagccccaccctcacctgcctgtgctggcaaccagtggcctagaccatgatgtgaagatctgggcacccacagctgaagcttccactgagctgacagggttaaaagatgtgattaagaagaacaagcgggagcgggatgaagatagcttgcaccaaactgacctgtttgatagtcacatgctgtggttccttatgcatcacctgagacagagacgccatcaccggcgctggcgagaacctggggttggggccacagacgcggactctgatgagtctcccagctcctcagacacatcggacgaggaggagggccctgaccgggtgcagtgcatgccatcttgaggcctcatacctaggtggggcaggctggggctgccaacctgatcctgcctgggcaaccctttcctgtcccaggccctacattcagcagaaacgcactttggactttttgctttagataaaagaaagacatcccaggagaaggacaaaccagaggagtgaaccaacaaagagtacctaggaatgggagttgagccctggaatggggctctatggagaggtgcataggactcggcagaaatggcctctccccaaagcctctttttgagaggagagggaagcctattttgttaactggtttgggatagggaatggggtttctttttctttaatctcccttgtttcttgggctgggggaggggtggggggaacaactggctattcagtaccaaggggccagagtggagggtaggagtgccactctctctttggtttaggtttttgaccttttcttcctttgttttttaaaagtttatgacagttggctccccccccacccccagcaaccccatcccagaatcctattttcctgggaagtccttaaagcccctaaccatcccacactcttcactttcctttccaccttattcattctctgtacttaccacagtattttgcacttgattacatatccttcactctcttctcttcatcccatcaccccctaaataggtcaggtgagggaggctgggaagaggtgggaggaggggcagaagtgaaggaagaataggaaggatattacctcttctgttatttttttaagaaacattgtttggtggcagcaatctccctgtccctatcactgttagaggcctaattttatatctataaatatattaaaaagcaagtcaaacttggatgtatcaaggtaaaattattgtcaaagtttaaatacctatatattctctgaatgcaataaagggacttaagagtgaacaagagtaatggtgtggaagtgacacctggggtcagtttacctctgtgtatggtcactagagattgggacttaccctttaggttttaggaggcttgagaatggaaggatcctcatttctgcccttcctggttccctgctttggtgtaggggttgggaaaaacaggaaattcctctcagctctgcctcagatctcctacctctccttaagtcttgtagggggttccaaggatggctcttctaaccagaggctggcctgtctttaaaacttaactactttagggtggtgccaccactgcagactattgtggtactttgtgacagaagacatgtacacacacaccacacacatacatacacactctctcactctgtctctcttacctttagctgcttgatcattaagccatccaacttcatgccagttcccttctttatagaagagtgaagggaaagacttcctgggtttgacttaaaccttgtccacctcttgatattttaggattgaggaataagtcattaatctaaggactgattacagtggctggagcttgggcacttgtcttatcactggtcactgagtctgaaagtcccagctgaattcttgcccttaagtgcttttgctgctatttttttgcccccagttccacaagatccaaccaagaattctgtatcctgggacagtcagattcttctaaatcaggccaggaaggaggggaaaagagtgagagaatggtattcccagatacttcttcctcctgccccttttcccagcagctctgagaccagatgttggctgctgtacttactccctgaggtagggaatgtgtggtgatcgagtggtctgtgttcctattgctggtggggtgatagggtgggctaaaaaccatgcactctggaatttgttgtattttctcccagtaaagcttttcttctcccgactgct

SEQ ID NO: 188082 - DNA, 936 bp, Artificial Sequence
  derived and/or modified sequence
atggacaacgtgctgcccgtggacagcgacctgagccccaacatcagcaccaacaccagcgagcccaaccagttcgtgcagcccgcctggcagatcgtgctgtgggccgccgcctacaccgtgatcgtggtgaccagcgtggtgggcaacgtggtggtgatgtggatcatcctggcccacaagagaatgagaaccgtgaccaactacttcctggtgaacctggccttcgccgaggccagcatggccgccttcaacaccgtggtgaacttcacctacgccgtgcacaacgagtggtactacggcctgttctactgcaagttccacaacttcttccccatcgccgccgtgttcgccagcatctacagcatgaccgccgtggccttcgacagatacatggccatcatccaccccctgcagcccagactgagcgccaccgccaccaaggtggtgatctgcgtgatctgggtgctggccctgctgctggccttcccccagggctactacagcaccaccgagaccatgcccagcagagtggtgtgcatgatcgagtggcccgagcaccccaacaagatctacgagaaggtgtaccacatctgcgtgaccgtgctgatctacttcctgcccctgctggtgatcggctacgcctacaccgtggtgggcatcaccctgtgggccagcgagatccccggcgacagcagcgacagataccacgagcaggtgagcgccaagagaaaggtggtgaagatgatgatcgtggtggtgtgcaccttcgccatctgctggctgcccttccacatcttcttcctgctgccctacatcaaccccgacctgtacctgaagaagttcatccagcaggtgtacctggccatcatgtggctggccatgagcagcaccatgtacaaccccatcatctactgctgcctgaacgacagatag

SEQ ID NO: 188083 - DNA, 936 bp, Artificial Sequence
  derived and/or modified sequence
atggataatgtcctgcctgtcgactcagatctttcccctaatatttctaccaacacctcagagcccaatcagtttgtgcaacctgcatggcaaatagtgttgtgggcagcagcttacaccgtgattgtggttacttccgtggtggggaacgtggtggttatgtggatcatacttgctcacaaacgaatgcgcaccgtgaccaactactttctcgttaacctggcctttgccgaggcctccatggccgcctttaataccgtggtgaattttacctatgctgtccacaatgagtggtactacgggctgttctattgcaagttccacaatttctttccgattgctgctgtattcgctagcatttactcaatgacagctgtggctttcgatcgatacatggccattatccaccccttgcagccccggctcagcgccaccgcaaccaaagtggtaatctgtgtgatatgggtgctagccctgctgctcgcttttccccaggggtattactcaaccactgagactatgcccagccgggtggtgtgcatgattgagtggccagagcatccaaacaaaatctacgagaaggtgtaccacatttgtgtgactgtactcatttacttcttaccgctgctcgtgatagggtatgcatataccgttgtggggattaccctgtgggcctccgagattcctggggacagctctgaccgttaccacgaacaggtgtcagccaagcgtaaggtggtgaagatgatgattgtagtggtctgcacctttgctatttgttggctaccctttcacattttttttctcctgccgtacattaacccagatttgtacttgaaaaagttcattcagcaggtgtatctggccattatgtggctagccatgagctcaactatgtataatccaatcatatattgctgtttaaatgatagatag

SEQ ID NO: 188084 - DNA, 936 bp, Artificial Sequence
  derived and/or modified sequence
atggacaacgtgctgcctgtggacagcgacctgagccccaacatcagcaccaacaccagcgagcccaaccagtttgtgcagcctgcctggcagatcgtgctgtgggccgccgcctacaccgtcatcgtggtgacctctgtggtgggcaatgtggtggtgatgtggatcatcctggcccacaagaggatgaggacagtgaccaactacttcctggtgaacctggcctttgctgaggcctccatggccgccttcaacacagtggtgaacttcacctatgctgtgcacaatgagtggtactacggcctcttctactgcaagttccacaacttcttccccatcgctgctgtgtttgccagcatctacagcatgacagctgtggcctttgaccgctacatggccatcatccaccccctgcagccccggctgagcgccacagccaccaaggtggtgatctgtgtgatctgggtgctggccctgctgctggccttcccccagggctactacagcaccacagagaccatgcccagccgggtggtgtgcatgattgagtggccagagcaccccaacaagatctatgagaaggtgtaccacatctgtgtgacagtgctgatctacttcctgcccctgctggtgattggctacgcctacacagtggtgggcatcaccctgtgggccagcgagatccctggggacagcagtgaccgctaccacgagcaggtgtctgccaagaggaaggtggtgaagatgatgattgtggtggtgtgcacctttgccatctgctggctgcccttccacatcttcttcctgctgccctacatcaacccagacctgtacctgaagaagttcatccagcaggtgtacctggccatcatgtggctggccatgagcagcaccatgtacaaccccatcatctactgctgcctgaatgacagatag

SEQ ID NO: 188085 - DNA, 936 bp, Artificial Sequence
  derived and/or modified sequence
atggacaacgtgctgcccgtggacagcgacctgagccccaacatcagtactaataccagtgaaccgaatcagtttgtccaaccagcgtggcagatagtgctctgggccgctgcatataccgtgatcgtggtgacgtccgtggtgggtaatgtcgtggtaatgtggattattctggcacataagcgaatgagaacagtgaccaattacttcctcgtgaaccttgcctttgccgaggccagcatggccgcttttaacaccgtggtgaattttacatatgcagtccacaacgagtggtattatggcctgttttactgtaaatttcataatttctttcctattgccgctgtttttgcttcgatatattcaatgactgccgtggcgttcgatagatacatggcaatcatccacccgttacaaccccgcctgtccgcgaccgccactaaagtggtgatctgtgtcatctgggtgcttgctttactgttggcctttccccaaggctattattccaccacagagacaatgccaagccgagtggtgtgcatgattgagtggcccgaacatcccaacaaaatctacgaaaaagtgtatcacatttgcgtgaccgtgctcatctatttcctgcctctgctggtgatcggctacgcctatacagtcgtgggcattactctgtgggcgagcgaaattcctggggactcctcagaccgataccacgagcaggtcagcgctaagaggaaggttgtgaagatgatgattgtggtggtgtgtactttcgccatttgctggttaccctttcacatcttttttttgcttccctatatcaaccctgacctgtatttgaagaagtttattcagcaagtgtatctggctattatgtggttagcgatgtccagtacgatgtataatccaataatctactgttgcctgaacgaccgctag

SEQ ID NO: 188086 - DNA, 936 bp, Artificial Sequence
  derived and/or modified sequence
atggacaacgtacttccggtggatagcgatttatcccccaatatctcgaccaatactagcgaacccaatcagttcgtccagccagcgtggcagatagtgctctgggcagccgcttacaccgtgattgtggttacatcagtggttgggaacgtggtagtcatgtggattattctcgctcacaaaaggatgcgcaccgtaaccaactattttttggtgaaccttgcttttgccgaggcgagcatggcggctttcaacacagttgtgaatttcacctacgcagtccataacgaatggtattacgggctgttttattgtaagttccacaactttttccctatcgctgctgtattcgctagtatctacagcatgacggcggttgcctttgatagatatatggccataattcatccactgcagcctagactttcggccaccgcaacaaaagttgttatttgtgtgatatgggttctagccctgctgttagccttcccgcagggctactattctactactgagacgatgccttcaagggtggtgtgcatgatagagtggccagagcatcctaataagatatatgaaaaagtctaccacatatgcgttacggtgttgatttacttcctgcccctgctggtgatcggctatgcttataccgtggtggggattacactctgggcctcggaaatcccaggcgacagtagtgatcggtatcacgaacaagtgtctgccaaaaggaaggtcgttaagatgatgatcgtggtggtatgcactttcgccatctgctggctgccattccacattttctttctgctcccctatatcaaccctgatttgtacctgaaaaagttcatccagcaggtctacctggccattatgtggctggccatgtcaagtaccatgtacaaccctatcatctattgctgtctgaatgaccgttag

SEQ ID NO: 188087 - DNA, 1270 bp, Artificial Sequence
  derived and/or modified sequence
gaaaaagccttccaccctcctgtctggctttagaaggaccctgagccccaggcgccagccacaggactctgctgcagaggggggttgtgtacagatagtagggctttaccgcctagcttcgaaatggataacgtcctcccggtggactcagacctctccccaaacatctccactaacacctcggaacccaatcagttcgtgcaaccagcctggcaaattgtcctttgggcagctgcctacacggtcattgtggtgacctctgtggtgggcaacgtggtagtgatgtggatcatcttagcccacaaaagaatgaggacagtgacgaactattttctggtgaacctggccttcgcggaggcctccatggctgcattcaatacagtggtgaacttcacctatgctgtccacaacgaatggtactacggcctgttctactgcaagttccacaacttctttcccatcgccgctgtcttcgccagtatctactccatgacggctgtggcctttgataggtacatggccatcatacatcccctccagccccggctgtcagccacagccaccaaagtggtcatctgtgtcatctgggtcctggctctcctgctggccttcccccagggctactactcaaccacagagaccatgcccagcagagtcgtgtgcatgatcgaatggccagagcatccgaacaagatttatgagaaagtgtaccacatctgtgtgactgtgctgatctacttcctccccctgctggtgattggctatgcatacaccgtagtgggaatcacactatgggccagtgagatccccggggactcctctgaccgctaccacgagcaagtctctgccaagcgcaaggtggtcaaaatgatgattgtcgtggtgtgcaccttcgccatctgctggctgcccttccacatcttcttcctcctgccctacatcaacccagatctctacctgaagaagtttatccagcaggtctacctggccatcatgtggctggccatgagctccaccatgtacaaccccatcatctactgctgcctcaatgacaggtgaggatcccaaccccatgagctctccaggggccacaagaccatctacatacacagtggccaagcggccatcctaaatgagtaaacccagctgtgagacaagagggacaagtggggactgcagctaacttatcatcacacaactcagcctggctgattatcaccatccaggaatgggagcccggagtggactgattttctttttttcttttcca

SEQ ID NO: 188088 - protein, 302 aa, Artificial Sequence
  derived and/or modified sequence
MRAHPGGGRCCPEQEEGESAAGGSGAGGDSAIEQGGQGSALAPSPVSGVRREGARGGGRGRGRWKQAGRGGGVCGRGRGRGRGRGRGRGRGRGRGRPPSGGSGLGGDGGGCGGGGSGGGGAPRREPVPFPSGSAGPGPRGPRATESGKRMDCPALPPGWKKEEVIRKSGLSAGKSDVYYFSPSGKKFRSKPQLARYLGNTVDLSSFDFRTGKMMPSKLQKNKQRLRNDPLNQNKLRWNTHRPAPWHALSRLCLLIRCLLCLECAYPLPLHLVNSYSSKTQLHCLHLWEACPAYSRQNQSFPP

SEQ ID NO: 188089 - DNA, 909 bp, Artificial Sequence
  derived and/or modified sequence
atgagagcacatcccggaggagggcgttgctgtcccgagcaggaagagggcgaaagcgcggcaggtggatctggtgctgggggagattcagctatcgaacaagggggtcaaggatcggctctggcccctagccccgtgtctggggtcaggcgcgagggagcgagagggggaggaagggggcggggcaggtggaaacaagctggacgggggggcggagtatgcggtagaggacgcgggcgcggacggggccggggcagaggcagggggagagggcgtggaaggggtcgaccacccagcgggggctcgggtctcggtggcgatggaggaggttgtggaggcggcggctctggcggagggggagctccacgccgggagcccgtcccattcccctcaggcagcgccggacctggcccacgtggccccagagcaaccgagtccggaaaaagaatggactgcccggctcttcctcccgggtggaaaaaggaggaagttatacgcaagagtggactctctgccggcaagtctgatgtgtactacttcagcccgagcggcaaaaagttccggtcaaaaccacaactggcgcggtacctggggaacaccgtggatctgagctccttcgattttagaacaggtaagatgatgccctctaaactgcagaagaacaagcagcgactcaggaacgatcccctgaatcagaataaattgcgctggaatacacataggcccgcaccatggcatgcactgtcacgcttgtgtttattgatccggtgcctgctctgcttggaatgcgcctacccactgccgctccatctggttaattcatactcgagtaagacgcagctccactgtctgcacctctgggaggcctgccccgcatacagcaggcagaatcagagctttccaccctag

SEQ ID NO: 188090 - DNA, 909 bp, Artificial Sequence
  derived and/or modified sequence
atgcgggcccaccccgggggtggcaggtgctgccccgaacaggaggagggtgaatctgccgccggtggaagcggagctggtggggactccgctatagagcaaggtgggcaggggtcagccctagccccctctcccgtcagtggcgttcgaagagaaggcgccagaggcggaggaagggggcgcggccgctggaaacaggctggaagagggggaggggtgtgtggtcggggtagaggccgcggccgaggccgcgggcgcgggaggggaaggggcagggggaggggccgacctccatccgggggcagcggtctgggtggtgatgggggtggctgcggaggcggcggaagtgggggcgggggggcccctcggagagagcccgtcccctttccgtccggctcagccggccccggaccgcggggaccacgggctacagagtccggcaaaaggatggactgccccgctctgccccccggttggaaaaaggaagaggttatccgcaagtctggcttaagtgccgggaaaagtgacgtgtactactttagtcctagtggcaagaaatttcgtagcaagccacagctggcaaggtatttggggaatacagtagacttatctagttttgactttcgcaccggaaaaatgatgccctctaagcttcaaaaaaacaagcagcggctcagaaacgaccctctaaaccagaacaaacttaggtggaatacccaccgccccgctccatggcatgctctctcacgactttgcctgctgatccggtgtctcctgtgtctggagtgcgcataccctcttccgctgcatttagtgaatagctattccagcaagacccaactgcactgcctgcatctgtgggaagcatgtccggcctacagccggcagaatcagtcattcccaccttag

SEQ ID NO: 188091 - DNA, 909 bp, Artificial Sequence
  derived and/or modified sequence
atgagggcccaccctgggggcggccgctgctgcccagagcaggaggagggggagagcgctgctgggggcagcggggccggcggggacagcgccatcgagcagggcggccagggcagcgccctggcccccagccctgtgtctggagtgcggcgggagggcgcccggggcggcggccggggccggggccgctggaagcaggccggccggggcggcggcgtgtgtggccggggccggggccggggccggggccggggccggggccggggccggggccggggccggggccggcccccatctgggggcagcggcctgggcggagatggcggcggctgcggcggcggcggcagcggcggcggcggggccccccggcgggagcctgtgcccttccccagcggcagcgctggccctggcccccggggcccccgggccacagagagcggcaagaggatggactgcccagccctgcccccaggctggaagaaggaggaggtgatcaggaagagcggcctgtctgctgggaagagtgatgtgtactacttcagccccagcggcaagaagttccgcagcaagccccagctggcccgctacctgggcaacacagtggacctgagcagctttgacttcagaacaggcaagatgatgcccagcaagctgcagaagaacaagcagaggctgagaaatgaccccctgaaccagaacaagctgcgctggaacacccacaggcctgccccctggcacgccctgagccggctgtgcctgctgatccgctgcctgctgtgcctggagtgtgcctaccccctgcccctgcacctggtgaacagctacagcagcaagacccagctgcactgcctgcacctgtgggaggcctgcccagcctacagccggcagaaccagagcttccccccatag

SEQ ID NO: 188092 - DNA, 1357 bp, Artificial Sequence
  derived and/or modified sequence
gggggcgtggccccgagaaggcggagacaagatggccgcccatagcgcttggaggacctaagaggcggtggccggggccacgccccgggcaggagggccgctctgtgcgcgcccgctctatgatgcttgcgcgcgtcccccgcgcgccgcgctgcgggcggggcgggtctccgggattccaagggctcggttacggaagaagcgcagcgccggctggggagggggctggatgcgcgcgcacccggggggaggccgctgctgcccggagcaggaggagggggagagtgcggcgggcggcagcggcgctggcggcgactccgccatagagcaggggggccagggcagcgcgctcgccccgtccccggtgagcggcgtgcgcagggaaggcgctcggggcggcggccgtggccgggggcggtggaagcaggcgggccggggcggcggcgtctgtggccgtggccggggccggggccgtggccggggacggggacggggccggggccggggccgcggccgtcccccgagtggcggcagcggccttggcggcgacggcggcggctgcggcggcggcggcagcggtggcggcggcgccccccggcgggagccggtccctttcccgtcggggagcgcggggccggggcccaggggaccccgggccacggagagcgggaagaggatggattgcccggccctcccccccggatggaagaaggaggaagtgatccgaaaatctgggctaagtgctggcaagagcgatgtctactacttcagtccaagtggtaagaagttcagaagcaagcctcagttggcaaggtacctgggaaatactgttgatctcagcagttttgacttcagaactggaaagatgatgcctagtaaattacagaagaacaaacagagactgcgaaacgatcctctcaatcaaaataagctgcgctggaacactcatcgtcctgcaccatggcatgcgctttcaagactctgcttgctcatacgctgtttgctctgcttggaatgtgcttacccccttccccttcatctggtgaactcctactcatccaagacccagcttcattgtctccatctctgggaagcctgccctgcatactccaggcagaaccaatcctttcctccataatgcttccctggtgctttgccattgtatttgtgacttgtttgtctgcttcagctagactgtgagctccatgagggcagggaccatgtctttttttgcttttgcacacggtaggtacttaatattgctttatgtttatttgatttaccatccacctcattctagaagtgtatagtggtaataaatgtttattaaataaataaattataccgtacattattt

SEQ ID NO: 188093 - DNA, 1182 bp, Artificial Sequence
  derived and/or modified sequence
cgggattccaagggctcggttacggaagaagcgcagcgccggctggggagggggctggatgcgcgcgcacccggggggaggccgctgctgcccggagcaggaggagggggagagtgcggcgggcggcagcggcgctggcggcgactccgccatagagcaggggggccagggcagcgcgctcgccccgtccccggtgagcggcgtgcgcagggaaggcgctcggggcggcggccgtggccgggggcggtggaagcaggcgggccggggcggcggcgtctgtggccgtggccggggccggggccgtggccggggacggggacggggccggggccggggccgcggccgtcccccgagtggcggcagcggccttggcggcgacggcggcggctgcggcggcggcggcagcggtggcggcggcgccccccggcgggagccggtccctttcccgtcggggagcgcggggccggggcccaggggaccccgggccacggagagcgggaagaggatggattgcccggccctcccccccggatggaagaaggaggaagtgatccgaaaatctgggctaagtgctggcaagagcgatgtctactacttcagtccaagtggtaagaagttcagaagcaagcctcagttggcaaggtacctgggaaatactgttgatctcagcagttttgacttcagaactggaaagatgatgcctagtaaattacagaagaacaaacagagactgcgaaacgatcctctcaatcaaaataagctgcgctggaacactcatcgtcctgcaccatggcatgcgctttcaagactctgcttgctcatacgctgtttgctctgcttggaatgtgcttacccccttccccttcatctggtgaactcctactcatccaagacccagcttcattgtctccatctctgggaagcctgccctgcatactccaggcagaaccaatcctttcctccataatgcttccctggtgctttgccattgtatttgtgacttgtttgtctgcttcagctagactgtgagctccatgagggcagggaccatgtctttttttgcttttgcacacggtaggtacttaatattgctttatgtttatttgatttaccatccacctcattctagaagtgtatagtggtaataaatgtttattaaataaataaattataccgtacatt

SEQ ID NO: 188094 - DNA, 909 bp, Artificial Sequence
  derived and/or modified sequence
atgcgggcccaccccggcggcggccggtgctgccccgagcaggaggagggggagtccgctgcaggcggatctggggcaggaggcgactctgccattgagcaggggggacagggatcggctctggcaccctcgcccgtgtccggggtgaggcgcgaaggcgcacgaggcggcgggaggggacggggccggtggaaacaggcgggccggggtggcggtgtttgtgggaggggtagaggaagggggaggggcaggggtcgcggacgcggtcggggccgcggtcggggtcgccccccgagcgggggctccggacttggaggggacggggggggatgtggggggggaggctccggggggggaggcgctccccggcgcgaacctgtcccgtttccctctggctctgccggtcccggtccccggggaccccgcgcgaccgagagcggaaagaggatggattgtcccgccctacctcctggttggaaaaaggaggaggttattcgcaagtcaggcttgtccgccggcaagagcgatgtttattacttctcccctagcgggaaaaaattccggtccaaaccacaattggctcgctacctcggcaatacggtcgacctctcttccttcgattttcgcactggaaagatgatgccaagcaagttacagaagaacaaacagaggttgaggaacgatccactcaaccagaacaagttacgctggaacactcaccggcctgctccgtggcacgccctgtctagattgtgcctgcttatacggtgtctcttgtgccttgaatgcgcatatcctctccccctccaccttgtgaatagctatagctcaaagacacagctgcactgccttcacctttgggaggcatgtcccgcctacagccgccagaatcagtctttccctccatag

SEQ ID NO: 188095 - DNA, 909 bp, Artificial Sequence
  derived and/or modified sequence
atgcgggcccaccccggcggcggccggtgctgccccgagcaggaggaaggtgaaagcgctgcgggtggctcaggagcagggggggatagtgccattgaacagggtggtcaaggctctgccctggcaccatcccccgtgagtggagttcggcgggaaggcgcgcggggcggagggagaggcagagggagatggaagcaagccggtcggggcgggggcgtgtgcggcaggggcagaggcagaggccgcgggaggggacggggacggggacggggcagggggaggggccgccctccaagtggtgggtccggtcttgggggagatggtggggggtgcgggggtggcggaagcggtggcggcggagctccacggagagagcctgtgcccttcccttccggttctgccggacctggacctcggggtccaagagcaaccgaatcgggaaagaggatggattgtccagcgcttccccccgggtggaagaaagaagaggtgatacggaagtcgggactgagtgcaggaaagagcgacgtgtactacttcagcccatcgggaaagaagtttagatccaaaccccagttggccaggtacctcgggaatacagtagacctttcgtcgtttgactttaggacaggaaagatgatgccaagcaaactgcagaaaaacaagcagcggctccggaacgaccccctaaatcagaataagttgcgctggaacacccataggcccgccccatggcacgccctgtctcgactgtgcctgctgatcaggtgtctgctttgcctggaatgcgcctaccccctgcctttacatctggtgaactcctacagctcaaaaactcagctacactgtctgcacctctgggaggcctgccccgcttactcccggcaaaatcagagtttcccgccatag

SEQ ID NO: 188096 - DNA, 909 bp, Artificial Sequence
  derived and/or modified sequence
atgagggcccaccccggaggcggaagatgctgccctgagcaggaggaaggtgagagtgcagccggtggttcgggcgctggcggagatagcgcaatcgagcaggggggacagggcagcgccctggctccgtcaccagtttcgggtgttaggagagagggcgctagagggggagggcgagggagggggcgatggaagcaagctgggagaggaggcggtgtctgtggcagagggcgaggacggggtcggggacgcggtcggggaaggggccgagggcgaggcagaggccgtcctccttccgggggttccggcctggggggagacggcggtggctgcggcggaggtggtagtgggggaggcggtgctcccaggagagagccggtgcccttcccctccggctcagcaggcccaggaccccgaggccctcgagctacagaatcaggcaagcgtatggactgtccggctttgcctcccggatggaagaaagaggaagtcatcaggaaatctggactcagcgccggaaaaagcgatgtgtattatttcagcccatctggaaagaaattccgtagtaaaccacagctggccagataccttggtaacaccgtggatctgtctagtttcgacttccggaccgggaagatgatgccctcaaagctgcagaagaataagcagcggctgcgcaacgatcctttgaaccagaacaaactacgctggaacacccataggcccgcaccctggcacgccctgtcaaggttgtgtctgctgattcgatgcctgctgtgcttggaatgtgcctaccctctgccactccatttggtgaacagctacagctccaaaacacaactgcactgtctgcatctttgggaggcatgtcccgcatactctagacagaaccagtcgttcccaccatag

SEQ ID NO: 188097 - DNA, 909 bp, Artificial Sequence
  derived and/or modified sequence
atgcgtgctcaccctgggggaggcaggtgctgtcctgagcaggaggagggagagtccgccgcagggggttctggggctggcggtgattccgcaatcgagcaaggcggacagggctctgccttggctcctagccccgtttctggagtaaggagggagggcgcaaggggcggaggtagggggaggggccgatggaagcaggcgggaagaggtggcggtgtgtgcggaaggggccgaggccgtggtcggggacggggtcgcggacgcggtagagggagaggcaggggcagacccccatctggaggcagcggccttgggggagacggtggaggctgcggtggaggaggcagcggcggagggggtgcgccaagacgggaacccgttccattcccaagcggaagtgctggccctggccctaggggccctagggctacggaaagcgggaaacgcatggattgccccgcactcccacctgggtggaagaaagaggaagtcatcagaaaaagcggcttgagcgcgggaaagtccgatgtatactattttagccctagcggtaagaagttccggagtaagccccagcttgcacggtacctgggtaacaccgtcgacctgagttcgtttgatttccgcacagggaaaatgatgccaagcaagctccaaaagaataaacagaggctgaggaatgacccactaaaccagaacaaactgaggtggaacactcatcgccctgccccttggcatgccctcagccgcctgtgtctactaattagatgcctcctctgcctggaatgcgcgtatccactgccccttcatttagtgaactcctactcttccaagacacagttgcactgtctgcacctctgggaagcttgtcctgcctattcccggcagaatcaatctttccccccatag

SEQ ID NO: 188098 - DNA, 909 bp, Artificial Sequence
  derived and/or modified sequence
atgagagcccaccccggcggcggcagatgctgccccgagcaggaggagggcgagagcgccgccggcggcagcggcgccggcggcgacagcgccatcgagcagggcggccagggcagcgccctggcccccagccccgtgagcggcgtgagaagagagggcgccagaggcggcggcagaggcagaggcagatggaagcaggccggcagaggcggcggcgtgtgcggcagaggcagaggcagaggcagaggcagaggcagaggcagaggcagaggcagaggcagaggcagaccccccagcggcggcagcggcctgggcggcgacggcggcggctgcggcggcggcggcagcggcggcggcggcgcccccagaagagagcccgtgcccttccccagcggcagcgccggccccggccccagaggccccagagccaccgagagcggcaagagaatggactgccccgccctgccccccggctggaagaaggaggaggtgatcagaaagagcggcctgagcgccggcaagagcgacgtgtactacttcagccccagcggcaagaagttcagaagcaagccccagctggccagatacctgggcaacaccgtggacctgagcagcttcgacttcagaaccggcaagatgatgcccagcaagctgcagaagaacaagcagagactgagaaacgaccccctgaaccagaacaagctgagatggaacacccacagacccgccccctggcacgccctgagcagactgtgcctgctgatcagatgcctgctgtgcctggagtgcgcctaccccctgcccctgcacctggtgaacagctacagcagcaagacccagctgcactgcctgcacctgtgggaggcctgccccgcctacagcagacagaaccagagcttccccccctag

SEQ ID NO: 188099 - protein, 714 aa, Artificial Sequence
  derived and/or modified sequence
MDIEDEENMSSSSTDVKENRNLDNVSPKDGSTPGPGEGSQLSNGGGGGPGRKRPLEEGSNGHSKYRLKKRRKTPGPVLPKNALMQLNEIKPGLQYTLLSQTGPVHAPLFVMSVEVNGQVFEGSGPTKKKAKLHAAEKALRSFVQFPNASEAHLAMGRTLSVNTDFTSDQADFPDTLFNGFETPDKAEPPFYVGSNGDDSFSSSGDLSLSASPVPASLAQPPLPVLPPFPPPSGKNPVMILNELRPGLKYDFLSESGESHAKSFVMSVVVDGQFFEGSGRNKKLAKARAAQSALAAIFNLHLDQTPSRQPIPSEGLQLHLPQVLADAVSRLVLGKFGDLTDNFSSPHARRKVLAGVVMTTGTDVKDAKVISVSTGTKCINGEYMSDRGLALNDCHAEIISRRSLLRFLYTQLELYLNNKDDQKRSIFQKSERGGFRLKENVQFHLYISTSPCGDARIFSPHEPILEGSRSYTQAGVQWCNHGSLQPRPPGLLSDPSTSTFQGAGTTEPADRHPNRKARGQLRTKIESGEGTIPVRSNASIQTWDGVLQGERLLTMSCSDKIARWNVVGIQGSLLSIFVEPIYFSSIILGSLYHGDHLSRAMYQRISNIEDLPPLYTLNKPLLSGISNAEARQPGKAPNFSVNWTVGDSAIEVINATTGKDELGRASRLCKHALYCRWMRVHGKVPSHLLRSKITKPNVYHESKLAAKEYQAAKVH

SEQ ID NO: 188100 - DNA, 2145 bp, Artificial Sequence
  derived and/or modified sequence
atggatattgaggacgaggaaaacatgtcctctagctcgaccgacgtgaaggagaaccgcaatctggacaatgtctctccgaaagatgggagcacacccggcccgggcgaagggagccagctcagcaacggggggggcgggggcccagggagaaagcgccccttggaagaaggatctaatgggcattccaagtacaggttaaagaaacggcgcaagacacccggaccagtccttcccaagaacgcgctaatgcagttaaatgaaattaaacctggtctgcaatacacactactctctcagacaggacccgtccacgcccccctgtttgtgatgtcagtggaggtaaacggtcaggtgtttgaaggtagcggacctactaagaagaaagcaaagctgcatgccgccgagaaggcactgcgaagcttcgttcagtttccaaacgcatcagaagcacaccttgcgatgggccgaaccctttctgttaatacagatttcaccagcgatcaggcagacttccccgatacgctttttaatggttttgaaacccctgacaaagctgagccacccttctatgtcggcagcaatggggacgattctttctcttcatcaggagaccttagccttagtgcctcacctgtgcccgcctccctcgcacagcctcccctgcctgttctacccccatttcccccgccctcgggcaagaatccagtaatgatcttgaatgaactcagaccaggcctgaagtacgacttcctgtccgaatcgggagaaagtcacgccaaatccttcgtgatgtcggtcgtggtcgacggtcagttctttgagggctcaggccggaataagaaattagccaaggctcgcgccgcgcagtctgctctggccgctatattcaatctgcacctcgatcagaccccctctagacagccaattccctccgagggcctgcagctgcatctgcctcaggtgctcgctgatgccgtctcgaggcttgttctcggaaagttcggggacctgactgacaacttctcgtcccctcatgctaggcggaaagtcctggccggtgtcgtgatgacaaccggcacagacgtgaaagatgctaaagttatatctgtcagtacaggcacgaaatgtatcaacggggaatatatgtccgataggggcctcgctttgaacgactgtcatgcagaaattatcagcaggcggtctttgctgcgatttctttacacccagctggagctgtacctgaataataaggacgaccagaagaggtcaattttccagaagtccgagagggggggtttccgtctgaaagaaaatgtgcagttccacctgtacatctccacatccccctgcggagatgccaggatctttagcccccacgagcccattctggaaggtagcagatcatatacgcaggcaggagtgcagtggtgcaaccatggtagcctgcagccacgcccgcccggattgttaagcgacccaagtacatccaccttccagggcgcaggaaccacggagcctgctgatcgccacccaaatcggaaagcaagagggcagcttcggactaaaatcgagagtggcgaagggactattccggttagatccaacgctagcatccagacttgggatggagtgctccagggcgaacggttgctgacgatgagttgctccgacaagattgctcggtggaacgttgtcgggatccaagggtccttgctgtccatattcgttgaacctatttacttctcgtcgatcatactgggctccttgtatcacggggaccacctgtcacgagctatgtaccaacgcatttctaacatcgaggatctaccacctctctatacactgaataagcccctgctgtcaggcatctcaaatgctgaggctcgtcagcctggaaaagctcccaacttcagtgttaattggacagtcggtgacagcgccatcgaggtcattaatgctacaacaggaaaggacgagctggggagggcttcaagactttgtaagcatgccctgtactgtcgctggatgcgagttcatggcaaggtacctagtcacttactgcgttccaaaatcacaaagcctaatgtctatcacgaatccaagctggcagctaaggagtaccaagccgccaaggttcattag

SEQ ID NO: 188101 - DNA, 2145 bp, Artificial Sequence
  derived and/or modified sequence
atggacattgaagatgaggagaacatgagcagcagcagcacagatgtgaaggagaacagaaacctggacaacgtgagccccaaggatggcagcaccccaggccctggagagggcagccagctgagcaatggaggcggcggcggccctggcaggaagaggcccctggaggagggcagcaatggccacagcaagtaccgcctgaagaagaggaggaagaccccaggccctgtgctgcccaagaatgccctgatgcagctgaatgagatcaagccaggcctgcagtacaccctgctgagccagacaggccctgtgcacgcccccctgtttgtgatgtctgtggaggtgaatggccaggtgtttgagggcagcggccccaccaagaagaaggccaagctgcacgccgctgagaaggccctgcggagctttgtgcagttccccaatgccagcgaggcccacctggccatgggccgcaccctgtctgtgaacacagacttcaccagtgaccaggccgacttcccagacaccctcttcaacggctttgagaccccagacaaggccgagccccccttctacgtgggcagcaatggagatgacagcttcagcagcagcggggacctgagcctgagcgccagccctgtgcctgccagcctggcccagccccccctgcctgtgctgccccccttccccccacccagcggcaagaaccctgtgatgatcctgaatgagctgcggcccggcctgaagtatgacttcctgtctgagagcggggagagccacgccaagagctttgtgatgtctgtggtggtggatggccagttctttgagggcagcggcaggaacaagaagctggccaaggcccgggccgcccagagcgccctggccgccatcttcaacctgcacctggaccagacccccagccggcagcccatccccagcgagggcctgcagctgcacctgccccaggtgctggctgatgctgtgtcccggctggtgctgggcaagtttggagacctgacagacaacttcagcagcccccacgcccggaggaaggtgctggccggcgtggtgatgaccactggaacagatgtgaaggatgccaaggtgatctctgtgtccacaggcaccaagtgcatcaatggagagtacatgtctgaccggggcctggccctgaatgactgccacgccgagatcatcagccgccgcagcctgctgcgcttcctgtacacccagctggagctgtacctgaacaacaaggatgaccagaagaggagcatcttccagaagtctgagcggggcggcttccggctgaaggaaaatgtgcagttccacctgtacatcagcaccagcccctgtggagatgcccgcatcttcagcccccatgagcccatcctggagggcagccgcagctacacccaggccggcgtgcagtggtgcaaccacggcagcctgcagcccaggcctcctggcctgctgagtgaccccagcaccagcaccttccagggcgccggcaccacagagcctgctgacagacaccccaacaggaaggcccggggccagctgcggaccaagattgagagcggggagggcaccatccctgtgcgcagcaatgccagcatccagacctgggatggagtgctgcagggcgagcggctgctgaccatgagctgcagcgacaagatcgcccgctggaatgtggtgggcatccagggcagcctgctgagcatctttgtggagcccatctacttcagcagcatcatcctgggcagcctgtaccacggggaccacctgagccgggccatgtaccagaggatcagcaacatcgaggacctgccccccctgtacaccctgaacaagcccctgctgagcggcatcagcaatgctgaggcccggcagcccgggaaggcccccaacttctctgtgaactggacagtgggggacagcgccattgaagtcatcaatgccaccaccgggaaggatgagctgggccgggccagccggctgtgcaagcacgccctgtactgccgctggatgagggtgcacggcaaggtgcccagccacctgctgcggagcaagatcaccaagcccaacgtgtaccacgagagcaagctggccgccaaggagtaccaggccgccaaggtgcactag

SEQ ID NO: 188102 - DNA, 2145 bp, Artificial Sequence
  derived and/or modified sequence
atggacatcgaggacgaggagaacatgagcagcagcagcaccgacgttaaggagaataggaacctggacaatgtttcccccaaagatgggtccactccgggccccggagagggctctcagctctctaacggaggcgggggcggcccaggaagaaagcgcccactggaggagggcagcaatggtcacagcaagtataggctcaagaaaaggaggaaaacgcccggccccgtacttccaaaaaacgctctgatgcagcttaatgagattaagcctggcctgcaatatacgctcctatcacagactgggcctgtgcatgctcctctctttgttatgagtgtagaagtgaacggacaagttttcgagggctcgggcccgactaaaaagaaggcgaaattgcacgccgctgagaaagcactgagatccttcgttcaattccctaacgcctcagaggcccacctcgccatgggtcggaccctctcagtcaacactgattttaccagcgaccaggcggatttccccgacaccctgtttaacggcttcgagactcctgataaagcagagcccccattctatgtgggatcaaatggggatgattcgttctcctctagcggcgatctctcactgtccgcatcccccgtgccggccagtctggcccagcccccgttaccagtcctcccccctttccctccaccttcaggtaaaaatcccgttatgatcctgaacgaacttcggccgggtctgaaatacgactttctgtcagagtccggcgagtctcacgcaaaatcattcgtgatgtcagtggttgtagatggccagttttttgaggggtccgggcgtaacaagaaattagcaaaagcccgcgcggcccaatccgccctagccgctatttttaatctccatctggatcagactccttcccgacagccaataccgtcagaggggcttcagctgcacctgcctcaagttctcgctgacgcagtcagtaggttagtccttggcaaattcggagatctgacggacaatttttcgtcaccgcacgctcgtagaaaggtgctagcaggcgtcgtgatgaccaccgggacagacgttaaggatgctaaagtcatctcggtgagcaccggtacaaaatgcattaacggtgaatacatgagcgacaggggtctggccctgaacgactgccacgctgaaatcatctcaagaaggtccctgctgcggtttctgtatacacagctcgaactctatttgaataataaagatgatcagaagagatccatattccagaaaagtgagagaggcgggttccgcttgaaagaaaacgtccagtttcatctctatatctctacctctccctgtggggatgctcgtatcttctctccacacgagcctatcctcgagggctccaggtcctacacacaggcaggggtgcagtggtgtaaccatggttctttacagccacggcctccgggcctgctcagcgacccaagcacttcaaccttccaaggcgctgggacaacagagcctgccgacagacacccaaatcgaaaagcccgaggacagttgagaacaaagattgaatccggcgaggggacaattccggtgagatccaacgcatctattcagacatgggatggggtgttgcagggcgagaggttgttaaccatgtcctgtagtgacaagatcgctaggtggaatgtcgtgggtatccagggcagcctcttgtcaattttcgtggagcccatttatttttccagcattatcttggggtccctctatcatggcgatcatctgtctcgagccatgtatcagcgaatatctaatatcgaggatttgcctccactatacaccctgaacaaacccctgctctctggtatcagcaacgccgaagccaggcagccagggaaagcccccaacttttctgttaattggacggtgggagattccgctatcgaagtgattaatgcaaccaccggaaaggatgagctagggcgggccagtcgcctttgtaaacacgccctttattgccgctggatgagggtgcatggcaaggtgccttcacacctcctccgcagcaaaatcactaaaccaaatgtctaccacgagagcaaactggctgccaaggaatatcaggccgccaaggtgcattag

SEQ ID NO: 188103 - DNA, 2145 bp, Artificial Sequence
  derived and/or modified sequence
atggacatcgaagacgaagagaatatgtcttcctcgtccaccgatgtcaaagagaaccgcaacctcgacaatgtgtctcctaaggatggaagtacccccggacctggagaaggcagccagttgtcgaatgggggtggcggtgggccaggccgaaaacgcccactggaggagggaagcaacggtcacagcaaataccggctgaaaaagcggcgtaagacccccggtcctgtacttcccaagaacgcacttatgcagcttaatgagatcaagcctggactacagtacaccctgctcagccaaactggcccagtacacgccccactcttcgtcatgtctgtcgaggtaaacggccaggtattcgagggatccgggcctaccaaaaagaaagcgaagctgcacgcagccgaaaaagccttgcgctctttcgtacaatttcctaacgcctctgaagctcacttggctatgggaaggacgctgtccgtgaacacagattttacatccgatcaggcagatttcccagacacattgttcaacggatttgagactcctgataaggcagagccgccattttacgtaggctcaaacggagacgactcattcagctcaagcggcgaccttagcctctctgcctctccagttccagcaagtctggcccagccccctttacctgtgctgcccccattccctcctccttctgggaaaaacccagtcatgatactcaacgaattgcgcccaggtctaaagtatgattttcttagtgagagcggcgagtcccatgccaagagttttgtgatgtctgtggtggtcgacgggcaattctttgagggctctggtagaaacaagaagcttgccaaggcacgagcagcccaatccgcattagccgctatctttaacttgcacctggaccagactcctagcagacagccaatcccgtcagaagggcttcagctgcatctgcctcaggtgctggcggatgcagttagtagactcgtactcggaaaatttggggacctcaccgacaatttttctagtccccatgccagacgcaaagtgctggctggcgtagtgatgacaacgggcacggacgtcaaagacgctaaggttatcagtgtcagtacaggcaccaagtgtataaacggggaatacatgagcgacagagggcttgcgctgaatgattgtcacgctgaaatcataagcagacgctccctgctgcggttcctgtatacacaacttgaactatacttaaataacaaagatgatcagaagagatcaatattccagaaaagcgaacgaggcggtttcagactgaaagaaaacgtgcaatttcacctatacattagcaccagcccatgcggtgacgctaggatatttagtccgcacgagcctatcctcgagggctcacgctcctacacacaagcaggagtccagtggtgtaaccacgggagcctgcagccaaggcccccaggtctcctctcagatccatcaaccagcacattccagggggcagggacaactgaacccgctgatcgtcatcctaaccggaaggcacgaggacagttaaggacaaaaatcgagtcgggcgaggggacgatccctgtgagatcaaatgctagtattcagacctgggacggggtgctgcagggagaacggctgctcacaatgtcttgcagcgataaaatcgcccgatggaatgtggtcggcatccaaggaagtctcctgtcgatattcgtggagccgatctacttttccagcatcatcctgggatccctgtaccatggggaccatttaagccgggcaatgtaccaacgtatctccaacatagaagacctcccaccgctttacactctaaacaaaccgctgctgtccggaatcagcaatgccgaagctcgccagcccggaaaggcacctaacttctccgttaactggaccgtgggtgactctgccatcgaggtgattaacgccacaacgggcaaagacgagctcggaagggccagccgattgtgtaagcatgcgctgtattgtcggtggatgcgggtccatgggaaagtaccgtcacaccttctgcgaagcaagatcaccaagcccaacgtatatcatgaaagcaagcttgccgcaaaggagtatcaggcagccaaggtgcattag

SEQ ID NO: 188104 - DNA, 2145 bp, Artificial Sequence
  derived and/or modified sequence
atggacatcgaggacgaggagaacatgagcagcagcagcaccgacgtgaaggagaacagaaacctggacaacgtgagccccaaggacggcagcacccccggccccggcgagggcagccagctgagcaacggcggcggcggcggccccggcagaaagagacccctggaggagggcagcaacggccacagcaagtacagactgaagaagagaagaaagacccccggccccgtgctgcccaagaacgccctgatgcagctgaacgagatcaagcccggcctgcagtacaccctgctgagccagaccggccccgtgcacgcccccctgttcgtgatgagcgtggaggtgaacggccaggtgttcgagggcagcggccccaccaagaagaaggccaagctgcacgccgccgagaaggccctgagaagcttcgtgcagttccccaacgccagcgaggcccacctggccatgggcagaaccctgagcgtgaacaccgacttcaccagcgaccaggccgacttccccgacaccctgttcaacggcttcgagacccccgacaaggccgagccccccttctacgtgggcagcaacggcgacgacagcttcagcagcagcggcgacctgagcctgagcgccagccccgtgcccgccagcctggcccagccccccctgcccgtgctgccccccttccccccccccagcggcaagaaccccgtgatgatcctgaacgagctgagacccggcctgaagtacgacttcctgagcgagagcggcgagagccacgccaagagcttcgtgatgagcgtggtggtggacggccagttcttcgagggcagcggcagaaacaagaagctggccaaggccagagccgcccagagcgccctggccgccatcttcaacctgcacctggaccagacccccagcagacagcccatccccagcgagggcctgcagctgcacctgccccaggtgctggccgacgccgtgagcagactggtgctgggcaagttcggcgacctgaccgacaacttcagcagcccccacgccagaagaaaggtgctggccggcgtggtgatgaccaccggcaccgacgtgaaggacgccaaggtgatcagcgtgagcaccggcaccaagtgcatcaacggcgagtacatgagcgacagaggcctggccctgaacgactgccacgccgagatcatcagcagaagaagcctgctgagattcctgtacacccagctggagctgtacctgaacaacaaggacgaccagaagagaagcatcttccagaagagcgagagaggcggcttcagactgaaggagaacgtgcagttccacctgtacatcagcaccagcccctgcggcgacgccagaatcttcagcccccacgagcccatcctggagggcagcagaagctacacccaggccggcgtgcagtggtgcaaccacggcagcctgcagcccagaccccccggcctgctgagcgaccccagcaccagcaccttccagggcgccggcaccaccgagcccgccgacagacaccccaacagaaaggccagaggccagctgagaaccaagatcgagagcggcgagggcaccatccccgtgagaagcaacgccagcatccagacctgggacggcgtgctgcagggcgagagactgctgaccatgagctgcagcgacaagatcgccagatggaacgtggtgggcatccagggcagcctgctgagcatcttcgtggagcccatctacttcagcagcatcatcctgggcagcctgtaccacggcgaccacctgagcagagccatgtaccagagaatcagcaacatcgaggacctgccccccctgtacaccctgaacaagcccctgctgagcggcatcagcaacgccgaggccagacagcccggcaaggcccccaacttcagcgtgaactggaccgtgggcgacagcgccatcgaggtgatcaacgccaccaccggcaaggacgagctgggcagagccagcagactgtgcaagcacgccctgtactgcagatggatgagagtgcacggcaaggtgcccagccacctgctgagaagcaagatcaccaagcccaacgtgtaccacgagagcaagctggccgccaaggagtaccaggccgccaaggtgcactag

SEQ ID NO: 188105 - protein, 275 aa, Artificial Sequence
  derived and/or modified sequence
MELDRAVGVLGAATLLLSFLGMAWALQAADTCPGERGPPGPPGKAGPPGPNGAPGEPQPCLTGPRTCKDLLDRGHFLSGWHTIYLPDCRPLTVLCDMDTDGGGWTVFQRRVDGSVDFYRDWATYKQGFGSRLGEFWLGNDNIHALTAQGTSELRVDLVDFEDNYQFAKYRSFKVADEAEKYNLVLGAFVEGSAGDSLTFHNNQSFSTKDQDNDLNTGNCAVMFQGAWWYKNCHVSNLNGRYLRGTHGSFANGINWKSGKGYNYSYKVSEMKVRPA

SEQ ID NO: 188106 - DNA, 1505 bp, Artificial Sequence
  derived and/or modified sequence
aaagaccagaagagatggagctggacagagctgtgggggtcctgggcgctgccaccctgctgctctctttcctgggcatggcctgggctctccaggcggcagacacctgtccaggagaacgtggcccccctggacctcctgggaaggcaggaccacctgggcccaacggagcacctggggagccccagccgtgcctgacaggcccgcgtacctgcaaggacctgctagaccgagggcacttcctgagcggctggcacaccatctacctgcccgactgccggcccctgactgtgctctgtgacatggacacggacggagggggctggaccgttttccagcggagggtggatggctctgtggacttctaccgggactgggccacgtacaagcagggcttcggcagtcggctgggggagttctggctggggaatgacaacatccacgccctgaccgcccagggaaccagcgagctccgtgtagacctggtggactttgaggacaactaccagtttgctaagtacagatcattcaaggtggccgacgaggcggagaagtacaatctggtcctgggggccttcgtggagggcagtgcgggagattccctgacgttccacaacaaccagtccttctccaccaaagaccaggacaatgatcttaacaccggaaattgtgctgtgatgtttcagggagcttggtggtacaaaaactgccatgtgtcaaacctgaatggtcgctacctcagggggactcatggcagctttgcaaatggcatcaactggaagtcggggaaaggatacaattatagctacaaggtgtcagagatgaaggtgcgacctgcctagcccaggccggcctcagggtcaggacgcctccacacatagttggttggggggtagggttgggagcttggccctacggtttgtaaaagaaacacatgtcgtgattctaaattgggtttgtcttgctgtgcggaagaggttcaaatccagctctgtttccgcaatcaaccctttcagatttgtgacattaactcacctcaaacctctgtctttccttgacaatgagtaagaatgtgttcctgaccatgccagcaggaaccttccttaaggacaaatacaagactttgaagctgcgatgggctcagagtgcagccctgctcaggtccctgggcaggctaaacgccttcctggggctcgaccatctgggcttctctgtgagctggatggcagggaagtcagaaggcacattggagaggaagtttctcttgcactcagagatgccgttgcctgtccaaggcccccagcctcgtagccgcagctctgctcactctcccccgtcacccaggcttcctgccgcctgctgtcctgggtattcgtgggatctgctcgctacttcctcacaagccgaagcaagagtggcagtgtgcctgtgactccctcatcaaaacggagagagtggttacatgaggcaggtgtgagggacccgagcactcctgaggagggaag

SEQ ID NO: 188107 - DNA, 828 bp, Artificial Sequence
  derived and/or modified sequence
atggaacttgaccgggctgtgggagtgttgggagccgctacactgctccttagttttctcggaatggcctgggccctccaggctgccgacacttgccccggcgaaagaggacccccagggcccccaggaaaggcagggcccccggggccgaatggtgcccccggcgagccccaaccatgcttgacagggccccgcacatgcaaagacctgctggaccggggacactttctatccggatggcatactatttatctcccagattgtagacctctaacagtcttgtgtgatatggacacagacgggggcgggtggacggttttccagcggcgggtagacgggagtgtggacttctatagagactgggctacctacaaacagggcttcgggagtagactgggtgaattttggctgggaaacgacaatatccacgctttaactgctcaaggaacgagcgagctgagagtagatctcgtcgactttgaagacaactaccagttcgccaaatacagatcattcaaggttgcagatgaagctgaaaaatacaatctggtactaggtgcattcgtggaaggatcagccggcgactccctgacattccacaataaccagtccttttccacaaaggatcaagataatgatcttaataccggcaattgtgccgtcatgttccagggcgcttggtggtacaagaactgccacgtgagtaacctgaacggcagatatctaaggggcactcacggatcgttcgccaacggcatcaattggaagtccggtaaggggtacaactatagctataaggtctccgaaatgaaagtacgcccagcctag

SEQ ID NO: 188108 - DNA, 828 bp, Artificial Sequence
  derived and/or modified sequence
atggagctggacagagctgtgggcgtgctgggcgccgccaccctgctgctgtccttcctgggcatggcctgggccctgcaggccgctgacacctgccctggagagcggggccccccaggccccccaggcaaggccggccccccaggccccaatggagcccctggagagccccagccctgcctgaccggccccaggacctgcaaggacctgctggaccggggccacttcctgagcggctggcacaccatctacctgcctgactgccggcccctgactgtgctgtgtgacatggacacagatggcggcggctggacagtgttccagaggagagtggatggctctgtggacttctacagagactgggccacctacaagcagggcttcggcagccggctgggggagttctggctgggcaatgacaacatccacgccctgacagcccagggcaccagcgagctgcgggtggacctggtggactttgaggacaactaccagtttgccaagtaccgctccttcaaggtggctgatgaggccgagaagtacaacctggtgctgggcgcctttgtggagggcagcgctggggacagcctgaccttccacaacaaccagagcttcagcaccaaggaccaggacaatgacctgaacacaggcaactgtgctgtgatgttccagggcgcctggtggtacaagaactgccacgtgagcaacctgaatggccgctacctgcggggcacccacggcagctttgccaacggcatcaactggaagagcggcaagggctacaactacagctacaaggtgtctgagatgaaggtgcggcctgcctag

SEQ ID NO: 188109 - DNA, 828 bp, Artificial Sequence
  derived and/or modified sequence
atggagctggaccgggccgtgggcgtgctgggcgccgccaccctgctactcagcttcctgggaatggcatgggctctacaggcggccgatacctgccctggggaacgcggacctcccggcccaccggggaaagcggggcctcctggacccaatggtgctcctggagagccgcagccatgtctaacagggccccgcacttgcaaagacctgctggacaggggacatttcctcagtggatggcataccatatacttacctgattgtagacctctgaccgtgctttgcgacatggatacagatggcggaggatggacagtgtttcagagaagagtggacggatcagtggatttttaccgggattgggctacgtacaagcagggttttgggtcgaggttgggtgagttttggcttggcaatgacaacatccacgctctgacagctcaaggcacatcagagctgcgggtggatcttgtcgatttcgaagataattaccagtttgctaaatatcgctccttcaaagtcgcagatgaagctgaaaagtacaatctggtactgggcgcttttgtggagggttcagccggcgatagcctcaccttccacaacaatcagtccttttctactaaggaccaggataatgacctgaacactggtaactgtgccgtgatgttccaaggtgcctggtggtacaagaactgtcacgtttctaacttgaatggaagatacctgagagggactcacggctctttcgcaaatggaatcaattggaagtccgggaaaggttataactattcttacaaagtgagcgagatgaaagtgagaccagcgtag

SEQ ID NO: 188110 - DNA, 828 bp, Artificial Sequence
  derived and/or modified sequence
atggagttggatcgcgctgttggcgtgcttggagctgccaccttactgctcagctttctgggcatggcatgggctctgcaggctgcagatacatgccctggagaaaggggccctccgggaccccctggaaaagccggaccccctgggccaaacggggctcctggcgaaccccagccgtgcctgacaggaccacggacatgcaaggatctgttggatcggggacatttcttgtccggctggcacaccatctatttacccgattgtcgcccactgactgtgctctgcgacatggacactgatggaggagggtggaccgtattccagcggagagtggacggatcagtggatttctatagggattgggccacttataagcagggttttgggtccagactcggagaattttggttgggtaacgataacattcacgcactcacagcccagggcacttccgaactccgcgtcgacctggtcgacttcgaggacaactaccagttcgcgaagtacagatcttttaaggtggcagacgaagctgagaagtataaccttgtgctaggagccttcgtagaaggcagcgccggtgacagcttgacgttccataataaccagtcattctctacaaaagaccaggataatgatctaaatacgggaaactgtgcagtgatgtttcagggggcatggtggtacaaaaactgtcacgtatctaatctgaatggacggtacctccgcggaacgcatggctcatttgccaacggcataaattggaaatctgggaaaggctacaattactcatataaagtaagcgagatgaaagtacggccagcttag

SEQ ID NO: 188111 - DNA, 828 bp, Artificial Sequence
  derived and/or modified sequence
atggagctggacagagccgtgggcgtgctgggcgccgccaccctgctgctgagcttcctgggcatggcctgggccctgcaggccgccgacacctgccccggcgagagaggcccccccggcccccccggcaaggccggcccccccggccccaacggcgcccccggcgagccccagccctgcctgaccggccccagaacctgcaaggacctgctggacagaggccacttcctgagcggctggcacaccatctacctgcccgactgcagacccctgaccgtgctgtgcgacatggacaccgacggcggcggctggaccgtgttccagagaagagtggacggcagcgtggacttctacagagactgggccacctacaagcagggcttcggcagcagactgggcgagttctggctgggcaacgacaacatccacgccctgaccgcccagggcaccagcgagctgagagtggacctggtggacttcgaggacaactaccagttcgccaagtacagaagcttcaaggtggccgacgaggccgagaagtacaacctggtgctgggcgccttcgtggagggcagcgccggcgacagcctgaccttccacaacaaccagagcttcagcaccaaggaccaggacaacgacctgaacaccggcaactgcgccgtgatgttccagggcgcctggtggtacaagaactgccacgtgagcaacctgaacggcagatacctgagaggcacccacggcagcttcgccaacggcatcaactggaagagcggcaagggctacaactacagctacaaggtgagcgagatgaaggtgagacccgcctag

SEQ ID NO: 188112 - protein, 1195 aa, Artificial Sequence
  derived and/or modified sequence
GYSLSGYYTHPFQGYEHRQLRYQQPGPGSSPSSFLLKQIEFLKGQLPEAPVIGKQTPSLPPSLPGLRPRFPVLLASSTRGRQVDIRGVPRGVHLRSQGLQRGFQHPSPRGRSLPQRGVDCLSSHFQELSIYQDQEQRILKFLEELGEGKATTAHDLSGKLGTPKKEINRVLYSLAKKGKLQKEAGTPPLWKIAVSTQAWNQHSGVVRPDGHSQGAPNSDPSLEPEDRNSTSVSEDLLEPFIAVSAQAWNQHSGVVRPDSHSQGSPNSDPGLEPEDSNSTSALEDPLEFLDMAEIKEKICDYLFNVSDSSALNLAKNIGLTKARDINAVLIDMERQGDVYRQGTTPPIWHLTDKKRERMQIKRNTNSVPETAPAAIPETKRNAEFLTCNIPTSNASNNMVTTEKVENGQEPVIKLENRQEARPEPARLKPPVHYNGPSKAGYVDFENGQWATDDIPDDLNSIRAAPGEFRAIMEMPSFYSHGLPRCSPYKKLTECQLKNPISGLLEYAQFASQTCEFNMIEQSGPPHEPRFKFQVVINGREFPPAEAGSKKVAKQDAAMKAMTILLEEAKAKDSGKSEESSHYSTEKESEKTAESQTPTPSATSFFSGKSPVTTLLECMHKLGNSCEFRLLSKEGPAHEPKFQYCVAVGAQTFPSVSAPSKKVAKQMAAEEAMKALHGEATNSMASDNQPEGMISESLDNLESMMPNKVRKIGELVRYLNTNPVGGLLEYARSHGFAAEFKLVDQSGPPHEPKFVYQAKVGGRWFPAVCAHSKKQGKQEAADAALRVLIGENEKAERMGFTELPLTGSTFHDQIAMLSHRCFNTLTNSFQPSLLGRKILAAIIMKKDSEDMGVVVSLGTGNRCVKGDSLSLKGETVNDCHAEIISRRGFIRFLYSELMKYNSQTAKDSIFEPAKGGEKLQIKKTVSFHLYISTAPCGDGALFDKSCSDRAMESTESRHYPVFENPKQGKLRTKVENGEGTIPVESSDIVPTWDGIRLGERLRTMSCSDKILRWNVLGLQGALLTHFLQPIYLKSVTLGYLFSQGHLTRAICCRVTRDGSAFEDGLRHPFIVNHPKVGRVSIYDSKRQSGKTKETSVNWCLADGYDLEILDGTRGTVDGPRNELSRVSKKNIFLLFKKLCSFRYRRDLLRLSYGEAKKAARDYETAKNYFKKGLKDMGYGNWISKPQEEKNFYLCPV

SEQ ID NO: 188113 - protein, 1385 aa, Artificial Sequence
  derived and/or modified sequence
MQDYNKDDMSYRRISAVEPKTALPFNRFLPNKSRQPSYVPAPLRKKKPDKHEDNRRSWASPVYTEADGTFSSNQRRIWGTNVENWPTVQGTSKSSCYLEEEKAKTRSIPNIVKDDLYVRKLSPVMPNPGNAFDQFLPKCWTPEDVNWKRIKRETYKPWYKEFQGFSQFLLLQALQTYSDDILSSETHTKIDPTSGPRLITRRKNLSYAPGYRRDDLEMAALDPDLENDDFFVRKTGAFHANPYVLRAFEDFRKFSEQDDSVERDIILQCREGELVLPDLEKDDMIVRRIPAQKKEVPLSGAPDRYHPVPFPEPWTLPPEIQAKFLCVLERTCPSKEKSNSCRILVPSYRQKKDDMLTRKIQSWKLGTTVPPISFTPGPCSEADLKRWEAIREASRLRHKKRLMVERLFQKIYGENGSKSMSDVSAEDVQNLRQLRYEEMQKIKSQLKEQDQKWQDDLAKWKDRRKSYTSDLQKKKEEREEIEKQALEKSKRSSKTFKEMLQDRESQNQKSTVPSRRRMYSFDDVLEEGKRPPTMTVSEASYQSERVEEKGATYPSEIPKEDSTTFAKREDRVTTEIQLPSQSPVEEQSPASLSSLRSRSTQMESTRVSASLPRSYRKTDTVRLTSVVTPRPFGSQTRGISSLPRSYTMDDAWKYNGDVEDIKRTPNNVVSTPAPSPDASQLASSLSSQKEVAATEEDVTRLPSPTSPFSSLSQDQAATSKATLSSTSGLDLMSESGEGEISPQREVSRSQDQFSDMRISINQTPGKSLDFGFTIKWDIPGIFVASVEAGSPAEFSQLQVDDEIIAINNTKFSYNDSKEWEEAMAKAQETGHLVMDVRRYGKAGSPETKWIDATSGIYNSEKSSNLSVTTDFSESLQSSNIESKEINGIHDESNAFESKASESISLKNLKRRSQFFEQGSSDSVVPDLPVPTISAPSRWVWDQEEERKRQERWQKEQDRLLQEKYQREQEKLREEWQRAKQEAERENSKYLDEELMVLSSNSMSLTTREPSLATWEATWSEGSKSSDREGTRAGEEERRQPQEEVVHEDQGKKPQDQLVIERERKWEQQLQEEQEQKRLQAEAEEQKRPAEEQKRQAEIERETSVRIYQYRRPVDSYDIPKTEEASSGFLPGDRNKSRSTTELDDYSTNKNGNNKYLDQIGNMTSSQRRSKKEQVPSGAELERQQILQEMRKRTPLHNDNSWIRQRSASVNKEPVSLPGIMRRGESLDNLDSPRSNSWRQPPWLNQPTGFYASSSVQDFSRPPPQLVSTSNRAYMRNPSSSVPPPSAGSVKTSTTGVATTQSPTPRSHSPSASQSGSQLRNSVLPVSVTSEALPQELKSGSETTNCTATTAISDSNLDGQPPCDVSLHTKALLQIEEEVVAAHVDL

SEQ ID NO: 188114 - DNA, 4158 bp, Artificial Sequence
  derived and/or modified sequence
atgcaagattacaataaagatgatatgtcttaccgccgcatcagtgcagtcgagcctaagacagctctgcccttcaatcgcttcctgcccaacaagagtcgccaaccatcctatgtgcctgctccccttcgcaaaaagaagcctgataaacatgaagacaataggaggagttgggcttctcccgtatatacagaggcagatggaacatttagcagtaaccagagacgcatttggggcactaatgtagagaattggcctacggtgcagggaacaagtaaatcgtcctgctacctcgaggaggagaaggcaaaaacacggtccatcccaaacatagtcaaggatgacctctatgtaaggaagctgagcccggtgatgccgaaccccggtaacgcgttcgaccagttcctgccaaagtgctggacacccgaggatgtcaattggaagagaattaagagagaaacctataagccttggtacaaggaatttcagggattttcccagttcctgctcttgcaagccctgcagacctatagcgacgacatcctgagcagcgaaacgcacactaaaattgaccccacctcaggccccaggctcataacacggcgaaagaacctgtcttacgcacctggctaccgtcgggatgacttagagatggccgcgctggaccctgaccttgagaatgatgatttctttgtcaggaagaccggcgcgtttcatgccaatccctacgtcctgcgagcctttgaggatttccgaaagttcagcgagcaagatgactccgtcgaaagagacataatcttacagtgtagagaaggcgagttagtgctcccagatttggaaaaagatgatatgattgtgcgccgaattcccgcacaaaaaaaggaggtaccgttgtccggagcccctgaccgttatcaccctgttcccttcccagagccgtggacgctgccacccgagatccaggctaagttcctttgtgtgctcgaacggacctgcccaagtaaggagaagtccaactcatgtagaattctggtgccaagttaccggcaaaagaaggacgatatgcttacccgtaagatacagtcatggaagctagggacgacagtcccgccaattagctttactcctggcccctgtagtgaggccgatctgaaacgctgggaagccattcgggaggcttcccggctgcggcacaagaagcggcttatggttgaacgcctgttccagaagatatatggcgaaaatggttccaagagcatgtctgatgtgtccgctgaagatgtgcaaaatctgcggcagctacgttatgaggagatgcagaaaatcaagtcccaactgaaggaacaagatcagaaatggcaggatgacctcgcaaagtggaaagatagacgcaaatcttacacttcagacctgcaaaagaaaaaagaggagcgggaggagatcgagaagcaggcacttgaaaaatctaaacgaagcagcaagacctttaaagaaatgcttcaggacagagaatcgcaaaatcaaaagtccacggttccaagtagaagacggatgtattcattcgacgatgtcctggaggagggaaaacgtcccccgaccatgacggttagcgaagcttcttatcagtcagaaagggtggaggagaagggggccacatatccgtctgagatacccaaggaggactcaaccacattcgcaaagcgcgaagatcgtgtaactacagagatccagttgccgagccaatcaccagtcgaggaacagtctcccgcgagcctttccagtttgagaagcaggagtacgcaaatggagtcaactagggtgagcgcctctttgccacggagttacagaaagactgataccgtgcgcctgactagcgtggtcaccccacgcccatttggaagccagactcgaggcatcagctcactccccaggtcttatactatggatgatgcttggaagtacaacggggacgtcgaagatataaaaagaaccccgaacaacgttgtgtcgactcctgctcccagccccgacgcctcgcagctggcttcctccctgtcgagccagaaagaggtggcagcaaccgaagaagacgtgacaaggttgccaagtccaacttcaccatttagtagcctctcacaggaccaggccgccacctccaaagccactctcagctccacgagcgggctggatctgatgagcgaatcaggagaaggggagatctcccctcagagggaagtgtcccgctcacaggatcagttctctgacatgcggatttctattaatcaaactccaggtaaatctttagacttcggcttcacaattaaatgggatatcccaggaatttttgtcgcctcagtggaagctgggagcccagccgaattttcgcagctacaggtggacgacgaaattatcgcaataaataatacgaagtttagctacaatgattcaaaggaatgggaggaagctatggcgaaagctcaagaaaccggacacctcgtcatggacgtcagacgttacggcaaagccggttcgccggaaaccaagtggatcgacgcaacctccggaatatataacagtgagaaatccagcaatctctccgtgacaacagacttctcagagagtcttcagtcctccaatatcgagtcaaaggagatcaatggaatccacgacgagtccaatgccttcgagagcaaagccagcgagtctatttccctcaaaaacctgaagagacgcagccagttctttgagcagggctcctctgacagtgtagtgcctgacctgcctgtcccaacgatcagcgccccatccaggtgggtttgggaccaggaggaggaaagaaaacgccaggagcgctggcaaaaggaacaggataggttgctacaagagaagtaccaaagggagcaggagaagttgcgcgaggagtggcaaagagctaaacaagaagccgaaagggagaattctaagtatctggacgaggagcttatggtattaagctccaactctatgagtttaacgactagagaacctagccttgctacatgggaagccacctggagtgagggatcaaagtcatctgaccgagagggcacgcgagcaggtgaggaagagcgtcggcagcctcaggaggaggtcgtccacgaagatcagggcaagaagccgcaggaccagctcgtgatcgaacgcgaacgaaagtgggaacagcaactgcaggaggaacaggagcaaaaacggttacaagcagaagctgaggagcagaaaaggcctgctgaggagcagaagcggcaagctgagatcgaaagagagacctccgtgcgcatctatcagtaccgcagaccggtggactcatacgatatcccgaaaaccgaagaagcctctagtgggtttctcccgggagatagaaataagagtcgtagcactaccgagttagatgactatagtacaaacaaaaacggcaacaacaagtacctggatcagatcggtaatatgacatcaagtcagcgaaggtctaaaaaggagcaggtgccatctggtgcagagctcgaaaggcagcagatcctgcaggagatgaggaaaagaacccctttgcataatgataactcctggatccggcaacggtcagcatcagtgaacaaggaacccgtttcgctacccgggattatgcggcggggagagtccctggataacctggactctccccgaagcaatagttggcggcagccgccctggctgaatcaacccacaggcttttatgcatcttctagcgtgcaggatttcagtcggcccccacctcagcttgtgagcacgagcaatagagcttatatgcgtaaccccagctcttctgttccgcctccatctgcaggctctgtcaagactagtactaccggagtcgctactacccaatcccccactccacggtctcacagtccgtctgctagccagtctgggtcacagctgagaaattccgtccttcccgtctctgtgacgtcagaagctctgccacaggagcttaaatccggatcagaaacgacaaactgtacagcaactacagccattagcgatagcaacctcgatggccaacccccgtgcgacgtgtccttacatacgaaggcactgctgcaaatagaggaagaggttgtcgcagcgcacgtagacctgtag

SEQ ID NO: 188115 - DNA, 4158 bp, Artificial Sequence
  derived and/or modified sequence
atgcaggactacaacaaggatgacatgagctaccgccgcatctctgctgtggagcccaagacagccctgcccttcaaccgcttcctgcccaacaagagccggcagcccagctatgtgcctgcccccctgaggaagaagaagccagacaagcatgaggacaacagaagatcctgggccagccctgtgtacacagaagcagatggcaccttcagcagcaaccagaggcgcatctggggcaccaacgtggagaactggcccaccgtgcagggcaccagcaagagcagctgctacctggaggaggagaaggccaagaccaggagcatccccaacatcgtgaaggatgacctgtatgtgaggaagctgagccctgtgatgcccaaccctggaaatgcctttgaccagttcctgcccaagtgctggaccccagaagatgtgaactggaagaggatcaagcgggagacctacaagccctggtacaaggagttccagggcttcagccagttcctgctgctgcaggccctgcagacctacagtgatgacatcctgagcagcgagacccacaccaagattgaccccaccagcggccccaggctcatcaccaggaggaagaacctgtcctatgcccctggctacagaagagatgacctggagatggccgccctggaccctgacctggagaatgatgacttctttgtgaggaagacaggagccttccacgccaacccctacgtgctgcgggcctttgaggacttcaggaagttcagcgagcaggatgacagcgtggagcgggacatcatcctgcagtgccgggagggggagctggtgctgcctgacctggagaaggatgacatgattgtgcggcgcatcccagcccagaagaaggaggtgcccctgagcggggccccagaccgctaccaccctgtgcccttccctgagccctggaccctgcccccagagatccaggccaagttcctgtgtgtgctggagaggacctgccccagcaaggagaagagcaacagctgccgcatcctggtgcccagctaccggcagaagaaggatgacatgctgaccaggaagatccagagctggaagctgggcaccaccgtgccccccatctccttcaccccaggcccctgcagcgaggccgacctgaagcgctgggaggccatccgggaggccagccggctgcggcacaagaagaggctgatggtggagcggctcttccagaagatctacggggagaatggcagcaagtccatgtctgatgtgtctgcagaagatgtgcagaacctgcggcagctgcgctatgaggagatgcagaagatcaagagccagctgaaggagcaggaccagaagtggcaggatgacctggccaagtggaaggacaggaggaagagctacaccagtgacctgcagaagaagaaggaggagcgggaggagattgagaagcaggccctggagaagagcaagaggagcagcaagaccttcaaggagatgctgcaggaccgggagagccagaaccagaagagcacagtgcccagcagaagaaggatgtacagctttgatgatgtgctggaggagggcaagaggcctcccaccatgacagtgtctgaggccagctaccagagcgagcgggtggaggagaagggggccacctaccccagcgagatccccaaggaggacagcaccacctttgccaagagagaagatagagtgaccacagagatccagctgcccagccagagccctgtggaggagcagagccctgccagcctgagcagcctgcggagccgcagcacccagatggagagcaccagggtgtctgccagcctgcccaggagctacaggaagacagacacagtgcggctgacctctgtggtgaccccccggcccttcggcagccagacccggggcatcagcagcctgcccaggagctacaccatggatgatgcctggaagtacaatggagatgtggaggacatcaagaggacccccaacaacgtggtgtccaccccagcccccagcccagatgccagccagctggccagcagcctgagcagccagaaggaggtggccgccacagaggaggatgtgacccggctgcccagccccaccagccccttcagcagcctgagccaggaccaggccgccaccagcaaggccaccctgagcagcaccagcggcctggacctgatgtctgagagcggggagggggagatcagcccccagcgggaggtgagccgcagccaggaccagttcagtgacatgaggatcagcatcaaccagacccctgggaagagcctggactttggcttcaccatcaagtgggacatccctggcatctttgtggcctctgtggaggccggcagccctgctgagttcagccagctgcaggtggatgatgagatcatcgccatcaacaacaccaagttctcctacaatgacagcaaggagtgggaggaggccatggccaaggcccaggagaccggccacctggtgatggatgtgagaagatatggcaaggccggcagccctgagaccaagtggattgatgccaccagcggcatctacaacagcgagaagagcagcaacctgtctgtgaccacagacttcagcgagagcctgcagagcagcaacatcgagagcaaggagatcaatggcatccatgatgagagcaatgcctttgagagcaaggccagcgagagcatcagcctgaagaacctgaagaggaggagccagttctttgagcagggcagcagtgacagcgtggtgcctgacctgcctgtgcccaccatcagcgcccccagccgctgggtgtgggaccaggaggaggagaggaagaggcaggagcgctggcagaaggagcaggaccggctgctgcaggagaagtaccagcgggagcaggagaagctgcgggaggagtggcagagggccaagcaggaggccgagcgggagaacagcaagtacctggatgaggagctgatggtgctgagcagcaacagcatgagcctgaccacccgggagcccagcctggccacctgggaggccacctggagcgagggcagcaagagcagtgaccgggagggcacccgggccggggaggaggagcggcggcagccccaggaggaggtggtgcatgaggaccagggcaagaagccccaggaccagctggtgattgagcgggagaggaagtgggagcagcagctgcaggaggagcaggagcagaagaggctgcaggccgaggccgaggagcagaagaggcctgctgaggagcagaagaggcaggccgagattgaaagagagacctctgtgcgcatctaccagtacagaagacctgtggacagctatgacatccccaagacagaggaggccagcagcggcttcctgcccggggacaggaacaagagccgcagcaccacagagctggatgactacagcaccaacaagaatggaaacaacaagtacctggaccagatcggcaacatgaccagcagccagaggaggagcaagaaggagcaggtgcccagcggggctgagctggagcggcagcagatcctgcaggagatgaggaagaggacccccctgcacaatgacaacagctggatccggcagaggtctgcctctgtgaacaaggagcctgtgtccctgcccggcatcatgagaagaggagagagcctggacaacctggacagccccaggagcaacagctggaggcagcccccctggctgaaccagcccaccggcttctacgccagcagctctgtgcaggacttcagccggcccccaccccagctggtgtccaccagcaacagagcctacatgaggaaccccagcagctctgtgcccccaccttctgctggctctgtgaagaccagcaccaccggggtggccaccacccagagccccacccccaggagccacagccccagcgccagccagagcggcagccagctgagaaattctgtgctgcctgtgtctgtgaccagcgaggccctgccccaggagctgaagagcggcagcgagaccaccaactgcacagccaccacagccatcagtgacagcaacctggatggccagcccccctgtgatgtgtccctgcacaccaaggccctgctgcagatcgaggaggaggtggtggccgcccacgtggacctgtag

SEQ ID NO: 188116 - DNA, 4158 bp, Artificial Sequence
  derived and/or modified sequence
atgcaggactacaacaaggacgacatgagctaccggcggatcagcgccgtagaacctaaaacggccctccctttcaaccgttttctgcctaacaagtctcgccagccatcatatgttcccgccccactcagaaagaagaagcctgacaagcatgaggataaccgtaggtcttgggcctccccagtgtacacggaggctgacggcacattcagctctaatcaaaggagaatttgggggaccaacgtagagaattggccaacagtgcagggtacatccaaaagctcttgctacttagaggaggaaaaggcgaaaacgcggtcaatacctaacattgtgaaggatgacctgtatgtgagaaagcttagccctgtgatgcccaaccctggaaacgcctttgaccagttcctccccaagtgctggacacccgaggatgttaattggaaacggattaagagagagacctataagccatggtataaggagttccaaggcttctcacagttcctccttctacaggctctgcaaacctactccgacgacattctgagctctgagactcatacaaagatcgatcctacctcaggcccaaggttgatcacgcggaggaagaacctgtcatacgctcctggatacaggcgggatgacttggaaatggccgccttggatcctgatctcgagaacgatgatttctttgtgcggaagaccggggcttttcatgccaacccttacgtcttacgagcttttgaggactttaggaaattctctgaacaggatgatagcgtcgaacgagacataatcctgcagtgccgggagggagaactcgtcctgcccgacctcgagaaagatgatatgattgtgcggcgcattccagcacaaaaaaaagaggtgccattgtctggggcgccagacagataccaccctgtgcctttccccgagccatggacactgccgccggagatacaggccaagtttctgtgcgtgttggagcgaacgtgcccttcaaaagaaaagagcaatagctgcagaatcttggtaccctcttacagacagaaaaaggatgacatgctgaccaggaaaatccagagttggaaactggggacgacggtgccacctatctcatttaccccaggaccatgttcagaggccgacctgaagagatgggaagccatcagagaggcatccagactgagacataaaaaaaggttaatggtggagcgcctttttcagaagatctatggggaaaatggctcaaaatctatgtccgacgtgtccgccgaggatgtccagaacctgaggcagctgcgctacgaggaaatgcagaaaattaagagtcagctgaaggaacaggaccagaaatggcaagatgacctggcaaaatggaaggaccgccgcaaatcctacacctctgatctgcagaaaaagaaagaggaacgcgaggagattgaaaaacaggctctggagaaatccaagagaagctccaagacctttaaagaaatgttgcaggacagggagagccagaatcagaagagcaccgtgccgtccagacgcagaatgtacagctttgatgacgtgctggaggaggggaagaggccccctaccatgaccgtctctgaagctagttatcagagtgaacgagtagaagaaaagggagcgacatacccatccgagattcccaaggaggactctactacttttgctaagagagaggatcgagtgacgacagagatccaattacctagccagagtccagtcgaagaacaaagtcccgccagcctgtcttctctccgctctaggagtacacaaatggagagcactagagtgtcagcctccctaccccggtcttataggaaaacagacacagtgcgactgacatccgtagtaaccccacggccatttggctcacagactagagggatctcgagcctaccgcgatcatatacaatggatgacgcctggaagtataatggcgacgttgaagacataaaaaggacccctaacaatgtggttagcactcctgctccctctccagacgcgtctcagttagcctcatcgttatcgtctcagaaggaagtagccgctaccgaggaggatgtcacccgactgccatctccgactagcccgttttcttccctgagccaggaccaggctgctacatcaaaggcaacgttatccagtacttcaggcttagacctgatgtccgaaagtggcgagggcgagatcagcccccagcgggaggtgtcaaggtcacaggaccagttttccgatatgcggatctctattaaccagacccccggtaaatccctggattttggattcaccatcaaatgggacatcccgggaatttttgttgctagtgtggaggctggctctcccgccgagtttagtcagctgcaagtggatgatgagatcattgccattaataatacgaagtttagctacaacgattcaaaggagtgggaggaggcaatggctaaggcccaggagactggccatctggtcatggacgttcgtcggtacgggaaagcaggcagtccagagaccaaatggatagatgccacttccggcatctataattccgaaaaatcctctaacctcagtgtcacaacagatttttctgaatccctccagtcctcaaacatcgagagtaaagaaatcaatggaatccatgatgaatccaacgctttcgagagcaaggcctccgagtcaatttcgttgaaaaatcttaaacgtcgaagccagttctttgagcaaggctcaagcgactcagtggttccagatttgccagtccctacgatttcggcccccagtcgatgggtttgggaccaggaggaagaacgcaaaaggcaagagagatggcaaaaggagcaggatcgcttgttacaggagaagtaccaacgggaacaggaaaaattgagggaggagtggcagcgggctaagcaggaggcagagagagaaaatagcaagtatttggatgaggagctgatggtactgagttcaaattccatgtccctcacaactagggagccgtccctcgcaacctgggaggcaacctggtccgaaggcagcaaaagctctgatcgggaggggacccgggctggcgaggaggagcggcgccagcctcaggaggaggtggtccatgaagaccaagggaagaagccccaagatcagttggtcatcgaaagagagaggaagtgggaacagcaactgcaggaggagcaggagcaaaaacgcctgcaagcggaggctgaagaacaaaagagacccgctgaagaacaaaagagacaggccgagattgagagagagaccagtgtccgtatatatcagtatcggcgcccagtcgactcctatgatattccaaaaacagaagaggcttcgtcaggctttctgcctggcgatcgtaacaaaagcaggagtacaacagagctcgatgattattccacaaacaagaatggcaacaataaatatctagaccaaattggcaatatgacgagctctcagaggcgctctaagaaggaacaagtgcctagcggcgctgaacttgagagacagcagatactgcaggaaatgcgcaaacggacaccactgcacaacgacaattcttggatccgccaacgcagtgccagtgtgaataaggaacctgtttcgcttccgggaataatgagaagaggcgagagcctcgataatctggactctcctaggtcgaatagctggcgacagcccccatggcttaatcaacctaccggtttttatgcttctagttctgtgcaggacttctctcgccctccaccacagctggtgtctacctccaatagagcttacatgcggaatcctagcagcagcgtcccgcctccgagtgccgggagcgtgaaaaccagcacaacaggcgtagccacaactcaatcccccaccccccgcagccattccccctcagcgagtcaatctggctctcaactgagaaactcagtcttgcccgtgagcgttacgtccgaagctctcccccaggagctcaaatcggggtccgaaactacaaattgcaccgccacaacagcgatttcagattctaacctggacggacagccaccgtgcgacgtcagtcttcatacaaaggccttattgcagatcgaagaggaggtggtagccgcccacgtagatctgtag

SEQ ID NO: 188117 - DNA, 4158 bp, Artificial Sequence
  derived and/or modified sequence
atgcaggattacaataaggacgatatgtcttacaggagaatctccgctgttgagccaaagacagccctcccgtttaacagattcctgcctaacaaatccaggcagccctcatatgttcctgctcctctcagaaagaagaaaccagacaaacacgaagacaatcgcagaagttgggcctcccctgtttacaccgaggcagatggcacttttagctccaaccaacggagaatctggggcacgaacgtggaaaattggccaacagttcaaggcacttcaaaatccagttgctacctggaagaggaaaaagccaaaacacggagtattccgaacatcgtaaaagatgacttgtacgtaaggaaactgtcacctgtgatgccgaatccaggcaatgcctttgaccagtttctgcccaaatgttggactcccgaggacgtgaactggaagcgcatcaagcgcgagacctacaaaccctggtacaaggaatttcaggggttttcccagtttcttctgctacaggccctgcaaacttacagcgatgatattctatcatccgagacccacaccaaaattgaccctacctccggtccacgtttgatcacaaggcggaagaacctgagctatgcacctggctacagaagggacgacctggaaatggctgcactggacccggacctcgagaacgatgacttcttcgtgagaaaaacgggggcttttcacgccaatccgtacgtattacgggcatttgaagatttcaggaaattctcagaacaggacgactccgttgaacgtgatatcatccttcagtgtcgagagggcgagttagtgctgcccgacctggagaaagatgacatgatagtcagacgcattcccgcacagaaaaaggaggtgcctctgagtggtgcacccgataggtaccatcctgtgccgttccccgaaccctggaccttgcctcctgaaatccaagccaagttcctttgtgtcctggaaaggacttgcccaagcaaggagaaatcaaactcatgccggattttggtgccgtcttatagacagaagaaggatgatatgttgactcgcaagatacagtcttggaagttggggaccaccgtgccacccatttccttcactcctggcccttgttccgaggccgacctcaagagatgggaggccatcagggaggcatctagactccggcacaaaaagagactgatggtggagaggctcttccagaaaatttacggtgaaaatggcagcaaatctatgagtgacgtaagcgctgaggacgttcagaacctgcggcaactcaggtatgaggagatgcagaaaatcaagagtcagctgaaggaacaggatcaaaagtggcaagatgatctggctaagtggaaggatcggaggaaaagttatacctccgatcttcagaaaaagaaggaagaacgcgaggagattgaaaagcaggctctcgaaaaaagcaagcgtagctccaaaacattcaaagaaatgctgcaggacagagagtctcaaaaccaaaagtccacagtgcctagccggcgacggatgtactctttcgacgatgttctggaggaaggcaagcggcctcccactatgaccgtgagtgaagcctcgtaccagagcgagcgggtggaggagaagggagccacctacccttccgagatccccaaagaggattccaccacgttcgcaaaaagggaggacagagtgacaaccgagattcaattgcctagccaaagcccggttgaggagcagtccccagcaagccttagtagcctgagaagcaggtctacccagatggagagcacaagggtgagcgcatctctccctagatcctaccgaaagacagacactgtcaggcttaccagcgtcgtcaccccaagacccttcggtagtcagacccgcggaattagctcactgccaaggtcatataccatggacgacgcttggaaatacaacggggatgtggaggacataaaacgaactcccaacaatgttgtttctacccctgcgccaagtcctgatgcatcccagttagccagcagcctctccagccagaaggaggtcgcagcaacagaggaggacgtaacacgattgcctagtccgacatcgccctttagctccctaagccaagaccaggctgctacctccaaagccaccttgtcatctacctccggcctcgatctgatgagcgaatcgggggaaggagaaatttcccctcagagggaagtgtcaaggtctcaggaccaattcagcgacatgcggatatccatcaaccagacccccggtaagtctctagattttggttttactattaagtgggacatccctggcatctttgtggcgtcagtggaggcaggctcaccagctgagttttctcagttgcaggtagacgatgagatcatagctatcaataacacaaaatttagttataatgacagcaaagaatgggaggaggccatggcaaaagctcaggaaacgggacacctagtgatggacgtccgaaggtatggcaaggcagggtcaccagagacaaagtggatagacgctacgtcagggatctacaattctgagaagagcagcaaccttagcgtcaccacggacttctcagaatccctgcagtcatcaaacatagagtctaaggagattaacggcattcatgatgaaagtaacgcctttgagtcaaaagcgtccgaaagtatttcccttaaaaatctgaagaggcgttcccagttctttgaacaaggttctagtgattcggtggtaccggacttgccagtccctaccatctccgcaccttcccggtgggtatgggatcaggaggaggagcggaagagacaggaacgctggcagaaagagcaagacaggctgctgcaggaaaaataccagcgtgaacaggagaagctgagggaggaatggcagagagcaaaacaggaagctgagcgggaaaacagtaagtatctggacgaagagctgatggtgttgtcctctaactccatgagcctcactaccagggagcctagcctggcaacctgggaggctacctggagcgagggctctaaatcctctgatagagaaggcacaagggctggagaagaagaacggaggcagccccaggaagaagtagttcacgaggaccaaggcaagaaaccccaggaccagctggtgattgagagagaacgcaagtgggaacaacagctgcaggaggaacaggaacagaaaaggctccaggccgaggcagaagagcagaagagacccgctgaagaacagaagcgccaagcagaaatcgagagagaaacctcagtcaggatttaccagtaccggaggccagtggattcttatgacattcctaaaaccgaggaggcctctagtgggttccttcctggagatagaaacaagtctaggagtaccacagaacttgacgactattcaactaataagaacggaaacaataaatacttggatcagatcggtaacatgaccagctcacaacgaaggtccaagaaggagcaagtgccttctggagctgagctcgagcggcagcagatcttgcaagaaatgcgaaagagaactcctctgcacaatgataactcatggattcgacagcggtcagccagtgtgaataaggagccagtaagcctgcccggaattatgcgcagaggtgagtctctggataatctggactcacccagaagcaacagctggcgccaaccaccttggttgaaccagccaacgggattctacgccagcagttcagttcaggactttagccgcccacctcctcagctggtgtcaacaagcaatcgagcatatatgcgcaatcccagcagctctgtgccaccgccttctgcaggtagtgtaaagacatcaacaacaggtgtcgcaactacccagtctccgacaccacggtcacattctccgagtgcatctcaaagtggctctcagctacgcaattctgtgctgcccgtttctgtcactagtgaggctctgccgcaggagcttaagtccggcagtgaaaccaccaactgtacagccactacggcaatatcggactcaaacctggatggacagcctccctgcgatgtctcactgcacactaaagccctgcttcaaattgaggaggaggttgtggcagcccatgtcgatctctag

SEQ ID NO: 188118 - DNA, 4158 bp, Artificial Sequence
  derived and/or modified sequence
atgcaggactacaacaaggacgacatgagctacagaagaatcagcgccgtggagcccaagaccgccctgcccttcaacagattcctgcccaacaagagcagacagcccagctacgtgcccgcccccctgagaaagaagaagcccgacaagcacgaggacaacagaagaagctgggccagccccgtgtacaccgaggccgacggcaccttcagcagcaaccagagaagaatctggggcaccaacgtggagaactggcccaccgtgcagggcaccagcaagagcagctgctacctggaggaggagaaggccaagaccagaagcatccccaacatcgtgaaggacgacctgtacgtgagaaagctgagccccgtgatgcccaaccccggcaacgccttcgaccagttcctgcccaagtgctggacccccgaggacgtgaactggaagagaatcaagagagagacctacaagccctggtacaaggagttccagggcttcagccagttcctgctgctgcaggccctgcagacctacagcgacgacatcctgagcagcgagacccacaccaagatcgaccccaccagcggccccagactgatcaccagaagaaagaacctgagctacgcccccggctacagaagagacgacctggagatggccgccctggaccccgacctggagaacgacgacttcttcgtgagaaagaccggcgccttccacgccaacccctacgtgctgagagccttcgaggacttcagaaagttcagcgagcaggacgacagcgtggagagagacatcatcctgcagtgcagagagggcgagctggtgctgcccgacctggagaaggacgacatgatcgtgagaagaatccccgcccagaagaaggaggtgcccctgagcggcgcccccgacagataccaccccgtgcccttccccgagccctggaccctgccccccgagatccaggccaagttcctgtgcgtgctggagagaacctgccccagcaaggagaagagcaacagctgcagaatcctggtgcccagctacagacagaagaaggacgacatgctgaccagaaagatccagagctggaagctgggcaccaccgtgccccccatcagcttcacccccggcccctgcagcgaggccgacctgaagagatgggaggccatcagagaggccagcagactgagacacaagaagagactgatggtggagagactgttccagaagatctacggcgagaacggcagcaagagcatgagcgacgtgagcgccgaggacgtgcagaacctgagacagctgagatacgaggagatgcagaagatcaagagccagctgaaggagcaggaccagaagtggcaggacgacctggccaagtggaaggacagaagaaagagctacaccagcgacctgcagaagaagaaggaggagagagaggagatcgagaagcaggccctggagaagagcaagagaagcagcaagaccttcaaggagatgctgcaggacagagagagccagaaccagaagagcaccgtgcccagcagaagaagaatgtacagcttcgacgacgtgctggaggagggcaagagaccccccaccatgaccgtgagcgaggccagctaccagagcgagagagtggaggagaagggcgccacctaccccagcgagatccccaaggaggacagcaccaccttcgccaagagagaggacagagtgaccaccgagatccagctgcccagccagagccccgtggaggagcagagccccgccagcctgagcagcctgagaagcagaagcacccagatggagagcaccagagtgagcgccagcctgcccagaagctacagaaagaccgacaccgtgagactgaccagcgtggtgacccccagacccttcggcagccagaccagaggcatcagcagcctgcccagaagctacaccatggacgacgcctggaagtacaacggcgacgtggaggacatcaagagaacccccaacaacgtggtgagcacccccgcccccagccccgacgccagccagctggccagcagcctgagcagccagaaggaggtggccgccaccgaggaggacgtgaccagactgcccagccccaccagccccttcagcagcctgagccaggaccaggccgccaccagcaaggccaccctgagcagcaccagcggcctggacctgatgagcgagagcggcgagggcgagatcagcccccagagagaggtgagcagaagccaggaccagttcagcgacatgagaatcagcatcaaccagacccccggcaagagcctggacttcggcttcaccatcaagtgggacatccccggcatcttcgtggccagcgtggaggccggcagccccgccgagttcagccagctgcaggtggacgacgagatcatcgccatcaacaacaccaagttcagctacaacgacagcaaggagtgggaggaggccatggccaaggcccaggagaccggccacctggtgatggacgtgagaagatacggcaaggccggcagccccgagaccaagtggatcgacgccaccagcggcatctacaacagcgagaagagcagcaacctgagcgtgaccaccgacttcagcgagagcctgcagagcagcaacatcgagagcaaggagatcaacggcatccacgacgagagcaacgccttcgagagcaaggccagcgagagcatcagcctgaagaacctgaagagaagaagccagttcttcgagcagggcagcagcgacagcgtggtgcccgacctgcccgtgcccaccatcagcgcccccagcagatgggtgtgggaccaggaggaggagagaaagagacaggagagatggcagaaggagcaggacagactgctgcaggagaagtaccagagagagcaggagaagctgagagaggagtggcagagagccaagcaggaggccgagagagagaacagcaagtacctggacgaggagctgatggtgctgagcagcaacagcatgagcctgaccaccagagagcccagcctggccacctgggaggccacctggagcgagggcagcaagagcagcgacagagagggcaccagagccggcgaggaggagagaagacagccccaggaggaggtggtgcacgaggaccagggcaagaagccccaggaccagctggtgatcgagagagagagaaagtgggagcagcagctgcaggaggagcaggagcagaagagactgcaggccgaggccgaggagcagaagagacccgccgaggagcagaagagacaggccgagatcgagagagagaccagcgtgagaatctaccagtacagaagacccgtggacagctacgacatccccaagaccgaggaggccagcagcggcttcctgcccggcgacagaaacaagagcagaagcaccaccgagctggacgactacagcaccaacaagaacggcaacaacaagtacctggaccagatcggcaacatgaccagcagccagagaagaagcaagaaggagcaggtgcccagcggcgccgagctggagagacagcagatcctgcaggagatgagaaagagaacccccctgcacaacgacaacagctggatcagacagagaagcgccagcgtgaacaaggagcccgtgagcctgcccggcatcatgagaagaggcgagagcctggacaacctggacagccccagaagcaacagctggagacagcccccctggctgaaccagcccaccggcttctacgccagcagcagcgtgcaggacttcagcagaccccccccccagctggtgagcaccagcaacagagcctacatgagaaaccccagcagcagcgtgcccccccccagcgccggcagcgtgaagaccagcaccaccggcgtggccaccacccagagccccacccccagaagccacagccccagcgccagccagagcggcagccagctgagaaacagcgtgctgcccgtgagcgtgaccagcgaggccctgccccaggagctgaagagcggcagcgagaccaccaactgcaccgccaccaccgccatcagcgacagcaacctggacggccagcccccctgcgacgtgagcctgcacaccaaggccctgctgcagatcgaggaggaggtggtggccgcccacgtggacctgtag

SEQ ID NO: 188119 - protein, 549 aa, Artificial Sequence
  derived and/or modified sequence
MAEDWLDCPALGPGWKRREVFRKSGATCGRSDTYYQSPTGDRIRSKVELTRYLGPACDLTLFDFKQGILCYPAPKAHPVAVASKKRKKPSRPAKTRKRQVGPQSGEVRKEAPRDETKADTDTAPASFPAPGCCENCGISFSGDGTQRQRLKTLCKDCRAQRIAFNREQRMFKRVGCGECAACQVTEDCGACSTCLLQLPHDVASGLFCKCERRRCLRIVERSRGCGVCRGCQTQEDCGHCPICLRPPRPGLRRQWKCVQRRCLRGKHARRKGGCDSKMAARRRPGAQPLPPPPPSQSPEPTEPHPRALAPSPPAEFIYYCVDEDELKRLLPSVWSESEDGAGSPPPYRRRKRPSSARRHHLGPTLKPTLATRTAQPDHTQAPTKQEAGGGFVLPPPGTDLVFLREGASSPVQVPGPVAASTEALLQEAQCSGLSWVVALPQVKQEKADTQDEWTPGTAVLTSPVLVPGCPSKAVDPGLPSVKQEPPDPEEDKEENKDDSASKLAPEEEAGGAGTPVITEIFSLGGTRFRDTAVWLPRSKDLKKPGARKQ

SEQ ID NO: 188120 - DNA, 1650 bp, Artificial Sequence
  derived and/or modified sequence
atggccgaagactggctcgactgcccagccctcggcccggggtggaaaagaagagaggtctttaggaaatctggcgcaacttgtggacgatctgatacctactatcagtcccctaccggggaccgcattaggtccaaggtagagctgacccgttatctgggccccgcctgtgaccttactctgttcgactttaagcagggaattctttgttatccagccccgaaagcacaccctgttgctgtcgcatctaaaaagagaaaaaagccctcccgccctgctaaaacccggaaacgacaggtgggtccgcagtctggcgaggtgcgtaaagaggcccccagggacgagaccaaggctgataccgacaccgcacccgcctctttcccagcaccagggtgttgcgagaattgcgggatctcattttccggcgacggcacacaacgacagcggttgaagactctgtgcaaggattgtagggcacagcggatcgctttcaaccgggagcaaaggatgtttaaaagggtgggctgcggcgagtgcgctgcttgtcaagtgacagaagactgtggcgcatgtagtacgtgtctactccagctccctcatgacgttgcatccggactgttctgcaaatgtgagcggcgcaggtgccttcgcattgtcgaacgaagtcgcggctgcggtgtctgcaggggctgtcagacccaagaagattgtgggcattgtcccatttgtctacgccctccaagacctggcctccggcggcaatggaagtgtgtccagcgccgttgcttgagagggaaacacgctaggaggaagggcggatgtgactcgaaaatggctgcacgcagacgcccaggcgcccagcccctgccccccccaccaccaagccagagccccgaaccgaccgaaccacacccgcgcgcccttgccccaagccctcccgcagagtttatttactattgtgtggatgaggacgagcttaaaagactattgcctagtgtttggagtgaatctgaagacggtgccggctcccctccgccatacaggaggcgcaagcgaccttcatccgctcgccggcaccaccttgggccaactttgaagccgacccttgctacgaggacagcccaacctgaccatactcaggcacccaccaagcaagaagctggaggcggtttcgtcttgccaccaccgggaactgacctggtttttctgcgggagggagcttcttcaccagtgcaagtacctggtcccgtagctgcgtccactgaggcactgctgcaagaggcacagtgctctggcttgagttgggttgttgccctcccccaggtgaagcaggagaaagcagacacacaggatgagtggacacccggaactgccgtcttgacttctcccgtcttggtgccaggatgtccttccaaagcagtggatcctggactgccatccgtgaaacaggaacctcctgaccccgaggaagacaaagaagagaataaggacgactctgccagtaaattggcccccgaagaggaagcaggtggagctgggacgccagtcatcaccgaaatctttagcctggggggaacccgcttcagggataccgccgtgtggttgccaaggagcaaagatctgaaaaaaccaggagctagaaagcagtag

SEQ ID NO: 188121 - DNA, 1650 bp, Artificial Sequence
  derived and/or modified sequence
atggcagaagactggcttgactgcccggccctagggccagggtggaaacgacgcgaggtgtttcgtaaatccggcgcaacctgcggcagatctgacacctactatcagagcccaacaggagatcgcatacgctctaaagtcgaattgacgcggtatctcggcccggcctgcgacctcaccctgtttgattttaagcagggaatcttgtgctatcccgcccctaaagcccaccccgtggccgtggcaagtaagaagcggaagaagcctagcaggcctgccaagactcgaaaaagacaggtgggtccacaatccggcgaggtccgtaaagaggccccccgggatgaaacaaaagcggacactgacacagcccccgcgagtttccccgcgccagggtgttgcgaaaattgcggaatttccttttctggggacgggacgcagcgccagcggcttaaaaccctgtgtaaggattgtagagcccagcgtattgcctttaaccgcgaacaaagaatgtttaaaagagtggggtgtggggaatgcgccgcctgccaggttactgaggactgtggcgcttgttcaacatgtctcctccagttgccccatgacgtcgcgagtgggctgttctgcaagtgcgagaggcgccgctgtctccggatcgttgagcgatctcgagggtgtggtgtgtgccggggttgtcagacccaggaggattgcggacactgccccatctgtctgaggcctccacgacccggcttacgccgtcagtggaaatgtgtgcagagaaggtgtctgaggggtaagcacgcgcggcgaaaaggcggctgtgacagtaagatggccgccagacggcgacccggggcccaaccactgccccctcctccaccatcgcagtcgccggaaccaacagaaccccatcctagagcgctggccccttccccccctgctgaatttatatattactgcgtcgacgaggacgaactcaagcgcctcctccctagtgtgtggagcgaatcagaagatggcgccggatccccaccgccataccgcaggcgcaaacgcccttctagtgccagacggcatcatctggggccaacacttaagcccacactcgcgactagaactgctcagccagaccatacccaggcacctactaagcaggaggccggtggaggattcgtccttcccccccctggtaccgacttggtgttcctcagagaaggagccagctcccctgtccaagttcctggacccgtggccgctagcaccgaggcgttgttgcaggaggcgcagtgttcggggctgtcttgggttgtggccctaccccaggtgaagcaggagaaagcagatactcaagacgagtggacccccggtaccgccgtgttaacttcgcccgttctagtgccaggctgccccagtaaggccgtcgaccctggactcccatctgtcaaacaggaaccccccgatcccgaggaggacaaagaggaaaacaaagatgacagcgcgagtaaattggctcccgaagaggaagccggaggcgccggcacccccgtgattaccgagatcttttcgctggggggcacacgctttcgggacaccgctgtttggctccctcgatccaaggatctaaaaaaacccggggcccggaaacagtag

SEQ ID NO: 188122 - DNA, 1650 bp, Artificial Sequence
  derived and/or modified sequence
atggccgaggactggctggactgcccagccctgggccctggctggaagagaagagaggtgttcaggaagagcggggccacctgtggccgcagtgacacctactaccagagccccactggagaccgcatccgcagcaaggtggagctgacccgctacctgggccctgcctgtgacctgaccctgtttgacttcaagcagggcatcctgtgctacccagcccccaaggcccaccctgtggccgtggccagcaagaagaggaagaagcccagcaggcctgccaagaccaggaagaggcaggtgggcccccagagcggggaggtgaggaaggaggcccccagagatgagaccaaggctgacacagacacagccccagccagcttccctgcccctggctgctgtgagaactgtggcatctccttctctggagatggcacccagaggcagaggctgaagaccctgtgcaaggactgccgggcccagagaattgccttcaaccgggagcagaggatgttcaagagggtgggctgtggggagtgtgccgcctgccaggtgacagaggactgtggggcctgcagcacctgcctgctgcagctgccccatgatgtggccagcggcctcttctgcaagtgtgagcggcggcgctgcctgcgcatcgtggagaggagccggggctgcggcgtgtgccggggctgccagacccaggaggactgtggccactgccccatctgcctgcggccccccaggcctggcctgcggcggcagtggaagtgtgtgcagaggcgctgcctgcggggcaagcacgcccggaggaaaggaggctgtgacagcaagatggccgcccggcggcggcctggggcccagcccctgcccccacctccacccagccagagccctgagcccacagagccccacccccgggccctggcccccagccccccagctgagttcatctactactgtgtggatgaagatgagctgaagaggctgctgcccagcgtgtggagcgagagtgaagatggagctggcagccccccaccctacagaagaaggaagaggcccagcagcgcccggcggcaccacctgggccccaccctgaagcccaccctggccaccaggacagcccagcctgaccacacccaggcccccaccaagcaggaggccggcggcggctttgtgctgcccccacctggaacagacctggtgttcctgcgggagggcgccagcagccctgtgcaggtgcccggccctgtggccgccagcacagaggccctgctgcaggaggcccagtgcagcggcctgtcctgggtggtggccctgccccaggtgaagcaggagaaggctgacacccaggatgagtggaccccaggcacagctgtgctgaccagccctgtgctggtgcccggctgccccagcaaggctgtggaccccggcctgcccagcgtgaagcaggagcccccagaccctgaggaggacaaggaggagaacaaggatgattctgccagcaagctggcccctgaggaggaggccggcggggccggcacccctgtgatcacagagatcttcagcctgggcggcacccgcttccgggacacagctgtgtggctgcccaggagcaaggacctgaagaagccaggggccaggaagcagtag

SEQ ID NO: 188123 - DNA, 1845 bp, Artificial Sequence
  derived and/or modified sequence
gcgacagctaccgcttcagaggaggcggccgcggaggaggaggaaggggaggagggcgaggcgggaggtgcaggagggaccctcgccatgggtccacgggcctagagtggcggaagataccggcctggtgccaaactggctactgctgcttcctgtggcctccatggctgaggactggctggactgcccggccctgggccctggctggaagcgccgcgaagtctttcgcaagtcaggggccacctgtggacgctcagacacctattaccagagccccacaggagacaggatccgaagcaaagttgagctgactcgatacctgggccctgcgtgtgatctcaccctcttcgacttcaaacaaggcatcttgtgctatccagcccccaaggcccatcccgtggcggttgccagcaagaagcgaaagaagccttcaaggccagccaagactcggaaacgtcaggttggaccccagagtggtgaggtcaggaaggaggccccgagggatgagaccaaggctgacactgacacagccccagcttcattccctgctcctgggtgctgtgagaactgtggaatcagcttctcaggggatggcacccaaaggcagcggctcaaaacgttgtgcaaagactgtcgagcacagagaattgccttcaaccgggaacagagaatgtttaagcgtgtgggctgtggggagtgtgcagcctgccaggtaacagaagactgtggggcctgctccacctgcctcctgcagctgccccatgatgtggcatcggggctgttctgcaagtgtgaacggagacgctgcctccggattgtggaaaggagccgagggtgtggagtatgccggggctgtcagacccaagaggattgtggccattgccccatctgccttcgccctccccgccctggtctcaggcgccagtggaaatgtgtccagcgacgttgcctacggggtaaacatgcccgccgcaagggaggctgtgactccaagatggctgccaggcggcgccccggagcccagccactgcctccaccacccccatcacagtccccagagcccacagagccgcaccccagagccctggccccctcgccacctgccgagttcatctattactgtgtagacgaggacgagctaaagcggctgctgcccagtgtctggtcagagtctgaggatggggcaggatcgcccccaccttaccgtcgtcgaaagaggcccagctctgcccgacggcaccatcttggccctaccttgaagcccaccttggctacacgcacagcccaaccagaccatacccaggctccaacgaagcaggaagcaggtggtggctttgtgctgcccccgcctggcactgaccttgtgtttttacgggaaggcgcaagcagtcctgtgcaggtgccgggccctgttgcagcttccacagaagccctgttgcaggaggcccagtgctctggcctgagttgggttgtggccttaccccaggtgaagcaagagaaggcggatacccaggacgagtggacaccaggcacagctgtcctgacttctcccgtattggtgcctggctgccctagcaaggcagtagacccaggcctgccttctgtgaagcaagagccacctgacccagaggaggacaaggaggagaacaaggatgattctgcctccaaattggccccagaggaagaggcaggaggggctggcacacccgtgatcacggagattttcagcctgggtggaacccgcttccgagatacagcagtctggttgccaaggtccaaagaccttaaaaaacctggagctagaaagcagtagactggaggcttctacagactgtaggattcaag

SEQ ID NO: 188124 - DNA, 1650 bp, Artificial Sequence
  derived and/or modified sequence
atggccgaggactggctggactgccccgccctgggccccggctggaaaagacgtgaagtgttcagaaagagcggcgctacatgtggacgctctgatacttattatcagtcgccaacaggcgacaggattagatccaaagtggagctaacaaggtatctcgggccagcctgcgatttaactcttttcgatttcaagcaaggcatcttgtgctatcctgcgcctaaagcacatccagtggccgtggccagtaagaagcgcaagaagccaagtcgacctgctaaaacacgcaagaggcaggtgggcccccagagcggagaggtaaggaaagaagccccccgtgacgaaaccaaagcagataccgacaccgcccccgctagcttccctgccccaggttgttgtgagaactgcggaattagctttagcggtgatggaacccagcgtcagaggttgaagacgctttgcaaggattgcagagcacagcggatcgcctttaaccgcgagcagagaatgttcaaaagagtcgggtgtggagaatgtgccgcttgtcaggtgacagaagattgtggcgcatgcagcacctgcctgctgcagctaccccacgatgttgcaagcgggctcttttgcaaatgtgagagaagaagatgtctgcgcattgtggaaagaagtcgcggctgcggcgtatgtagggggtgccagacccaggaagactgtggccattgccctatttgccttcgtccccctagacctggattacgccggcagtggaagtgcgttcagagacggtgccttcgtggaaaacatgcacgacgcaagggcggctgcgactctaagatggctgcccggaggcgaccaggcgcccagccactgcccccgccgccccctagccagtcgcccgagccgactgagccacaccctagagcactagctccctcaccaccagctgagtttatttactactgtgtggatgaagacgaactgaagcgcctcctgccgtctgtgtggagcgagagcgaagatggcgcgggaagcccaccaccctacagaagacgtaagcgccctagtagcgcccgccggcaccatcttgggcctaccctgaagccaactctggcaacaaggaccgcccagcccgaccacacgcaggcccctacaaaacaggaagccggtggcggcttcgtgctgccaccccccgggaccgatcttgtcttcttacgcgagggggcctcctcacctgtgcaggtgcccggccccgtggccgcttcaacagaagcgttactgcaagaagcacagtgcagcggcctctcctgggtagtggctctaccacaagtgaaacaggaaaaagctgacacacaggacgaatggactccagggaccgcagtcctcacctcccctgttcttgtgcccggctgtccatcgaaggccgtggaccccggcctccccagtgtgaagcaggagccacccgatcccgaagaggataaggaggagaacaaagatgattctgcgagcaaattagctcctgaggaggaggcgggaggcgcaggtactcccgtcataacagaaatcttttcactgggcggaaccagattccgagataccgcagtctggcttccccggtcaaaggatctcaagaagcccggggcccgaaagcaatag

SEQ ID NO: 188125 - DNA, 1650 bp, Artificial Sequence
  derived and/or modified sequence
atggccgaggactggctggactgccccgccctgggccccggctggaaacggagggaggtgtttagaaaaagtggggcaacttgtggtcgatcagacacatattatcaatcacccaccggggatagaatcagatccaaagtggagttgacaagatacctgggccccgcgtgcgacttgaccctgttcgacttcaaacagggcatcctctgctaccctgcaccaaaagctcacccagtggccgtggcctctaagaagcgcaagaaaccttccaggcctgctaaaacaaggaaacggcaggtgggaccacaaagtggcgaggtacgcaaagaggccccccgggacgagactaaagctgacactgatacagcccccgccagcttccccgccccagggtgttgtgagaactgcggtatctcctttagcggagacggaacccaacgacagcgcctcaaaactctctgtaaagattgcagggcacagcggatagccttcaaccgggaacagcgtatgttcaaacgcgtgggctgtggcgagtgcgccgcttgtcaggttacagaggactgcggggcttgctccacctgccttttgcaactgccacacgacgtggcttcaggactcttttgcaagtgcgaaaggcgcagatgtctgcggattgtcgaacggtctcggggttgcggcgtttgccggggctgtcagactcaggaagattgtggccattgtccaatttgcttgcgccccccgcgacccggtctgcggcggcaatggaagtgcgtccagcgaagatgcctgcggggcaagcatgccaggaggaagggcggctgtgattctaaaatggcagctaggcgtcggccaggggcccagccactcccccccccaccaccctcccagagtccagaaccgaccgagccacatcctcgggcgctggccccttccccccccgcggagtttatctattactgcgtggatgaggatgaactgaaaaggctattgcctagcgtctggtccgagagcgaagatggggcaggatccccgcccccatataggcgaaggaagagaccaagctctgcccgaagacaccacctagggccgacactgaagcccaccttggctactagaactgcacagcctgaccatacccaggctccgacaaagcaggaggccggaggtggatttgtgttgcccccccccggtaccgacctggtgtttctaagagagggggcttccagccctgtgcaagtccccggtcccgttgccgccagcaccgaggctctgctccaggaagcccagtgttcaggtctgagttgggtcgtcgcattacctcaagtcaaacaggagaaggccgacacgcaggatgaatggacaccaggaacggcagtattgacctcacccgttttagtgcccggctgtccatcaaaagcagtcgatcccggcctcccttcagttaaacaagaacccccagaccccgaagaggacaaagaagagaacaaagacgatagcgccagtaagctcgccccagaggaggaggccggcggcgccggtaccccagttattactgagatctttagtctgggaggcacaaggtttagggataccgccgtgtggttgccaagatcaaaggatcttaaaaagcccggggcccgcaagcaatag

SEQ ID NO: 188126 - DNA, 1650 bp, Artificial Sequence
  derived and/or modified sequence
atggctgaagactggctggattgtccagcgcttgggcctggctggaagcgaagggaggtgttccgaaaaagcggcgcaacatgtggacggtctgatacatattaccaatcacccacaggggaccgaatcagaagtaaagtggagctcaccagatatctgggccctgcctgtgatcttacgttattcgacttcaagcagggaatactctgctatcctgcccctaaggcccacccagttgccgtagcctccaaaaaaaggaagaaaccttctcggcctgccaaaaccaggaaaagacaggttggccctcagtccggagaagtgaggaaagaggcgcctagggatgagaccaaggcagatacagacactgcaccagcctcttttcctgctcctgggtgctgcgaaaactgcggcatcagtttttcaggagatggcactcagaggcaaaggctcaagactctctgtaaggactgtcgcgcacaacggatcgcctttaacagggagcagcgtatgttcaaaagagtcggttgcggagaatgtgcagcctgccaggtgaccgaagattgtggggcatgcagcacttgcctcttgcagctgccccacgatgtggcatccggcctattctgtaagtgcgaaagaagacggtgtctccgcattgttgaacggagccgcggttgtggtgtctgtcgcggatgtcagactcaagaggattgcggccactgtcctatttgtttgaggccaccacgccctggcttacgacggcagtggaaatgcgtccagcgacgttgcctgcggggaaagcacgccagacgaaagggcggatgcgacagtaagatggctgctagacgacgcccaggcgctcagccactgcctcctcccccaccatctcagagccctgagcccaccgagccccatcctagagccctagcaccatcccccccagctgagtttatatattattgtgttgacgaggacgaacttaaaaggttactcccatctgtctggtcagaatccgaggacggcgcaggttctccaccaccttaccggaggagaaagcggccaagctccgcccgtaggcatcatctgggtccgactctgaaacccacgcttgccacgcgcactgcccaaccagatcacacacaggctccaacgaaacaggaggcagggggaggcttcgtgttacccccaccaggaacagacctcgtgttcctccgggaaggcgcatctagtccagtgcaggtgcctggacccgttgccgcatcaacagaagcattactccaggaagctcaatgctccggattgtcatgggttgttgccttacctcaggtgaagcaggagaaggccgacacacaggatgagtggactcccggaacagccgtgctgactagccctgttttggtgcccggatgtcccagcaaggccgtcgaccccggactaccgtctgtgaagcaggagccgccagaccctgaagaagataaggaagaaaacaaagacgatagtgctagtaaactcgcacccgaggaggaagctgggggagccggtacccctgtgattacagagatattctctctgggaggaactcggtttagggacaccgctgtgtggctaccgcgtagcaaagacctcaagaaaccaggtgcgagaaagcagtag

SEQ ID NO: 188127 - DNA, 1650 bp, Artificial Sequence
  derived and/or modified sequence
atggctgaggattggctggactgcccagccctcgggcctggatggaaacgcagggaggtgttcaggaaaagcggagcgacgtgtggcagatcagatacctactaccagagcccgactggagatagaatccgaagcaaagtggagctcacccgatatctgggtcctgcatgcgatttgaccctattcgactttaagcaggggatcctctgctaccctgcccctaaggcgcatcctgtcgcagtcgcttctaagaaacggaagaaaccttcacggcctgctaaaacccgcaagcgccaggtgggtccgcagagtggtgaagttagaaaggaagcccctagggatgagacgaaggcagacaccgacaccgctccggctagctttcctgccccaggttgttgtgaaaactgtggtatcagcttttctggcgacggaactcagcggcagcggctgaagaccctttgtaaggactgtagggctcagagaatagcatttaaccgtgagcagaggatgttcaaacgagtaggatgcggagaatgcgccgcatgccaagtgactgaggactgcggggcttgctcaacttgcctgctgcagttgccacacgatgtggcttctggtctcttctgtaagtgcgagcgcagacgttgcctccggatcgtagagcggtctagaggctgcggcgtatgccgcggatgtcagactcaggaagactgcgggcactgtcccatttgcttgcgtccacccaggcctggcctcaggcgacaatggaaatgcgtgcagaggaggtgcctccggggtaaacacgccagaaggaaagggggatgtgatagcaaaatggcagccaggcgcagacccggtgctcagcctctgcctcccccaccacccagccagtcccctgagcctactgagccccatcctagggcacttgcaccatccccacccgctgaatttatatattattgtgtggacgaggacgagctgaagcgtctgctcccgagtgtatggtctgagagtgaggatggggctggttctcctccaccgtacaggcgccgaaagcgacctagcagcgctcggaggcaccatctgggacccactctgaaacctacactcgctacacggaccgctcagcctgaccatacccaggcccctacaaaacaggaggccggagggggattcgtactacctccgccaggtaccgatctcgtgttcctgcgtgagggcgcttcttcacccgtgcaagttccaggccctgtagctgcctctactgaagctctgctgcaagaggcacagtgttccggacttagctgggtcgtggctcttccccaggttaagcaggaaaaagctgacacccaggatgagtggacccccggaacggcggtacttacatccccagtgctcgttcccggttgccctagtaaggctgttgaccctggcctgcccagcgtgaaacaggaaccgccagacccagaggaagataaggaggagaataaagatgattctgcttcaaaattagcccctgaggaggaggctggtggtgctggcactcctgttataacagaaatcttttctctcggcggtactcgcttcagggatacagccgtctggttgcctaggtccaaagacttgaagaagccaggggcaagaaagcagtag

SEQ ID NO: 188128 - DNA, 1650 bp, Artificial Sequence
  derived and/or modified sequence
atggccgaggactggctggactgccccgccctgggccccggctggaagagaagagaggtgttcagaaagagcggcgccacctgcggcagaagcgacacctactaccagagccccaccggcgacagaatcagaagcaaggtggagctgaccagatacctgggccccgcctgcgacctgaccctgttcgacttcaagcagggcatcctgtgctaccccgcccccaaggcccaccccgtggccgtggccagcaagaagagaaagaagcccagcagacccgccaagaccagaaagagacaggtgggcccccagagcggcgaggtgagaaaggaggcccccagagacgagaccaaggccgacaccgacaccgcccccgccagcttccccgcccccggctgctgcgagaactgcggcatcagcttcagcggcgacggcacccagagacagagactgaagaccctgtgcaaggactgcagagcccagagaatcgccttcaacagagagcagagaatgttcaagagagtgggctgcggcgagtgcgccgcctgccaggtgaccgaggactgcggcgcctgcagcacctgcctgctgcagctgccccacgacgtggccagcggcctgttctgcaagtgcgagagaagaagatgcctgagaatcgtggagagaagcagaggctgcggcgtgtgcagaggctgccagacccaggaggactgcggccactgccccatctgcctgagaccccccagacccggcctgagaagacagtggaagtgcgtgcagagaagatgcctgagaggcaagcacgccagaagaaagggcggctgcgacagcaagatggccgccagaagaagacccggcgcccagcccctgcccccccccccccccagccagagccccgagcccaccgagccccaccccagagccctggcccccagcccccccgccgagttcatctactactgcgtggacgaggacgagctgaagagactgctgcccagcgtgtggagcgagagcgaggacggcgccggcagcccccccccctacagaagaagaaagagacccagcagcgccagaagacaccacctgggccccaccctgaagcccaccctggccaccagaaccgcccagcccgaccacacccaggcccccaccaagcaggaggccggcggcggcttcgtgctgcccccccccggcaccgacctggtgttcctgagagagggcgccagcagccccgtgcaggtgcccggccccgtggccgccagcaccgaggccctgctgcaggaggcccagtgcagcggcctgagctgggtggtggccctgccccaggtgaagcaggagaaggccgacacccaggacgagtggacccccggcaccgccgtgctgaccagccccgtgctggtgcccggctgccccagcaaggccgtggaccccggcctgcccagcgtgaagcaggagccccccgaccccgaggaggacaaggaggagaacaaggacgacagcgccagcaagctggcccccgaggaggaggccggcggcgccggcacccccgtgatcaccgagatcttcagcctgggcggcaccagattcagagacaccgccgtgtggctgcccagaagcaaggacctgaagaagcccggcgccagaaagcagtag

SEQ ID NO: 188129 - protein, 586 aa, Artificial Sequence
  derived and/or modified sequence
MAEDWLDCPALGPGWKRREVFRKSGATCGRSDTYYQSPTGDRIRSKVELTRYLGPACDLTLFDFKQGILCYPAPKAHPVAVASKKRKKPSRPAKTRKRQVGPQSGEVRKEAPRDETKADTDTAPASFPAPGCCENCGISFSGDGTQRQRLKTLCKDCRAQRIAFNREQRMFKRVGCGECAACQVTEDCGACSTCLLQLPHDVASGLFCKCERRRCLRIVERSRGCGVCRGCQTQEDCGHCPICLRPPRPGLRRQWKCVQRRCLRGKHARRKGGCDSKMAARRRPGAQPLPPPPPSQSPEPTEPQPYTNRRQNRKCGACAACLRRMDCGRCDFCCDKPKFGGSNQKRQKCRWRQCLQFAMKRLLPSVWSESEDGAGSPPPYRRRKRPSSARRHHLGPTLKPTLATRTAQPDHTQAPTKQEAGGGFVLPPPGTDLVFLREGASSPVQVPGPVAASTEALLQAVDPGLPSVKQEPPDPEEDKEENKDDSASKLAPEEEAGGAGTPVITEIFSLGGTRFRDTAVWLPSLQGRHSGREDGCKVWETEDTVEPTSTSWNPRGWPGTHVSLSPPPASMMWVSCRRSWCPSSQS

SEQ ID NO: 188130 - DNA, 1761 bp, Artificial Sequence
  derived and/or modified sequence
atggctgaagactggttggattgccccgctctggggcccggctggaaacgacgcgaggtttttagaaagagcggcgcaacttgtggccgttcagacacctattaccagagtccaactggcgatcgcatccggagtaaagtcgagcttaccagatacctgggcccagcgtgcgatttgacactgttcgactttaaacagggtatcctttgttaccctgcacccaaagcccacccagtggctgtggcgagcaagaaacggaagaagcccagcagaccggccaagactaggaagaggcaggtaggtccacagtccggcgaggttcggaaggaggccccgcgcgacgagacaaaagcggacactgacacagccccggccagctttcctgccccaggctgctgcgagaactgcggaatttcgttttcgggcgacggcactcagagacagaggctaaagaccttgtgtaaagattgccgggcccagcggattgcgttcaacagagaacagaggatgttcaagcgcgttggctgcggcgagtgtgcagcttgtcaggtaaccgaagactgcggcgcttgttccacttgcctgctgcagcttccccacgatgtcgcctccggcctgttctgcaagtgcgaacggcggcggtgtctgcggattgtcgagcgctctcgcggatgtggagtctgtaggggttgtcagacccaggaagattgtggtcactgtcccatctgtctgcgccccccacggccaggtctccgcagacagtggaaatgcgtacaacgacggtgtctgcgaggcaaacacgctagacggaaggggggctgtgattcaaagatggctgccagacgtaggccaggagctcaacctcttccacccccccctccctctcagagcccagagcccaccgagccccaaccctataccaaccgccgccaaaatcggaagtgtggcgcttgcgccgcatgcctgcgcagaatggattgtggcagatgcgacttctgctgcgataagcctaaatttggcggtagtaatcaaaagcggcagaagtgccgatggcgccagtgcttgcagtttgctatgaaaagattgctgcccagtgtctggagcgagtccgaggatggagccggttcccctcctccatatcggagacggaaacggccgtcaagtgcccgccgccatcatttgggaccaacgctcaagcccacactggcgacccgcacggcacagcccgatcatacacaagccccaaccaaacaggaggcaggcggcgggtttgtgctgcctcctccaggaaccgatcttgtatttctgcgcgagggagctagcagcccagtgcaagtcccaggccctgtggctgcaagcaccgaagcgctgctgcaggccgtggaccccggactgccctccgttaaacaggagccacccgacccagaagaggataaggaggagaataaagacgacagcgcttctaaactagcacctgaagaggaggccgggggagctggcacccctgtgattaccgagatatttagccttggagggactagattcagagacacagcagtctggctccctagcctgcagggccgccacagcggtcgcgaagacggctgtaaagtgtgggaaacggaggacacggttgaaccaacctcaaccagttggaacccaagggggtggcccgggacacacgtcagcctgtccccgccccctgcttccatgatgtgggtttcctgtagacgttcatggtgtccctcgagtcagtcgtag

SEQ ID NO: 188131 - DNA, 1761 bp, Artificial Sequence
  derived and/or modified sequence
atggccgaggactggctggactgcccagccctgggccctggctggaagagaagagaggtgttcaggaagagcggggccacctgtggccgcagtgacacctactaccagagccccactggagaccgcatccgcagcaaggtggagctgacccgctacctgggccctgcctgtgacctgaccctgtttgacttcaagcagggcatcctgtgctacccagcccccaaggcccaccctgtggccgtggccagcaagaagaggaagaagcccagcaggcctgccaagaccaggaagaggcaggtgggcccccagagcggggaggtgaggaaggaggcccccagagatgagaccaaggctgacacagacacagccccagccagcttccctgcccctggctgctgtgagaactgtggcatctccttctctggagatggcacccagaggcagaggctgaagaccctgtgcaaggactgccgggcccagagaattgccttcaaccgggagcagaggatgttcaagagggtgggctgtggggagtgtgccgcctgccaggtgacagaggactgtggggcctgcagcacctgcctgctgcagctgccccatgatgtggccagcggcctcttctgcaagtgtgagcggcggcgctgcctgcgcatcgtggagaggagccggggctgcggcgtgtgccggggctgccagacccaggaggactgtggccactgccccatctgcctgcggccccccaggcctggcctgcggcggcagtggaagtgtgtgcagaggcgctgcctgcggggcaagcacgcccggaggaaaggaggctgtgacagcaagatggccgcccggcggcggcctggggcccagcccctgcccccacctccacccagccagagccctgagcccacagagccccagccctacaccaacagacggcagaacagaaaatgtggggcctgtgccgcctgcctgcggaggatggactgtggccgctgtgacttctgctgtgacaagcccaagtttggaggcagcaaccagaagaggcagaagtgccgctggaggcagtgcctgcagtttgccatgaagaggctgctgcccagcgtgtggagcgagagtgaagatggagctggcagccccccaccctacagaagaaggaagaggcccagcagcgcccggcggcaccacctgggccccaccctgaagcccaccctggccaccaggacagcccagcctgaccacacccaggcccccaccaagcaggaggccggcggcggctttgtgctgcccccacctggaacagacctggtgttcctgcgggagggcgccagcagccctgtgcaggtgcccggccctgtggccgccagcacagaggccctgctgcaggccgtggaccccggcctgcccagcgtgaagcaggagcccccagaccctgaggaggacaaggaggagaacaaggatgacagcgccagcaagctggcccctgaggaggaggccggcggggccggcacccctgtgatcacagagatcttcagcctgggcggcacccgcttccgggacacagctgtgtggctgcccagcctgcagggccgccacagcggcagagaagatggctgcaaggtgtgggagacagaggacacagtggagcccaccagcacctcctggaacccccggggctggccaggcacccacgtgtccctgagccccccaccagcctccatgatgtgggtgtcctgcagaagatcctggtgccccagcagccagagctag

SEQ ID NO: 188132 - DNA, 2980 bp, Artificial Sequence
  derived and/or modified sequence
aaagcgcatgcgccagctagatgggcagcgaggagagccgcaactgccagtccctcgaaggggttagctgtcgttgaacgtcagcacgcagatgcaactggctctcggcaggggggcgcgcgcaccgctgcggagcgccggcccgtaggcgcgggagcctccctattaagggcacgcgacatcgaggcaatagtgcgcaggtgcttagccagaggcggagcccgagaggcaggcagcggacttccggttccgggagcaacgaacagccgcggaggcgacagctaccgcttcagaggaggcggccgcggaggaggaggaaggggaggagggcgaggcgggaggtgcaggagggaccctcgccatgggtccacgggcctagagtggcggaagataccggcctggtgccaaactggctactgctgcttcctgtggcctccatggctgaggactggctggactgcccggccctgggccctggctggaagcgccgcgaagtctttcgcaagtcaggggccacctgtggacgctcagacacctattaccagagccccacaggagacaggatccgaagcaaagttgagctgactcgatacctgggccctgcgtgtgatctcaccctcttcgacttcaaacaaggcatcttgtgctatccagcccccaaggcccatcccgtggcggttgccagcaagaagcgaaagaagccttcaaggccagccaagactcggaaacgtcaggttggaccccagagtggtgaggtcaggaaggaggccccgagggatgagaccaaggctgacactgacacagccccagcttcattccctgctcctgggtgctgtgagaactgtggaatcagcttctcaggggatggcacccaaaggcagcggctcaaaacgttgtgcaaagactgtcgagcacagagaattgccttcaaccgggaacagagaatgtttaagcgtgtgggctgtggggagtgtgcagcctgccaggtaacagaagactgtggggcctgctccacctgcctcctgcagctgccccatgatgtggcatcggggctgttctgcaagtgtgaacggagacgctgcctccggattgtggaaaggagccgagggtgtggagtatgccggggctgtcagacccaagaggattgtggccattgccccatctgccttcgccctccccgccctggtctcaggcgccagtggaaatgtgtccagcgacgttgcctacggggtaaacatgcccgccgcaagggaggctgtgactccaagatggctgccaggcggcgccccggagcccagccactgcctccaccacccccatcacagtccccagagcccacagagccgcagccctacacgaaccgccggcagaaccgcaagtgcggggcctgtgcagcctgcctacggcggatggactgtggccgctgcgacttctgctgcgacaagcccaaattcgggggcagcaaccagaagcgccagaagtgtcgttggcgccaatgcctgcagtttgccatgaagcggctgctgcccagtgtctggtcagagtctgaggatggggcaggatcgcccccaccttaccgtcgtcgaaagaggcccagctctgcccgacggcaccatcttggccctaccttgaagcccaccttggctacacgcacagcccaaccagaccatacccaggctccaacgaagcaggaagcaggtggtggctttgtgctgcccccgcctggcactgaccttgtgtttttacgggaaggcgcaagcagtcctgtgcaggtgccgggccctgttgcagcttccacagaagccctgttgcaggcagtagacccaggcctgccttctgtgaagcaagagccacctgacccagaggaggacaaggaggagaacaaggatgattctgcctccaaattggccccagaggaagaggcaggaggggctggcacacccgtgatcacggagattttcagcctgggtggaacccgcttccgagatacagcagtctggttgccaagtctgcagggcaggcactcgggaagggaagatggatgtaaagtgtgggagaccgaggacacagtggagcccacgagcacgagctggaacccacgaggatggcctggaacccatgtcagtctctcaccacctccagcttcgatgatgtgggtgtcctgcagaagaagctggtgcccttcctcacagagttaaatatgcatctggcccaggaattagagaagctgaaaggatgatcctggggaaggtggagcagctgcaggcctggctgcaggcctgactactgcccacaccaacgaggtgatctagcagatacatggcaacgtgtgaactgcaacaacgcctggtgccccagcaccaaccttccaagtgtaaaaacaatgtgctgctgcttcacttccgccctccggttatcaagcaaaatgtctcttgtggcccatcttactggaagagagttccgggaaacatagcctcaccaaggtgacacattacaaagccaccctaccatgaatccgctcccaagggtctcactgctcacctgaggataactcaatataactatgtggctgaaaatgcaaagctgaagaccatggatttcatggtgattccagcaagtacagagattctatgaagcccacccagaaaaaacttgctggtcctggctatttttgtgtcatttattcaagtattgagaacctggcctgtggtaggcactgtacttaatactaggatacagaaatgcaaaagatacggcccatgcaattttattaaatgcatcaatatgtattacaaatggtgaatggatttccaactttatcatggaatttaatgctgaatatatagaattcagaaaattgttgggaggacagcccttttgtgaaccttgtttggggcacagtaggaattggaaataatttagtttctatctctaagctgttctattttaaaattatttttaaatttttattgtcccactt

SEQ ID NO: 188133 - DNA, 3052 bp, Artificial Sequence
  derived and/or modified sequence
aaagcgcatgcgccagctagatgggcagcgaggagagccgcaactgccagtccctcgaaggggttagctgtcgttgaacgtcagcacgcagatgcaactggctctcggcaggggggcgcgcgcaccgctgcggagcgccggcccgtaggcgcgggagcctccctattaagggcacgcgacatcgaggcaatagtgcgcaggtgcttagccagaggcggagcccgagaggcaggcagcggacttccggttccgggagcaacgaacagccgcggaggcgacagctaccgcttcagaggaggcggccgcggaggaggaggaaggggaggagggcgaggcgggaggtgcaggagggaccctcgccatgggtccacgggcctagagtggcggaagataccggcctggtgccaaactggctactgctgcttcctgtggcctccatggctgaggactggctggactgcccggccctgggccctggctggaagcgccgcgaagtctttcgcaagtcaggggccacctgtggacgctcagacacctattaccagagccccacaggagacaggatccgaagcaaagttgagctgactcgatacctgggccctgcgtgtgatctcaccctcttcgacttcaaacaaggcatcttgtgctatccagcccccaaggcccatcccgtggcggttgccagcaagaagcgaaagaagccttcaaggccagccaagactcggaaacgtcaggttggaccccagagtggtgaggtcaggaaggaggccccgagggatgagaccaaggctgacactgacacagccccagcttcattccctgctcctgggtgctgtgagaactgtggaatcagcttctcaggggatggcacccaaaggcagcggctcaaaacgttgtgcaaagactgtcgagcacagagaattgccttcaaccgggaacagagaatgtttaagcgtgtgggctgtggggagtgtgcagcctgccaggtaacagaagactgtggggcctgctccacctgcctcctgcagctgccccatgatgtggcatcggggctgttctgcaagtgtgaacggagacgctgcctccggattgtggaaaggagccgagggtgtggagtatgccggggctgtcagacccaagaggattgtggccattgccccatctgccttcgccctccccgccctggtctcaggcgccagtggaaatgtgtccagcgacgttgcctacggggtaaacatgcccgccgcaagggaggctgtgactccaagatggctgccaggcggcgccccggagcccagccactgcctccaccacccccatcacagtccccagagcccacagagccgcagccctacacgaaccgccggcagaaccgcaagtgcggggcctgtgcagcctgcctacggcggatggactgtggccgctgcgacttctgctgcgacaagcccaaattcgggggcagcaaccagaagcgccagaagtgtcgttggcgccaatgcctgcagtttgccatgaagcggctgctgcccagtgtctggtcagagtctgaggatggggcaggatcgcccccaccttaccgtcgtcgaaagaggcccagctctgcccgacggcaccatcttggccctaccttgaagcccaccttggctacacgcacagcccaaccagaccatacccaggctccaacgaagcaggaagcaggtggtggctttgtgctgcccccgcctggcactgaccttgtgtttttacgggaaggcgcaagcagtcctgtgcaggtgccgggccctgttgcagcttccacagaagccctgttgcaggcagtagacccaggcctgccttctgtgaagcaagagccacctgacccagaggaggacaaggaggagaacaaggatgattctgcctccaaattggccccagaggaagaggcaggaggggctggcacacccgtgatcacggagattttcagcctgggtggaacccgcttccgagatacagcagtctggttgccaaggtccaaagaccttaaaaaacctggagctagaaagcagtagactggaggcttctacagactgtaggattcaagtctgcagggcaggcactcgggaagggaagatggatgtaaagtgtgggagaccgaggacacagtggagcccacgagcacgagctggaacccacgaggatggcctggaacccatgtcagtctctcaccacctccagcttcgatgatgtgggtgtcctgcagaagaagctggtgcccttcctcacagagttaaatatgcatctggcccaggaattagagaagctgaaaggatgatcctggggaaggtggagcagctgcaggcctggctgcaggcctgactactgcccacaccaacgaggtgatctagcagatacatggcaacgtgtgaactgcaacaacgcctggtgccccagcaccaaccttccaagtgtaaaaacaatgtgctgctgcttcacttccgccctccggttatcaagcaaaatgtctcttgtggcccatcttactggaagagagttccgggaaacatagcctcaccaaggtgacacattacaaagccaccctaccatgaatccgctcccaagggtctcactgctcacctgaggataactcaatataactatgtggctgaaaatgcaaagctgaagaccatggatttcatggtgattccagcaagtacagagattctatgaagcccacccagaaaaaacttgctggtcctggctatttttgtgtcatttattcaagtattgagaacctggcctgtggtaggcactgtacttaatactaggatacagaaatgcaaaagatacggcccatgcaattttattaaatgcatcaatatgtattacaaatggtgaatggatttccaactttatcatggaatttaatgctgaatatatagaattcagaaaattgttgggaggacagcccttttgtgaaccttgtttggggcacagtaggaattggaaataatttagtttctatctctaagctgttctattttaaaattatttttaaatttttattgtcccactt

SEQ ID NO: 188134 - DNA, 1761 bp, Artificial Sequence
  derived and/or modified sequence
atggccgaggactggctggactgccccgccctgggccccggctggaaacgacgggaggtgttcagaaagtcaggagctacatgcggacgctctgacacctactatcagagcccaaccggggatcggatccggagtaaggtcgaactaacaagataccttgggcccgcctgtgacctgacactgtttgactttaagcagggcatcctctgctacccagctcccaaggcacacccagtggcagtggcttccaagaaacgcaaaaaaccatcaagaccagctaaaaccaggaagaggcaggtgggcccacagtcaggggaagtgcgaaaagaggcccctcgggacgaaacaaaagccgacacagacactgctccagcaagtttccccgcacccggttgctgcgaaaattgcgggatatccttctcaggcgacgggactcaaagacagaggctgaagactctgtgcaaggattgccgggcacaaaggatcgcattcaacagagagcagagaatgtttaagagggttgggtgtggagaatgcgctgcctgtcaagtgaccgaagactgcggagcctgctctacctgcctcctacaactgccacacgatgtggcatccggcctgttttgtaagtgtgagagacgccgatgtctgcggatagtggagagatccaggggctgtggagtttgcagggggtgccagacacaggaagactgcggacactgccccatatgcttgcgaccgccccgtccaggcctgcgcaggcagtggaaatgtgtgcagcgaaggtgccttcgaggaaagcacgccagaaggaaggggggctgtgacagtaaaatggccgcacgccggcggcctggcgcccagcccctgccgccgccaccccccagccaatcccccgaacccaccgaacctcaaccttatacaaaccgcagacagaatcgtaagtgcggggcgtgtgcggcctgtcttagacgtatggactgcggcagatgtgatttctgttgcgataagcctaagttcggcggatccaatcagaagcggcaaaagtgcagatggcgtcagtgtctccagtttgcgatgaagagacttctgccctcggtctggagcgaaagcgaagacggcgcaggctcaccccccccgtaccgaaggcgcaaacggccaagcagtgctcgcagacatcaccttgggcccacattgaaacctaccctggctactcggacggcccagcctgatcacactcaggccccaacgaaacaggaagccggaggcgggttcgttctccctccacctggaacagacctcgtatttctgagagaaggcgcttcctcgccagtgcaggtcccgggcccagtggccgcaagtactgaagccctactgcaagctgttgaccctggcctcccaagcgtaaagcaggagcctcccgatccagaggaggacaaggaagagaacaaagatgattctgcctcaaaactcgctccagaggaggaagccggcggagccgggacacccgtgatcactgagatcttcagcttaggaggaactagattcagagacacagcagtttggctaccttcccttcaaggcaggcacagtggtcgggaggacggatgcaaggtgtgggaaaccgaggataccgtggaacccactagcacctcttggaaccccagagggtggccgggtacccacgtgagcctttctccccccccagcaagcatgatgtgggtaagttgccgtcgctcttggtgtccctccagtcagagctag

SEQ ID NO: 188135 - DNA, 1761 bp, Artificial Sequence
  derived and/or modified sequence
atggctgaggattggttggattgtccagcacttgggccaggttggaaaaggcgagaagtgtttcgcaaatccggagcaacatgcggacgctcagacacctattaccagtcccccaccggagatcgcattcgctctaaggtggaacttacaagatacctgggcccagcctgcgacctcacgttgttcgatttcaaacaggggatcctgtgctatcccgcaccgaaagcccaccccgtggcggtggccagtaaaaagcggaagaagccatccagacctgccaaaactcgaaaaaggcaagtgggtcctcaaagcggggaagtgaggaaagaagccccaagggacgagacaaaggctgacacagacaccgcccctgctagtttcccagctccgggttgctgcgaaaactgcggtatcagctttagtggggatggaacgcaaagacaaaggctcaagacactgtgcaaagactgcagggcgcagcggatcgcctttaacagagaacagcggatgttcaagcgtgttgggtgtggagagtgtgcggcttgccaagtgacagaggactgcggtgcttgcagcacttgtctgctgcaactgccacacgacgtggcctctggtctcttctgcaagtgtgagcggaggaggtgtttgaggatcgttgaaaggtctagaggatgcggcgtgtgtcgaggatgccagacccaggaggattgcggtcattgccccatctgcctgcgcccacccaggccagggctgagacgccagtggaagtgcgttcagcgcagatgtttgcgaggaaaacacgcaagacggaagggaggctgtgactcaaaaatggcagcgcgtcgcaggcctggggcacagcctctgcccccaccacccccaagtcagtccccagaacctaccgaacctcagccctatactaatcgacgccagaaccggaaatgcggggcttgtgcggcatgtctgcggagaatggactgtggcagatgtgacttctgctgtgacaagccgaagtttggtggatccaaccaaaagaggcagaaatgcaggtggaggcagtgccttcaattcgccatgaagcgccttcttcctagcgtatggtcagagtctgaggatggcgctggaagtccacccccttaccgcaggaggaagcgaccatcgagtgctcgtagacatcacctgggtcctacgcttaagcctacccttgctacacggactgcccagcctgatcatacgcaggccccaacaaagcaggaagctggcggaggttttgtcttgccaccgccaggcacagacctggtctttctcagggaaggggcttcatccccggtgcaagtcccaggcccagtggctgcttctactgaagcactgctccaggcagtggacccagggctgccatctgtgaagcaagagccaccagacccagaagaggataaagaggagaataaggatgattcagcctctaagctcgcacctgaggaggaagcgggaggcgctggaactcctgtgataaccgaaatcttttctctgggcggaacccggttcagggacaccgccgtatggcttccctcactgcaggggagacactccggaagggaggatggatgtaaggtgtgggagacagaggacaccgtagagcctacatcaactagttggaatccacgaggttggcccggaacccatgtttcactatcacctccgcctgcctcaatgatgtgggtgtcttgcaggagaagctggtgtcccagttctcagtcctag

SEQ ID NO: 188136 - DNA, 1761 bp, Artificial Sequence
  derived and/or modified sequence
atggccgaggactggctggactgccccgccctgggccccggctggaagagaagagaggtgttcagaaagagcggcgccacctgcggcagaagcgacacctactaccagagccccaccggcgacagaatcagaagcaaggtggagctgaccagatacctgggccccgcctgcgacctgaccctgttcgacttcaagcagggcatcctgtgctaccccgcccccaaggcccaccccgtggccgtggccagcaagaagagaaagaagcccagcagacccgccaagaccagaaagagacaggtgggcccccagagcggcgaggtgagaaaggaggcccccagagacgagaccaaggccgacaccgacaccgcccccgccagcttccccgcccccggctgctgcgagaactgcggcatcagcttcagcggcgacggcacccagagacagagactgaagaccctgtgcaaggactgcagagcccagagaatcgccttcaacagagagcagagaatgttcaagagagtgggctgcggcgagtgcgccgcctgccaggtgaccgaggactgcggcgcctgcagcacctgcctgctgcagctgccccacgacgtggccagcggcctgttctgcaagtgcgagagaagaagatgcctgagaatcgtggagagaagcagaggctgcggcgtgtgcagaggctgccagacccaggaggactgcggccactgccccatctgcctgagaccccccagacccggcctgagaagacagtggaagtgcgtgcagagaagatgcctgagaggcaagcacgccagaagaaagggcggctgcgacagcaagatggccgccagaagaagacccggcgcccagcccctgcccccccccccccccagccagagccccgagcccaccgagccccagccctacaccaacagaagacagaacagaaagtgcggcgcctgcgccgcctgcctgagaagaatggactgcggcagatgcgacttctgctgcgacaagcccaagttcggcggcagcaaccagaagagacagaagtgcagatggagacagtgcctgcagttcgccatgaagagactgctgcccagcgtgtggagcgagagcgaggacggcgccggcagcccccccccctacagaagaagaaagagacccagcagcgccagaagacaccacctgggccccaccctgaagcccaccctggccaccagaaccgcccagcccgaccacacccaggcccccaccaagcaggaggccggcggcggcttcgtgctgcccccccccggcaccgacctggtgttcctgagagagggcgccagcagccccgtgcaggtgcccggccccgtggccgccagcaccgaggccctgctgcaggccgtggaccccggcctgcccagcgtgaagcaggagccccccgaccccgaggaggacaaggaggagaacaaggacgacagcgccagcaagctggcccccgaggaggaggccggcggcgccggcacccccgtgatcaccgagatcttcagcctgggcggcaccagattcagagacaccgccgtgtggctgcccagcctgcagggcagacacagcggcagagaggacggctgcaaggtgtgggagaccgaggacaccgtggagcccaccagcaccagctggaaccccagaggctggcccggcacccacgtgagcctgagccccccccccgccagcatgatgtgggtgagctgcagaagaagctggtgccccagcagccagagctag

SEQ ID NO: 188137 - protein, 556 aa, Artificial Sequence
  derived and/or modified sequence
MAEDWLDCPALGPGWKRREVFRKSGATCGRSDTYYQSPTGDRIRSKVELTRYLGPACDLTLFDFKQGILCYPAPKAHPVAVASKKRKKPSRPAKTRKRQVGPQSGEVRKEAPRDETKADTDTAPASFPAPGCCENCGISFSGDGTQRQRLKTLCKDCRAQRIAFNREQRMFKSRGCGVCRGCQTQEDCGHCPICLRPPRPGLRRQWKCVQRRCLRGKHARRKGGCDSKMAARRRPGAQPLPPPPPSQSPEPTEPHPRALAPSPPAEFIYYCVDEDELQPYTNRRQNRKCGACAACLRRMDCGRCDFCCDKPKFGGSNQKRQKCRWRQCLQFAMKRLLPSVWSESEDGAGSPPPYRRRKRPSSARRHHLGPTLKPTLATRTAQPDHTQAPTKQEAGGGFVLPPPGTDLVFLREGASSPVQVPGPVAASTEALLQEAQCSGLSWVVALPQVKQEKADTQDEWTPGTAVLTSPVLVPGCPSKAVDPGLPSVKQEPPDPEEDKEENKDDSASKLAPEEEAGGAGTPVITEIFSLGGTRFRDTAVWLPRSKDLKKPGARKQ

SEQ ID NO: 188138 - DNA, 1671 bp, Artificial Sequence
  derived and/or modified sequence
atggctgaagactggcttgattgcccagcattgggtcccggatggaaacggcgggaagtatttagaaaatcaggtgctacttgcgggcggtccgatacatattaccaatctcccacaggcgacaggattaggtctaaggtagagctcactcggtatttagggcccgcctgcgatctgacattgtttgacttcaaacagggaatcctctgctaccccgccccgaaggcgcaccctgtggcagtggctagcaaaaagcgtaagaaacccagtcgccctgcaaaaaccaggaaaagacaggtcggacctcagtccggcgaagtgcggaaggaggcccctagggacgagacgaaggccgatacggataccgcaccggcatcttttcccgccccggggtgttgtgagaattgtggcatttccttctcgggggacggaactcagcggcagcggcttaagacgctatgcaaagattgtagagcacaacgcattgcttttaacagggagcagcgtatgttcaaaagcagaggctgcggagtgtgtcggggctgtcagactcaggaagactgcggccactgtccaatatgccttcgcccacctcggccaggccttagacggcagtggaagtgtgtgcagcgtcgctgcctacgagggaagcatgctaggagaaaaggaggttgcgattctaaaatggctgctaggcggcgcccaggtgctcagcccctgccaccccctccaccatcacaaagccccgagcctaccgagccacatccccgagcactggcaccgtcaccccctgccgaattcatttactactgtgtcgacgaagacgagttacagccctacactaaccgacgtcagaaccgcaagtgcggagcctgtgccgcttgcttgcgccggatggattgtggtcgttgtgatttctgctgcgacaaaccaaagtttggcgggtccaatcagaagagacagaaatgtaggtggcgacagtgcctccagttcgctatgaaaaggcttctgcccagcgtttggagtgaatcagaagatggagcaggcagccccccaccttacaggagacgcaagagaccaagctctgcacgacggcatcatttaggtcccaccctgaagccaacattggccactagaaccgcccaacctgaccacactcaagcccccactaaacaagaggcgggcgggggattcgtcctcccacccccaggcacagacctggtgttcctgcgtgagggtgcttctagccccgtgcaggtgccagggccagtcgcagccagtactgaagctctactgcaggaggctcaatgtagcggcctaagctgggtggtcgccctcccccaggttaagcaagaaaaagccgatacccaagacgaatggaccccagggactgccgtgctgactagcccagttcttgtgcccggatgccccagtaaagcagtggatcccggactgccttccgtcaagcaggagccgcctgatcctgaagaagacaaagaggagaacaaggacgattcagccagcaaactggctcctgaagaggaggccggtggggcaggaaccccggttattacagagatcttcagcctgggcgggacgcggtttagagatacggccgtttggctgccacgctctaaggacctgaaaaagcctggagcgaggaagcaatag

SEQ ID NO: 188139 - DNA, 1671 bp, Artificial Sequence
  derived and/or modified sequence
atggccgaggactggctggactgcccagccctgggccctggctggaagagaagagaggtgttcaggaagagcggggccacctgtggccgcagtgacacctactaccagagccccactggagaccgcatccgcagcaaggtggagctgacccgctacctgggccctgcctgtgacctgaccctgtttgacttcaagcagggcatcctgtgctacccagcccccaaggcccaccctgtggccgtggccagcaagaagaggaagaagcccagcaggcctgccaagaccaggaagaggcaggtgggcccccagagcggggaggtgaggaaggaggcccccagagatgagaccaaggctgacacagacacagccccagccagcttccctgcccctggctgctgtgagaactgtggcatctccttctctggagatggcacccagaggcagaggctgaagaccctgtgcaaggactgccgggcccagagaattgccttcaaccgggagcagaggatgttcaagagccggggctgcggcgtgtgccggggctgccagacccaggaggactgtggccactgccccatctgcctgcggcccccccggcccggcctgcggcggcagtggaagtgtgtgcagaggcgctgcctgcggggcaagcacgcccggaggaagggcggctgtgacagcaagatggccgccaggagaagacctggggcccagcccctgcccccacctccacccagccagagccctgagcccacagagccccacccccgggccctggcccccagccccccagctgagttcatctactactgtgtggatgaagatgagctgcagccctacaccaacagacggcagaacagaaaatgtggggcctgtgccgcctgcctgcggaggatggactgtggccgctgtgacttctgctgtgacaagcccaagtttggaggcagcaaccagaagaggcagaagtgccgctggaggcagtgcctgcagtttgccatgaagaggctgctgcccagcgtgtggagcgagagtgaagatggagctggcagccccccaccctacagaagaaggaagaggcccagcagcgcccggcggcaccacctgggccccaccctgaagcccaccctggccaccaggacagcccagcctgaccacacccaggcccccaccaagcaggaggccggcggcggctttgtgctgcccccacctggaacagacctggtgttcctgcgggagggcgccagcagccctgtgcaggtgcccggccctgtggccgccagcacagaggccctgctgcaggaggcccagtgcagcggcctgtcctgggtggtggccctgccccaggtgaagcaggagaaggctgacacccaggatgagtggaccccaggcacagctgtgctgaccagccctgtgctggtgcccggctgccccagcaaggctgtggaccccggcctgcccagcgtgaagcaggagcccccagaccctgaggaggacaaggaggagaacaaggatgacagcgccagcaagctggcccctgaggaggaggccggcggggccggcacccctgtgatcacagagatcttcagcctgggcggcacccgcttccgggacacagctgtgtggctgcccaggagcaaggacctgaagaagccaggggccaggaagcagtag

SEQ ID NO: 188140 - DNA, 1671 bp, Artificial Sequence
  derived and/or modified sequence
atggccgaggactggctggactgccccgccctgggccccggctggaagcgcagggaggtattcagaaaaagtggcgcaacctgcggacggtctgatacatactaccagtcacctaccggcgatcgcattagatcaaaggttgaactcacccggtacctgggcccagcatgtgacctgactctcttcgatttcaagcaaggaatcctatgctatcctgccccaaaggcccacccagtcgccgtggcgtccaagaagcgcaagaagccatcccgacctgctaaaacaaggaagcgccaggtggggccccagtccggagaggtacgaaaggaggcccccagagatgaaaccaaggccgatacagacaccgcgcctgcctccttcccggcccccggttgttgcgaaaattgcggcatctcgttttcaggtgatggaacccagaggcagaggcttaaaacactgtgcaaagattgtcgcgcccaacgcattgcattcaaccgtgaacagcgcatgtttaagtcaagaggctgcggtgtgtgcagaggttgccaaactcaggaggattgcggccattgtcccatctgcctgaggcctcctcgtcccgggctacgtagacagtggaagtgtgttcagagacggtgtctccgcggaaagcatgcacgccgaaagggaggatgtgattcaaaaatggctgctcgaaggagaccaggcgcacaacctctgcctccaccgcctccatcacagtcgccagaacccacggagccccaccctagggcattggcaccctcaccccctgctgagttcatctactactgcgtggacgaagatgagctacaaccctatacaaacagacggcaaaatcgcaagtgtggggcttgtgccgcttgccttcgacgtatggactgtggcaggtgcgacttctgctgtgacaagccaaagttcggggggagcaaccagaagcggcagaagtgccgttggcggcagtgtctgcaatttgccatgaagcgactgctacccagcgtgtggtccgagagcgaggacggggcagggtcccctcccccttaccgtcgtcgaaagagacctagcagcgctcgtcgccatcatctgggcccgaccctgaagccaacactcgccactcgaacagctcaaccagaccatactcaggctcccactaagcaggaagctggggggggttttgtcctgcccccacctggcaccgatctagtgttcttgcgggagggcgcgtcaagtcccgtacaagtgcctggacccgtggctgcatcaaccgaagccttgctccaggaagcccagtgttctgggctatcatgggtggtggcactgccccaggtaaagcaggaaaaggccgacacacaggacgagtggactccaggaacagcagtgttaactagccctgtgcttgtcccagggtgtccaagcaaggcggttgacccaggcctgccgagcgtaaagcaggaacccccagacccagaagaggacaaagaagagaataaggacgattcagcctccaagctcgcgcccgaagaggaggcaggaggcgctggtacacctgtgataacggagatcttctctctggggggtacaagatttcgggatacggctgtgtggctacctaggagtaaagacctcaagaaaccaggagcccggaaacaatag

SEQ ID NO: 188141 - DNA, 1671 bp, Artificial Sequence
  derived and/or modified sequence
atggccgaagactggctggattgccccgctctggggcctgggtggaaacgccgagaagtgtttcggaaatctggagcaacttgcggccgtagtgacacctactatcaatcccctactggggatcgcatcaggtccaaggtggaactgacgagatatctcggccctgcctgtgatctcactctcttcgacttcaagcaaggcatcctctgctaccctgctccaaaagcccatcccgtggccgtggccagtaaaaaaagaaagaaaccaagtcgaccggcaaagactcgcaagaggcaggttggtcctcagagcggtgaggtgaggaaggaagcaccacgcgatgaaacaaaggcagacacggacactgcgccagcatccttcccggctcctggctgttgcgagaattgcggcatttcgttcagcggggacggtacccagcggcagcggctaaaaacactgtgtaaggactgccgtgcgcagcggatagctttcaatagggagcagcgcatgttcaagtcccggggttgcggggtctgcaggggatgtcagacgcaggaagactgcggccactgcccaatctgcctgaggccaccaagacctgggctaagaagacagtggaaatgcgtgcagcgaagatgcctccgtggcaaacacgcccgaaggaaaggtggctgtgactccaaaatggctgcgcgtcggcgtccaggtgcccaacctctgcccccaccgccaccgagccaatcacccgaacctaccgaaccccacccacgcgctttggcaccatcgccgccagccgagttcatctactactgcgtcgacgaggacgagctccaaccttataccaatcggaggcaaaaccgcaaatgcggagcatgcgccgcttgtcttagacgaatggattgtggacgttgcgatttctgctgcgacaagcctaaatttggcggttctaaccagaagcgacagaaatgcaggtggaggcagtgtctgcagttcgccatgaagcgcctcctacctagcgtgtggagcgaatccgaagatggagccggaagcccaccaccgtaccggcgtcgtaaacggccttcctccgccaggcgacaccacctgggacctactctgaaacccactctcgctaccaggacagcccagccagatcacacgcaggcacctacgaagcaagaggccggtggaggctttgtgctcccaccaccaggtacagaccttgtgtttcttcgggaaggcgcatcatctcctgtacaggtccctggccctgtggcggcttcaacagaggccctcctccaggaagctcagtgctcaggcctctcctgggtcgtggcactgccacaggtgaagcaggagaaggccgatacacaggacgagtggaccccagggaccgctgtgctaaccagccctgtcctagtacccggatgtccttccaaggctgtcgatccaggactgccgtccgtgaaacaagaaccccctgatccagaagaagacaaggaggaaaacaaagacgactctgcatccaaactcgcgccagaagaggaagctggcggagcaggcacgccggtgatcaccgagatcttctccctcggtggcacccgattccgggacacagccgtgtggttgccccgatccaaagacctgaaaaaacccggagcccgtaagcaatag

SEQ ID NO: 188142 - DNA, 1671 bp, Artificial Sequence
  derived and/or modified sequence
atggccgaggactggctggactgccccgccctgggccccggctggaagagaagagaggtgttcagaaagagcggcgccacctgcggcagaagcgacacctactaccagagccccaccggcgacagaatcagaagcaaggtggagctgaccagatacctgggccccgcctgcgacctgaccctgttcgacttcaagcagggcatcctgtgctaccccgcccccaaggcccaccccgtggccgtggccagcaagaagagaaagaagcccagcagacccgccaagaccagaaagagacaggtgggcccccagagcggcgaggtgagaaaggaggcccccagagacgagaccaaggccgacaccgacaccgcccccgccagcttccccgcccccggctgctgcgagaactgcggcatcagcttcagcggcgacggcacccagagacagagactgaagaccctgtgcaaggactgcagagcccagagaatcgccttcaacagagagcagagaatgttcaagagcagaggctgcggcgtgtgcagaggctgccagacccaggaggactgcggccactgccccatctgcctgagaccccccagacccggcctgagaagacagtggaagtgcgtgcagagaagatgcctgagaggcaagcacgccagaagaaagggcggctgcgacagcaagatggccgccagaagaagacccggcgcccagcccctgcccccccccccccccagccagagccccgagcccaccgagccccaccccagagccctggcccccagcccccccgccgagttcatctactactgcgtggacgaggacgagctgcagccctacaccaacagaagacagaacagaaagtgcggcgcctgcgccgcctgcctgagaagaatggactgcggcagatgcgacttctgctgcgacaagcccaagttcggcggcagcaaccagaagagacagaagtgcagatggagacagtgcctgcagttcgccatgaagagactgctgcccagcgtgtggagcgagagcgaggacggcgccggcagcccccccccctacagaagaagaaagagacccagcagcgccagaagacaccacctgggccccaccctgaagcccaccctggccaccagaaccgcccagcccgaccacacccaggcccccaccaagcaggaggccggcggcggcttcgtgctgcccccccccggcaccgacctggtgttcctgagagagggcgccagcagccccgtgcaggtgcccggccccgtggccgccagcaccgaggccctgctgcaggaggcccagtgcagcggcctgagctgggtggtggccctgccccaggtgaagcaggagaaggccgacacccaggacgagtggacccccggcaccgccgtgctgaccagccccgtgctggtgcccggctgccccagcaaggccgtggaccccggcctgcccagcgtgaagcaggagccccccgaccccgaggaggacaaggaggagaacaaggacgacagcgccagcaagctggcccccgaggaggaggccggcggcgccggcacccccgtgatcaccgagatcttcagcctgggcggcaccagattcagagacaccgccgtgtggctgcccagaagcaaggacctgaagaagcccggcgccagaaagcagtag

SEQ ID NO: 188143 - protein, 638 aa, Artificial Sequence
  derived and/or modified sequence
MNRQVCKKSFSGRSQGFSGRSAVVSGSSRMSCVARSGGAGGGACGFRSGAGSFGSRSLYNLGSNKSISISVAAGSSRAGGFGGGRSSCGFAGGYGGGFGGSYGGGFGGGRGVGSGFGGAGGFGGAGGFGGPGVFGGPGSFGGPGGFGPGGFPGGIQEVIVNQSLLQPLNVEIDPQIGQVKAQEREQIKTLNNKFASFIDKVRFLEQQNKVLETKWELLQQQTTGSGPSSLEPCFESYISFLCKQLDSLLGERGNLEGELKSMQDLVEDFKKKYEDEINKRTAAENEFVGLKKDVDAAFMNKVELQAKVDSLTDEVSFLRTLYEMELSQMQSHASDTSVVLSMDNNRCLDLGSIIAEVRAQYEEIAQRSKSEAEALYQTKLGELQTTAGRHGDDLRNTKSEIMELNRMIQRLRAEIENVKKQNANLQTAIAEAEQRGEMALKDANAKLQDLQTALQKAKDDLARLLRDYQELMNVKLALDVEIATYRKLLEGEECRMSGECQSAVCISVVSNVTSTSGSSGSSRGVFGGVSGSGSGGYKGGSSSSSSSGYGVSGGSGSGYGGVSSGSTGGRGSSGSYQSSSSGSRLGGAGSISVSHSGMGSSSGSIQTSGGSGYKSGGGGSTSIRFSQTTSSSQHSSTK

SEQ ID NO: 188144 - DNA, 1917 bp, Artificial Sequence
  derived and/or modified sequence
atgaacagacaggtgtgcaagaagagcttcagcggcagaagccagggcttcagcggcagaagcgccgtggtgagcggcagcagcagaatgagctgcgtggccagaagcggcggcgccggcggcggcgcctgcggcttcagaagcggcgccggcagcttcggcagcagaagcctgtacaacctgggcagcaacaagagcatcagcatcagcgtggccgccggcagcagcagagccggcggcttcggcggcggcagaagcagctgcggcttcgccggcggctacggcggcggcttcggcggcagctacggcggcggcttcggcggcggcagaggcgtgggcagcggcttcggcggcgccggcggcttcggcggcgccggcggcttcggcggccccggcgtgttcggcggccccggcagcttcggcggccccggcggcttcggccccggcggcttccccggcggcatccaggaggtgatcgtgaaccagagcctgctgcagcccctgaacgtggagatcgacccccagatcggccaggtgaaggcccaggagagagagcagatcaagaccctgaacaacaagttcgccagcttcatcgacaaggtgagattcctggagcagcagaacaaggtgctggagaccaagtgggagctgctgcagcagcagaccaccggcagcggccccagcagcctggagccctgcttcgagagctacatcagcttcctgtgcaagcagctggacagcctgctgggcgagagaggcaacctggagggcgagctgaagagcatgcaggacctggtggaggacttcaagaagaagtacgaggacgagatcaacaagagaaccgccgccgagaacgagttcgtgggcctgaagaaggacgtggacgccgccttcatgaacaaggtggagctgcaggccaaggtggacagcctgaccgacgaggtgagcttcctgagaaccctgtacgagatggagctgagccagatgcagagccacgccagcgacaccagcgtggtgctgagcatggacaacaacagatgcctggacctgggcagcatcatcgccgaggtgagagcccagtacgaggagatcgcccagagaagcaagagcgaggccgaggccctgtaccagaccaagctgggcgagctgcagaccaccgccggcagacacggcgacgacctgagaaacaccaagagcgagatcatggagctgaacagaatgatccagagactgagagccgagatcgagaacgtgaagaagcagaacgccaacctgcagaccgccatcgccgaggccgagcagagaggcgagatggccctgaaggacgccaacgccaagctgcaggacctgcagaccgccctgcagaaggccaaggacgacctggccagactgctgagagactaccaggagctgatgaacgtgaagctggccctggacgtggagatcgccacctacagaaagctgctggagggcgaggagtgcagaatgagcggcgagtgccagagcgccgtgtgcatcagcgtggtgagcaacgtgaccagcaccagcggcagcagcggcagcagcagaggcgtgttcggcggcgtgagcggcagcggcagcggcggctacaagggcggcagcagcagcagcagcagcagcggctacggcgtgagcggcggcagcggcagcggctacggcggcgtgagcagcggcagcaccggcggcagaggcagcagcggcagctaccagagcagcagcagcggcagcagactgggcggcgccggcagcatcagcgtgagccacagcggcatgggcagcagcagcggcagcatccagaccagcggcggcagcggctacaagagcggcggcggcggcagcaccagcatcagattcagccagaccaccagcagcagccagcacagcagcaccaagtag

SEQ ID NO: 188145 - DNA, 2529 bp, Artificial Sequence
  derived and/or modified sequence
atccctctcagctcttgctaagtgatcactagcttgcctccaagctctctcactatgaacagacaagtttgcaagaaatccttcagtggcaggagccagggtttctctggccgctctgctgtggtctccggcagcagcaggatgagctgtgtggcccgctctgggggagctggtggaggggcctgtggcttcaggagcggagcaggcagctttggcagtcgcagcctctacaacctgggcagcaacaagagcatctccatcagcgtggcagctggcagctcccgggctggaggctttgggggagggcggagcagctgtggctttgcaggtggctatggaggtggctttgggggcagctatggtggtggctttggtggtggcagaggagtaggtagtggttttggaggggctggtggctttggtggagctggtggctttggtggtcctggtgtatttggtgggcctggcagctttggtggtcctggtggctttggccctgggggctttcctgggggaattcaggaagtgattgtaaaccagagtctcctgcagcccctcaatgtggagatcgacccccagattgggcaagtaaaggcccaggagcgggaacagatcaagaccctcaacaacaagtttgcctccttcatcgacaaggtgcggttcctggaacagcagaacaaggtcctggagaccaagtgggaactgctccagcagcagaccacaggctcagggcccagcagcctggagccttgttttgaatcctacatcagcttcctatgcaagcagctagattcacttctaggggagagggggaacctggagggagagctgaaaagcatgcaggacctggtggaagacttcaaaaagaagtatgaagatgaaatcaacaaacgcactgccgcagagaatgagtttgtggggctcaagaaggatgtggatgcggctttcatgaacaaggtggagctgcaggccaaagtggacagcctgacagatgaagtcagcttcctgaggaccctctatgagatggagctgtcccagatgcaaagccatgccagtgacacgtctgtggttctgtccatggacaacaaccgctgcctggacctgggcagcatcattgccgaggtccgcgcccagtatgaggagattgcccagaggagcaagtctgaagctgaggccctgtaccagaccaagcttggggagctgcagaccacagctggcaggcatggggatgacctgaggaacaccaagagtgagatcatggagctcaacaggatgatccagaggctacgggctgagattgaaaatgtcaagaagcagaatgccaacctgcagacggcaattgcagaggctgagcagcgtggagagatggccctcaaggacgccaatgccaagctccaagacttgcagactgccctacagaaggctaaggatgacctggctcggctcctgcgtgactaccaggagctgatgaacgtcaagctggccctggatgtggagattgccacctaccgcaagctgctggagggagaggagtgcaggatgtctggagaatgtcagagtgccgtgtgcatttcagtggtcagcaatgtcaccagcacaagtggcagctctggcagtagccgtggagtttttggaggggtcagtggcagtggcagtggtggctacaaaggcggcagcagcagcagcagcagcagtggctatggagtcagtggcggcagcggcagtggctatggaggggtcagcagtggcagcactgggggcaggggtagcagcgggagctaccagagcagcagtagtgggagcaggctcggcggtgcaggtagcatctccgtgagccacagtggaatgggctccagctctggcagcatccagacttctggaggaagtggctacaagtctggtggtggaggcagcaccagtatccgcttctcccagaccacgagctcaagccagcatagctccaccaagtgatctactgttccaaatctctataaccacctgcttcccactcagcctgcaatagtgtttcccactctctgcttggcatcaatagatgcataagggtcaaccacatttttcctcaagttccctggagaagaagctgaactcctggtttctccatccccatgaccttcccagggccatggaggtcctgctgctggtctgggatgatgatgcccctggaaaccttcctgcaatggccccttactttggacagcaacccctgagcccaagccagttttggccttcacagcctggcctgttcccactctggcccatctccctttcttactgggagttggagatttgaagccagtcatctcagcactgtctgaggagggcagagccatgggttctgtgctggagggtgcacggccaagatctccagactgctggttcccagggaaccctccctacatctgggcttcagatcctgactcccttctgtcccctaattccctgagctgtagatcctctggtgatgagtatgttgcactttcttttctcaataaattgcactgaacttca

SEQ ID NO: 188146 - DNA, 1917 bp, Artificial Sequence
  derived and/or modified sequence
atgaatcggcaagtctgtaaaaagtcctttagcggcagatcccagggcttttccgggcgaagcgctgtcgtttccgggtccagcaggatgtcctgcgtggccagatccggtggcgcaggaggaggagcatgcggcttcagaagtggcgcgggaagctttggctcgcgatctctgtataatctgggctctaataagtcgatcagtatttccgtggccgctggcagcagtagagccggaggatttggaggaggtcggagttcctgcggcttcgctggcgggtatggcggcggcttcggcgggagttacgggggaggattcggcggtggtagaggtgtggggtctggctttgggggcgctgggggtttcgggggcgccggcgggtttggaggacccggggttttcggtggacctggctcttttggtgggccgggagggtttggtccaggtggctttcccgggggaatccaggaagtgattgtcaatcaaagcctgctccagcccctgaacgttgagattgacccacaaatcggccaagtgaaggctcaggagagagagcagataaaaacactgaataacaagttcgcttccttcatagacaaggttcgtttcctcgaacaacagaataaggtgcttgagactaagtgggaactcctgcaacaacagactactggctctggaccatccagtctggagccgtgcttcgaatcatatattagctttttatgtaaacagcttgattccctgctaggcgaacgcggcaatctggagggcgagctgaagtcgatgcaagatttggtggaagattttaaaaagaaatatgaggacgagatcaacaagagaaccgccgcggagaacgagtttgtcgggttgaagaaagatgtggatgccgctttcatgaacaaggtggaattgcaggccaaagttgattctctcacagacgaagtctcctttctaagaacgttatatgagatggagctgtcgcagatgcagagccatgcctctgacaccagtgtggtattaagcatggataataaccgatgcctggacttggggtcaataatcgctgaggttcgagctcaatatgaagagattgcgcagcggagtaaaagcgaagctgaggccctataccagacaaagttgggcgagctccagacaactgcgggaaggcatggggatgatttaagaaacactaagagcgaaattatggaactgaatcgaatgattcaacgactccgagcagaaatcgaaaacgtaaagaaacagaacgctaacctccagaccgcgattgctgaagccgagcagaggggtgagatggccctaaaagatgcgaacgcaaagctgcaggaccttcaaaccgccctgcagaaagcaaaggacgacctggcgagactgttgcgagactaccaggagttgatgaacgtgaagctggctctcgatgtggaaatcgcaacgtaccgcaagctgttggaaggcgaggagtgcaggatgagcggcgaatgtcagagtgcagtgtgtatatccgtggtgtcaaatgttacttcaacctctggatcgagcggtagctcgaggggcgtgttcggtggagtgagcggcagcggaagcggaggatataaggggggcagctcttcttcatcctcaagcgggtatggggtatcaggtggcagcggaagtgggtacggtggagtgtcttcaggcagcacgggaggacgggggtcctcaggctcttatcaatcctccagttctgggtcccgcctgggcggggccggttcaatttcggtctctcactctggcatgggcagttctagcggcagcatccaaactagtggcgggtcaggctacaagtccggcggcggcggttccacatcaataagattctctcagacgacttccagcagccagcactcctccacaaaatag

SEQ ID NO: 188147 - DNA, 1917 bp, Artificial Sequence
  derived and/or modified sequence
atgaaccggcaggtgtgcaagaagagcttcagcggccgcagccagggcttcagcggccgctctgctgtggtgtctggcagcagcaggatgagctgtgtggcccggagcggcggggccggcggcggggcctgtggcttccgcagcggggccggcagctttggcagccgcagcctgtacaacctgggcagcaacaagagcatcagcatctctgtggccgccggcagcagccgggccggcggctttggaggcggccgcagcagctgtggctttgctgggggctacggcggcggctttggaggcagctatggaggcggctttggaggcggccggggcgtgggcagcggctttggaggagctgggggctttggaggagctgggggctttggaggccctggggtgtttggaggccctggcagctttggaggccctgggggcttcggccctgggggcttccctgggggcatccaggaggtgattgtgaaccagagcctgctgcagcccctgaatgtggagattgacccccagatcggccaggtgaaggcccaggagcgggagcagatcaagaccctgaacaacaagtttgccagcttcatcgacaaggtgcgcttcctggagcagcagaacaaggtgctggagaccaagtgggagctgctgcagcagcagaccactggaagtggccccagcagcctggagccctgctttgagagctacatctccttcctgtgcaagcagctggacagcctgctgggggagcggggcaacctggagggggagctgaagtccatgcaggacctggtggaggacttcaagaagaagtatgaagatgagatcaacaagaggacagctgctgaaaatgaatttgtgggcctgaagaaggatgtggatgctgccttcatgaacaaggtggagctgcaggccaaggtggacagcctgacagatgaggtgtccttcctgcggaccctgtatgagatggagctgagccagatgcagagccacgccagtgacacctctgtggtgctgtccatggacaacaaccgctgcctggacctgggcagcatcatcgccgaggtgcgggcccagtatgaggagatcgcccagaggagcaagtctgaggccgaggccctgtaccagaccaagctgggggagctgcagaccacagctggaagacatggagatgacctgaggaacaccaagtctgagatcatggagctgaacaggatgatccagaggctgcgggcagaaattgaaaatgtgaagaagcagaatgccaacctgcagacagccatcgccgaggccgagcagagaggagagatggccctgaaggatgccaatgccaagctgcaggacctgcagacagccctgcagaaggccaaggatgacctggcccggctgctgcgggactaccaggagctgatgaatgtgaagctggccctggatgtggagatcgccacctacaggaagctgctggagggggaggagtgcaggatgtctggagagtgccagagcgctgtgtgcatctctgtggtgtccaatgtgaccagcaccagcggcagcagcggcagcagccggggcgtgtttggaggagtgtctggcagcggcagcggcggctacaagggcggcagcagcagcagcagcagcagcggctatggagtgtctgggggcagcggcagcggctatggaggagtgagcagcggcagcactggaggccggggcagcagcggcagctaccagagcagcagcagcggcagccggctgggcggggccggcagcatctctgtgagccacagcggcatgggcagcagcagcggcagcatccagaccagcggcggcagcggctacaagagcggcggcggcggcagcaccagcatccgcttcagccagaccaccagcagcagccagcacagcagcaccaagtag

SEQ ID NO: 188148 - DNA, 1917 bp, Artificial Sequence
  derived and/or modified sequence
atgaaccggcaggtgtgcaagaagagcttcagcggccggagccaggggttttctggcaggagcgctgtggtttccggaagctctcggatgagttgcgtagcgagaagcggaggagccggcgggggagcatgcggcttccgctccggagcaggcagcttcggatcaagatctctgtacaacttggggtctaacaaaagtatttctatatcagttgccgcagggtctagccgagctggcggattcggggggggaaggtcatcctgcgggttcgcaggcgggtacggcggcggcttcggaggctcttatggaggcggcttcggcggcggtaggggtgtgggcagcggtttcgggggggctggcggtttcgggggggccggcgggttcggcggaccaggggtgttcggaggcccagggtctttcggcgggccaggcgggttcggcccaggcggcttcccagggggaatacaggaggtcattgtgaatcagtcactcttgcaaccccttaacgttgaaatagacccgcagatcggccaggttaaggcccaggagcgggagcaaataaagacgcttaacaacaaattcgcgagttttatcgacaaagtcaggtttttggagcagcagaataaggtgttagaaacaaagtgggagctgctgcagcagcagacaaccggctctggcccttcttcactcgagccctgttttgagtcctacattagcttcctctgtaaacagctcgactctctgctgggggagcgtgggaacctagagggcgagctaaagtcgatgcaggatctcgtggaggactttaagaaaaagtacgaggacgagattaataagcggacagcggcagagaatgaattcgtcggcttaaagaaggacgtggacgccgccttcatgaacaaggttgagctgcaagcaaaggtggacagcctgaccgacgaggtgagtttcctacgaacgttgtatgagatggaactgtctcagatgcagagccacgcatcagataccagcgtcgtgctgagtatggataacaacagatgcctagatttaggaagtattatagccgaagtgagggctcagtacgaggaaattgcacagcgatctaaaagcgaagcggaagccctctaccagaccaaactcggcgaactgcagactacagcagggcgacacggagacgaccttcggaacactaagagcgaaatcatggaacttaaccgtatgatccagagacttcgtgccgagatcgaaaacgtgaagaaacaaaacgcaaatctccagaccgcgatcgccgaggccgaacagagaggggaaatggcactcaaagacgcgaacgccaaactacaggatcttcagactgctctgcagaaggccaaggatgacctggcacggctcttgcgcgattatcaggagctgatgaacgtcaaattggccctcgacgttgaaattgccacctatcgaaagctgctagagggcgaggaatgccgcatgagtggcgaatgtcagagtgccgtctgcattagcgttgtgtcaaatgtgaccagcaccagtggctcttcaggaagtagtcgtggcgtgttcgggggtgtcagcggcagcggctctgggggttacaagggcggttctagcagttcgagtagcagtggctacggtgtctccggcggatctggctccgggtatggcggggtgagctcaggttctacgggcggacgcgggagctcgggttcatatcagagctctagtagcggaagccggctcgggggggccggatctatatctgtgagccactccggcatgggctcttctagtgggtcgatccagacatctggcggaagcgggtataagagcggcggcgggggttccacttccattcggttctcacaaacaacctctagctctcagcactctagcaccaagtag

SEQ ID NO: 188149 - DNA, 1917 bp, Artificial Sequence
  derived and/or modified sequence
atgaaccggcaagtttgcaagaaaagcttcagcggaagaagccagggattcagcgggagatcagccgtcgtgtcaggttcctcaaggatgtcttgcgtggctaggagcggaggtgcagggggtggtgcttgtggattccggtccggggctgggagttttggctccaggtctctatataatttggggtcgaacaagagcattagtatttctgtggcagccggttctagccgggctggcggtttcggagggggtcgttcttcatgcggctttgccggtggttatgggggaggattcgggggttcctacgggggaggttttgggggaggaagaggggtgggttctggattcggcggagccggagggttcgggggagccggaggattcggaggcccaggcgtgttcggaggcccagggtccttcggtggcccaggtggcttcggccctggaggcttccctgggggaatccaggaggttattgtgaaccagagcttactgcagcctttaaatgtcgagatcgacccccaaatagggcaggtaaaggcacaagaaagagaacagatcaaaacactaaacaataagttcgcctccttcattgacaaagtgcgctttctcgaacagcaaaataaggttctggaaaccaaatgggagttgttgcagcagcagaccacaggcagcggaccatctagcctggaaccatgctttgaaagttatatttccttcctctgcaagcagcttgatagcttgctgggcgagcgcggaaatctggaaggggagctcaagtcaatgcaggatcttgtagaggactttaagaagaagtatgaggacgaaatcaataaacgaacagctgctgagaacgagttcgtgggcctaaagaaggacgtggatgctgccttcatgaacaaagtggagcttcaggctaaggtggactctcttactgatgaagtgagctttctgagaactttatacgagatggaactatcacagatgcagagtcacgcatccgacacatcagtcgtgctaagtatggacaataaccgatgcctcgacctgggatctatcattgcagaagtgcgcgcacagtacgaagagatcgcccaacggagtaaaagcgaggccgaggcactctatcagacaaaacttggcgagctacagacaacagccggacgccacggagacgacctgcgtaacacgaagtctgagatcatggagctaaatcggatgatccagcggctgcgcgctgaaatcgagaacgtaaaaaagcagaacgccaatcttcagacagccattgccgaagcagaacaacgcggagaaatggcacttaaagacgctaatgcaaaactgcaagatttacagacagcgctacaaaaagctaaagatgatttggccaggctcctaagagattatcaggagctaatgaacgtgaaactagccttggacgtggagatcgctacctatcggaaacttctcgaaggcgaggagtgcagaatgagcggcgaatgccagagcgcagtgtgtatatcagtggtttccaacgttacttctaccagtggctcatccggttcctcacggggtgtgtttggcggtgtgagtggatccggcagcgggggttacaaggggggtagtagttcctctagcagttccggatacggcgtctcaggcggttcagggtccggttatggtggagtttcctcgggcagcaccggcggacggggatcaagcggcagctaccagagttcttcttcaggctcccggctggggggtgccggatcgatctctgtgagtcactccgggatgggaagttcctctggttcgatccagacaagtgggggaagcggttataaatctgggggaggagggagcacctctatacggttcagccaaacaacttctagttctcagcattcttctaccaaatag

SEQ ID NO: 188150 - DNA, 753 bp, Artificial Sequence
  derived and/or modified sequence
atggcacatgttgggacatcgagggtgggatctgtcctctccatgagtctttccattcaccttcttgtcccaactatgactaaaggggagacggggaagccagggcatcacgaagctcctagaacacttcaggcatttccgtggacgtgggcacgggcttccccaggcgtttctgtggacatgagcgctgggcttcctcagtctctgctgtgctggccgggtgctcccctcctcccaacccctccactgccctctgccacctatgtgggccacagcctgggtctgccaagagcagggtccagcgtggggccctggttcagtggccgctgggttgggggggccctggttcagtggccgctgggtggggggggccctggttcggtggccgctgggttggggggccccctggttcggtggctgctgggtgggggggccctggttcggtggccgctgggtggggggggccctggttcggtggccgctgggtggggggggccctggttcggtggccgctgggtgggggggccccctggttcggtggctgctgggtgggggggccctgttcggtggccgctgggtggggggggccctggttcggtggccactgggtggggggggccctggttcggtggccgctgggtgggggggccccctggttcggtggccgctgggtgtgggggggccctggttcagtggccgctgggtgggggttctctccacagcatccccagtttcccgcgggcctggaggtga

SEQ ID NO: 188151 - protein, 822 aa, Artificial Sequence
  derived and/or modified sequence
MWSWKCLLFWAVLVTATLCTARPSPTLPEQAQPWGAPVEVESFLVHPGDLLQLRCRLRDDVQSINWLRDGVQLAESNRTRITGEEVEVQDSVPADSGLYACVTSSPSGSDTTYFSVNVSVPIDALPSSEDDDDDDDSSSEEKETDNTKPNPVAPYWTSPEKMEKKLHAVPAAKTVKFKCPSSGTPNPTLRWLKNGKEFKPDHRIGGYKVRYATWSIIMDSVVPSDKGNYTCIVENEYGSINHTYQLDVVERSPHRPILQAGLPANKTVALGSNVEFMCKVYSDPQPHIQWLKHIEVNGSKIGPDNLPYVQILKHSGINSSDAEVLTLFNVTEAQSGEYVCKVSNYIGEANQSAWLTVTRPVLEERPAVMTSPLYLEIIIYCTGAFLISCMVGSVIVYKMKSGTKKSDFHSQMAVHKLAKSIPLRRQVTVSADSSASMNSGVLLVRPSRLSSSGTPMLAGVSEYELPEDPRWELPRDRLVLGKPLGEGCFGQVVLAEAIGLDKDKPNRVTKVAVKMLKSDATEKDLSDLISEMEMMKMIGKHKNIINLLGACTQDGPLYVIVEYASKGNLREYLQARRPPGLEYCYNPSHNPEEQLSSKDLVSCAYQVARGMEYLASKKCIHRDLAARNVLVTEDNVMKIADFGLARDIHHIDYYKKTTNGRLPVKWMAPEALFDRIYTHQSDVWSFGVLLWEIFTLGGSPYPGVPVEELFKLLKEGHRMDKPSNCTNELYMMMRDCWHAVPSQRPTFKQLVEDLDRIVALTSNQEYLDLSMPLDQYSPSFPDTRSSTCSSGEDSVFSHEPLPEEPCLPRHPAQLANGGLKRR

SEQ ID NO: 188152 - protein, 820 aa, Artificial Sequence
  derived and/or modified sequence
MWSWKCLLFWAVLVTATLCTARPSPTLPEQAQPWGAPVEVESFLVHPGDLLQLRCRLRDDVQSINWLRDGVQLAESNRTRITGEEVEVQDSVPADSGLYACVTSSPSGSDTTYFSVNVSDALPSSEDDDDDDDSSSEEKETDNTKPNPVAPYWTSPEKMEKKLHAVPAAKTVKFKCPSSGTPNPTLRWLKNGKEFKPDHRIGGYKVRYATWSIIMDSVVPSDKGNYTCIVENEYGSINHTYQLDVVERSPHRPILQAGLPANKTVALGSNVEFMCKVYSDPQPHIQWLKHIEVNGSKIGPDNLPYVQILKTAGVNTTDKEMEVLHLRNVSFEDAGEYTCLAGNSIGLSHHSAWLTVLEALEERPAVMTSPLYLEIIIYCTGAFLISCMVGSVIVYKMKSGTKKSDFHSQMAVHKLAKSIPLRRQVTVSADSSASMNSGVLLVRPSRLSSSGTPMLAGVSEYELPEDPRWELPRDRLVLGKPLGEGCFGQVVLAEAIGLDKDKPNRVTKVAVKMLKSDATEKDLSDLISEMEMMKMIGKHKNIINLLGACTQDGPLYVIVEYASKGNLREYLQARRPPGLEYCYNPSHNPEEQLSSKDLVSCAYQVARGMEYLASKKCIHRDLAARNVLVTEDNVMKIADFGLARDIHHIDYYKKTTNGRLPVKWMAPEALFDRIYTHQSDVWSFGVLLWEIFTLGGSPYPGVPVEELFKLLKEGHRMDKPSNCTNELYMMMRDCWHAVPSQRPTFKQLVEDLDRIVALTSNQEYLDLSMPLDQYSPSFPDTRSSTCSSGEDSVFSHEPLPEEPCLPRHPAQLANGGLKRR

SEQ ID NO: 188153 - protein, 312 aa, Artificial Sequence
  derived and/or modified sequence
MAELTALESLIEMGFPRGRAEKALALTGNQGIEAAMDWLMEHEDDPDVDEPLETPLGHILGREPTSSEQGGLEGSGSAAGEGKPALSEEERQEQTKRMLELVAQKQREREEREEREALERERQRRRQGQELSAARQRLQEDEMRRAAEERRREKAEELAARQRVREKIERDKAERAKKYGGSVGSQPPPVAPEPGPVPSSPSQEPPTKREYDQCRIQVRLPDGTSLTQTFRAREQLAAVRLYVELHRGEELGGGQDPVQLLSGFPRRAFSEADMERPLQELGMAARLETRTRNWGSREACLGKGGMQREGAL

SEQ ID NO: 188154 - DNA, 939 bp, Artificial Sequence
  derived and/or modified sequence
atggccgagctcaccgctctggaatcgctcattgagatggggtttccaagagggcgtgcggaaaaggctctggccctcaccggtaaccagggtatcgaggctgcaatggattggttaatggagcatgaggacgatccagacgtcgatgagcccctcgaaacacctctcggccacatcctcgggcgggaacccacctcaagtgaacagggggggctggaaggatcaggctctgccgccggcgaagggaaaccagctctaagtgaggaggaaaggcaggagcagacgaagaggatgctggagctggtggctcagaaacagcgcgagcgcgaggaaagagaggagagagaggccctggagcgcgagcgacagaggagacggcagggccaggagttgtcggctgctcggcagcgacttcaggaagacgagatgcgacgggcggctgaggagagacggcgtgaaaaggccgaagaacttgccgcccgccagagagtgcgggaaaaaatcgagcgagacaaagctgagagggccaaaaaatatggaggctctgttggctcacagccaccccccgtggcacccgagcctggcccggtcccatcaagccccagccaggagcccccgactaaacgtgaatatgaccaatgccggatccaagtgcgacttccagatgggacatccctgacccaaaccttccgggcaagggaacagcttgcagccgtgcgcctgtacgtagagctgcatcgcggagaggagctgggcggcggacaagaccctgtccagttgttgtccggctttcctcgaagagcgttctccgaggctgatatggagagaccactccaagaactaggcatggccgcccgccttgaaacccgaaccaggaattgggggtcacgcgaggcttgcctgggaaagggcgggatgcagagagaaggcgccttgtag

SEQ ID NO: 188155 - DNA, 939 bp, Artificial Sequence
  derived and/or modified sequence
atggccgagctgacagccctggagagcctgattgagatgggcttcccccggggccgggcagagaaggccctggccctgactggaaaccagggcatcgaggccgccatggactggctgatggagcatgaagatgatcctgatgtggatgagcccctggagacccccctgggccacatcctgggccgggagcccaccagcagcgagcagggcggcctggagggcagcggcagcgctgctggggagggcaagccagccctgtctgaggaggagcggcaggagcagaccaagaggatgctggagctggtggcccagaagcagcgggagcgggaggagcgggaggagcgggaggccctggagcgggagcggcagaggcggcggcagggccaggagctgtctgctgcccggcagaggctgcaggaggatgagatgagaagagctgctgaggagaggagaagagagaaggccgaggagctggccgcccggcagagggtgcgggagaagattgaaagagacaaggccgagcgggccaagaagtatggaggctctgtgggcagccagcccccacctgtggcccctgagcccggccctgtgcccagcagccccagccaggagccccccaccaagcgggagtatgaccagtgccgcatccaggtgcggctgcctgatggcaccagcctgacccagaccttccgggcccgggagcagctggccgctgtgcggctgtatgtggagctgcacagaggagaggagctgggcggcggccaggaccctgtgcagctgctgagcggcttcccccggcgggccttcagcgaggccgacatggagcggcccctgcaggagctgggcatggccgcccggctggagaccaggaccaggaactggggcagccgggaggcctgcctgggcaaaggaggcatgcagcgggagggcgccctgtag

SEQ ID NO: 188156 - DNA, 939 bp, Artificial Sequence
  derived and/or modified sequence
atggccgagctgaccgccctggagagcctgatcgagatgggcttccccagagggcgtgccgaaaaagcccttgcccttacaggaaaccagggtattgaggctgctatggactggctgatggagcatgaagatgacccagatgtcgatgaacccctagagacgcccttgggccacatcctgggccgagagccgacctcgagtgaacaaggtggactcgaaggctcagggagcgccgcaggagagggtaaaccggcactgtctgaggaagagcgccaagagcaaactaaacggatgttggagctggtcgctcagaagcagcgggagcgcgaagagcgcgaggagcgtgaggctcttgaacgggaacgtcaaagacgaaggcagggacaggagctcagtgcagctcgacagcgactccaggaggacgagatgagaagagcagctgaggaaagaaggagagagaaagcagaggaacttgccgccagacagcgtgttcgcgagaaaattgaaagggataaagccgaacgagccaagaagtatggcggctcagttggatcacaacctccccccgtcgcacctgagccaggccccgtgccatcctctccaagccaggagcctccgaccaaacgcgagtatgatcagtgccgcattcaggtcagactaccagatggaacatcactgacccaaactttccgtgctagagaacagctagctgcggtccgcctgtacgttgagctccatagaggagaagagctgggggggggacaggacccagtgcagttgctaagcggctttcccaggcgggcattcagtgaggcggacatggaaagacccctacaggaactcggtatggctgcaagactggagactaggacacggaattggggttcgagggaggcatgtcttgggaaaggaggcatgcaaagagagggtgctctctag

SEQ ID NO: 188157 - DNA, 939 bp, Artificial Sequence
  derived and/or modified sequence
atggcggaactcactgccttggagtcgttaatcgagatgggttttccacgcggtcgcgctgagaaggcgttagcgttgacaggaaatcagggcatcgaagccgctatggattggctgatggagcacgaagacgatcccgacgtcgacgagccactggaaactccacttgggcacatactcggccgtgaacccacatcgtctgagcagggcggtctcgagggcagtggaagtgccgcaggagagggaaaacccgctctgtcagaagaggagcggcaggagcagacaaagaggatgttagaattagtcgcccaaaagcagagagaacgggaagaaagagaagaaagggaggctctcgagcgcgagagacagcggagacgccagggtcaggagctgagtgctgcaagacagagattacaggaggacgaaatgcgcagagcagcagaggagcggaggcgagagaaagcggaggagctggccgcaagacagcgcgttagagaaaaaatcgaaagggataaggccgagcgcgcaaagaagtacggcggaagcgtgggatcccagccccctccagtggccccagaacctggacccgttccttcatctcccagtcaagagccccctaccaaacgagagtacgaccagtgccgtatccaggtcaggctaccagacgggaccagtctcacacaaacatttcgggcacgtgaacaactggcagctgtccgtctctatgtggagttacacagaggtgaagagctgggcggaggccaagatccggttcagctactaagtggtttccccagaagagccttttctgaagccgacatggaaagacctctgcaggagttggggatggccgcacggcttgagactcgcacgcggaattggggctcgcgggaagcatgcctgggaaaagggggaatgcagcgagagggtgcgctatag

SEQ ID NO: 188158 - DNA, 1291 bp, Artificial Sequence
  derived and/or modified sequence
ggctgctatagagccgggtgagagagcgagcgcccgtcggcgggtgtcgagggcgggttgcctcgcgctgacccttcccgccctccttctcgtcacacaccaggtccccgcggaagccgcggtgtcggcgccatggcggagctgacggctcttgagagtctcatcgagatgggcttccccaggggacgcgcggagaaggctctggccctcacagggaaccagggcatcgaggctgcgatggactggctgatggagcacgaagacgaccccgatgtggacgagcctttagagactccccttggacatatcctgggacgggagcccacttcctcagagcaaggcggccttgaaggatctggttctgctgccggagaaggcaaacccgctttgagtgaagaggaaagacaggaacaaactaagaggatgttggagctggtggcccagaagcagcgggagcgtgaagaaagagaggaacgggaggcattggaacgggaacggcagcgcaggagacaagggcaagagttgtcagcagcacgacagcggctacaggaagatgagatgcgccgggctgctgaggagaggcggagggaaaaggccgaggagttagcagccagacaaagagttagagaaaagatcgagagggacaaagcagagagagccaagaagtatggtggcagtgtgggctctcagccacccccagtggcaccagagccaggtcctgttccctcttctcccagccaggagcctcccaccaagcgggagtatgaccagtgtcgcatacaggtcaggctgccagatgggacctcactgacccagacgttccgggcccgggaacagctggcagctgtgaggctctatgtggagctccaccgtggggaggaactaggtgggggccaggaccctgtgcaattgctcagtggcttccccagacgggccttctcagaagctgacatggagcggcctctgcaggagctgggtatggctgcaagactagaaaccaggactagaaactgggggagtagggaggcatgcctaggaaaaggagggatgcaaagagaaggggctttgtgaacatggtgcaaggccaggaattttgggagcaaaaaccaagtatccttgtggttcaagcctgttttcttccatcttcaggactcgtgccttctgctgttctcattgtggccaagaaatgtcccagctgagggcctttgtcccattgtccctctgtgaccccttcatctttgataaagcactgacatctccttcctaataaatagaccctgagttctgtaca

SEQ ID NO: 188159 - DNA, 939 bp, Artificial Sequence
  derived and/or modified sequence
atggccgagctgaccgccctggagagcctgatcgagatgggcttccccagaggcagagccgagaaggccctggccctgaccggcaaccagggcatcgaggccgccatggactggctgatggagcacgaggacgaccccgacgtggacgagcccctggagacccccctgggccacatcctgggcagagagcccaccagcagcgagcagggcggcctggagggcagcggcagcgccgccggcgagggcaagcccgccctgagcgaggaggagagacaggagcagaccaagagaatgctggagctggtggcccagaagcagagagagagagaggagagagaggagagagaggccctggagagagagagacagagaagaagacagggccaggagctgagcgccgccagacagagactgcaggaggacgagatgagaagagccgccgaggagagaagaagagagaaggccgaggagctggccgccagacagagagtgagagagaagatcgagagagacaaggccgagagagccaagaagtacggcggcagcgtgggcagccagcccccccccgtggcccccgagcccggccccgtgcccagcagccccagccaggagccccccaccaagagagagtacgaccagtgcagaatccaggtgagactgcccgacggcaccagcctgacccagaccttcagagccagagagcagctggccgccgtgagactgtacgtggagctgcacagaggcgaggagctgggcggcggccaggaccccgtgcagctgctgagcggcttccccagaagagccttcagcgaggccgacatggagagacccctgcaggagctgggcatggccgccagactggagaccagaaccagaaactggggcagcagagaggcctgcctgggcaagggcggcatgcagagagagggcgccctgtag

SEQ ID NO: 188160 - protein, 337 aa, Artificial Sequence
  derived and/or modified sequence
MRFDTLWENKLMQSRAVDGFHSEEQQLLLQVQQQHQPQQQQHHHHHHHQQAQPQQTVPQQAQTQQVLIPASQQATAPQVIVPDSKLIQHMNASNMSAAATAATLALPAGVTPVQQILTNSGQLLQVVRAANGAQYIFQPQQSVVLQQQVIPQMQPGGVQAPVIQQVLAPLPGGISPQTGVIIQPQQILFTGNKTQVIPTTVAAPTPAQAQITATGQQQPQAQPAQTQAPLVLQVDGTGDTSSEEDEDEEEDYDDDEEEDKEKDGAEDGQVEEEPLNSEDDVSDEEGQELFDTENVVVCQYDKIHRSKNKWKFHLKDGIMNLNGRDYIFSKAIGDAEW

SEQ ID NO: 188161 - protein, 337 aa, Artificial Sequence
  derived and/or modified sequence
MELKTLWENKLMQSRAVDGFHSEEQQLLLQVQQQHQPQQQQHHHHHHHQQAQPQQTVPQQAQTQQVLIPASQQATAPQVIVPDSKLIQHMNASNMSAAATAATLALPAGVTPVQQILTNSGQLLQVVRAANGAQYIFQPQQSVVLQQQVIPQMQPGGVQAPVIQQVLAPLPGGISPQTGVIIQPQQILFTGNKTQVIPTTVAAPTPAQAQITATGQQQPQAQPAQTQAPLVLQVDGTGDTSSEEDEDEEEDYDDDEEEDKEKDGAEDGQVEEEPLNSEDDVSDEEGQELFDTENVVVCQYDKIHRSKNKWKFHLKDGIMNLNGRDYIFSKAIGDAEW

SEQ ID NO: 188162 - protein, 376 aa, Artificial Sequence
  derived and/or modified sequence
MANSANTNTVPKLYRSVIEDVINDVRDIFLDDGVDEQVLMELKTLWENKLMQSRAVDGFHSEEQQLLLQVQQQHQPQQQQHHHHHHHQQAQPQQTVPQQAQTQQVLIPASQQATAPQVIVPDSKLIQHMNASNMSAAATAATLALPAGVTPVQQILTNSGQLLQVVRAANGAQYIFQPQQSVVLQQQVIPQMQPGGVQAPVIQQVLAPLPGGISPQTGVIIQPQQILFTGNKTQVIPTTVAAPTPAQAQITATGQQQPQAQPAQTQAPLVLQVDGTGDTSSEEDEDEEEDYDDDEEEDKEKDGAEDGQVEEEPLNSEDDVSDEEGQELFDTENVVVCQYDKIHRSKNKWKFHLKDGIMNLNGRDYIFSKAIGDAEW

SEQ ID NO: 188163 - DNA, 1736 bp, Artificial Sequence
  derived and/or modified sequence
cggcggcggcggcggcggtggtggctcgcgcagcttgttggctcgctatataaaggagagaagcgggcggaccggacggctggagctgcagccggtggcggcagcggcggcgcagggagcggtgaccggtggtggtttccctccttggcgcggggtggggagcgggcaacgccccccggacccctgaagggtcgtggctttttttttttttttaaggcgattctcgaggttttcagctgcgggaggagtgcccccctcctcctcctctctccgctctcccctactccttcaggattgattttgtttaaaattttttccccaatcttgcggtgatttgggtcaccctccgggtgttatagtttttttttttttggttttgtttttatcttgttttcttggggttgccccctcttgtttgtgttgtgtgtggaaatggcgaactcggcaaatacaaacaccgtgcctaaattatacagatctgtgattgaagatgtcattaatgatgtgagagacatctttctggatgatggagtggatgaacaagtactgatggaactaaaaactttatgggaaaacaaactaatgcagtccagggcagtagatggatttcattcagaagagcagcagcttctactgcaagttcaacagcagcatcaaccccagcagcagcagcatcaccaccatcaccatcatcagcaagctcagcctcagcagacagtacctcagcaagcgcagacccagcaggttcttattcctgcatcacagcaagccacagcaccacaagttattgttccagattctaagttgatacagcatatgaatgcatcaaacatgagtgctgctgctacagctgctaccttagcactccctgcaggtgtgactcctgttcagcagatattaacaaattcaggccagcttcttcaggtggtcagagcagccaatggtgcccaatatatctttcagcctcagcagtcagtggttctacaacaacaggttataccacaaatgcagcctggtggagtacaagctcctgttatacagcaggtgctggctcctcttcctggagggatttcaccacagacaggtgtcatcatccagcctcagcaaatcttatttacaggaaataagactcaagttatacctacgacagtggcagcacctacaccagcccaagcacagataactgcaactggccagcagcaaccgcaggcccagcctgctcaaacacaagctccattggtcttacaagttgatggaactggggatacatcatctgaagaagatgaagatgaagaagaagactatgatgatgatgaggaggaagacaaagagaaagatggagctgaagatgggcaggtggaagaagagcccctcaatagtgaagatgatgtgagtgatgaggaaggacaggaactctttgacacagaaaatgttgttgtatgccaatatgataagatacacagaagtaaaaacaaatggaaatttcatctcaaggatggcattatgaatcttaatggaagagattatatattttccaaagccattggagatgcagaatggtgaagagttgctttttttcttttataaataaaagaaacttaaaaaaaatgtaaagcggacagtttgaaacttggggcatatgccaaccaaaacttcgtttctgcatgtcagaaaagtgcagtagaagcaaagctactggaacaaagatagaccttgacaacatagacactacttac

SEQ ID NO: 188164 - DNA, 1131 bp, Artificial Sequence
  derived and/or modified sequence
atggccaacagcgccaacaccaacaccgtgcccaagctgtacagaagcgtgatcgaggacgtgatcaacgacgtgagagacatcttcctggacgacggcgtggacgagcaggtgctgatggagctgaagaccctgtgggagaacaagctgatgcagagcagagccgtggacggcttccacagcgaggagcagcagctgctgctgcaggtgcagcagcagcaccagccccagcagcagcagcaccaccaccaccaccaccaccagcaggcccagccccagcagaccgtgccccagcaggcccagacccagcaggtgctgatccccgccagccagcaggccaccgccccccaggtgatcgtgcccgacagcaagctgatccagcacatgaacgccagcaacatgagcgccgccgccaccgccgccaccctggccctgcccgccggcgtgacccccgtgcagcagatcctgaccaacagcggccagctgctgcaggtggtgagagccgccaacggcgcccagtacatcttccagccccagcagagcgtggtgctgcagcagcaggtgatcccccagatgcagcccggcggcgtgcaggcccccgtgatccagcaggtgctggcccccctgcccggcggcatcagcccccagaccggcgtgatcatccagccccagcagatcctgttcaccggcaacaagacccaggtgatccccaccaccgtggccgcccccacccccgcccaggcccagatcaccgccaccggccagcagcagccccaggcccagcccgcccagacccaggcccccctggtgctgcaggtggacggcaccggcgacaccagcagcgaggaggacgaggacgaggaggaggactacgacgacgacgaggaggaggacaaggagaaggacggcgccgaggacggccaggtggaggaggagcccctgaacagcgaggacgacgtgagcgacgaggagggccaggagctgttcgacaccgagaacgtggtggtgtgccagtacgacaagatccacagaagcaagaacaagtggaagttccacctgaaggacggcatcatgaacctgaacggcagagactacatcttcagcaaggccatcggcgacgccgagtggtag

SEQ ID NO: 188165 - DNA, 1131 bp, Artificial Sequence
  derived and/or modified sequence
atggccaatagcgcgaataccaataccgtgcccaagctttacagaagtgttatcgaggatgttataaacgacgtgagggacatctttctggacgatggagtggacgagcaggtgctcatggaactgaagacgctttgggagaacaaacttatgcagtccagggccgtggatgggtttcattccgaagaacagcaactcctccttcaggtgcagcagcagcaccagccacaacagcaacaacatcatcatcaccaccaccaccagcaggcacagcctcagcagaccgtaccgcagcaggcacagactcagcaagtactcattccagcctcacagcaagctacagcgcctcaggtcatcgtgccggacagcaaactcatacagcatatgaacgcctcaaatatgtctgccgcggcgaccgctgctacgctcgcacttcccgccggcgtaaccccagtccagcagattttgactaattctgggcagctgctgcaggtcgtgcgggcagccaacggggcccagtatattttccagccccagcagtccgtcgtgcttcaacaacaggtcattccacagatgcagcctggcggagtccaggctcctgtgattcagcaggtgctcgcaccattacccggaggcatctcccctcaaaccggagtcatcatccagccacagcagatactgtttacagggaataagacccaggtgatcccgacgactgtggccgcccctactcccgcgcaggctcagatcactgccacggggcaacaacagccacaggctcaacctgcccagactcaggccccactggttctccaggtcgacggcaccggggacacttccagcgaagaggacgaagacgaagaagaggactacgatgacgacgaggaggaggacaaggaaaaagacggagctgaggacgggcaggtcgaagaggagcccctgaattctgaagacgatgtatccgatgaagagggacaagaactgttcgacactgaaaacgtggtagtgtgccagtacgacaaaatacatcggagtaaaaataaatggaaatttcacctcaaagacgggattatgaatctgaatggtcgagattatatcttctcaaaagccattggcgacgccgagtggtag

SEQ ID NO: 188166 - DNA, 1131 bp, Artificial Sequence
  derived and/or modified sequence
atggccaacagcgccaacaccaacacagtgcccaagctgtacagatctgtgattgaagatgtgatcaatgatgtgcgggacatcttcctggatgatggagtggatgagcaggtgctgatggagctgaagaccctgtgggagaacaagctgatgcagagcagagctgtggatggcttccacagcgaggagcagcagctgctgctgcaggtgcagcagcagcaccagccccagcagcagcagcaccaccaccaccaccaccaccagcaggcccagccccagcagacagtgccccagcaggcccagacccagcaggtgctgatcccagccagccagcaggccacagccccccaggtgattgtgcctgacagcaagctgatccagcacatgaatgccagcaacatgtctgctgctgccacagctgccaccctggccctgcctgctggggtgacccctgtgcagcagatcctgaccaacagcggccagctgctgcaggtggtgcgggccgccaacggggcccagtacatcttccagccccagcagagcgtggtgctgcagcagcaggtgatcccccagatgcagcccggcggcgtgcaggcccctgtgatccagcaggtgctggcccccctgcccggcggcatcagcccccagacaggagtcatcatccagccccagcagatcctcttcaccggcaacaagacccaggtgatccccaccaccgtggccgcccccaccccagcccaggcccagatcacagccaccggccagcagcagccccaggcccagcctgcccagacccaggcccccctggtgctgcaggtggatggcaccggggacaccagcagtgaagaagatgaagatgaggaggaggactatgatgatgatgaggaggaggacaaggagaaggatggagcagaagatggccaggtggaggaggagcccctgaacagtgaagatgatgtgtctgatgaggagggccaggagctgtttgacacagaaaatgtggtggtgtgccagtatgacaagatccacaggagcaagaacaagtggaagttccacctgaaggatggcatcatgaacctgaatggccgggactacatcttcagcaaggccatcggagatgctgagtggtag

SEQ ID NO: 188167 - DNA, 1131 bp, Artificial Sequence
  derived and/or modified sequence
atggccaacagcgccaacaccaacaccgtgcccaagctgtaccggtccgttatcgaagacgtcatcaatgatgtgcgcgatatctttctcgacgacggagtggatgagcaagttttgatggagttaaagacactgtgggagaataagctcatgcagtcccgcgcggtcgacggcttccatagtgaggaacagcagcttctgttgcaggtgcagcagcagcatcagccccagcagcagcagcaccaccaccatcatcaccaccagcaagcacaaccacaacagaccgttcctcaacaggcgcagacccagcaagtactcatccccgccagccagcaggccaccgccccccaggtgattgtgcctgactctaagctcattcagcacatgaatgcctcgaacatgagcgccgctgctacggccgccacactggctctgccagcgggggtgacgccggtgcaacaaattctcacaaattctgggcagctgctccaggtcgtcagagccgccaatggtgcccagtacatctttcagccccaacagtctgtggtgctgcaacagcaggtgattccccaaatgcagcctggaggagtgcaagccccggttatacagcaggtactggctccacttcccggggggataagcccccagacaggggtgattatacaaccacaacaaatcctgttcacagggaacaagacacaagtgatcccaaccacggtggcagctcccactcccgcccaggcccaaatcacggctaccggccagcagcagccgcaggcccagcctgcccagacacaggcccccctggtgctgcaggtcgatggtactggcgatacgtcatcagaggaggatgaggacgaagaagaggactacgatgatgacgaggaggaggataaggaaaaggacggagcagaggacgggcaagtagaggaagagcccctcaactccgaggacgatgtgtccgacgaggaagggcaagaactctttgatacagagaatgtggtggtatgtcagtatgataagattcacaggagtaagaacaagtggaagtttcacctcaaggacggcatcatgaatctaaatggccgcgattacatcttctccaaggctatcggggacgccgagtggtag

SEQ ID NO: 188168 - DNA, 1131 bp, Artificial Sequence
  derived and/or modified sequence
atggccaactctgccaataccaacaccgttcctaaactatatcgatctgtgattgaagatgtgattaatgacgtgagggacatcttcctggatgatggggtggacgagcaggtgctaatggagctgaagaccctttgggagaacaagctgatgcagagcagggcagtcgatgggtttcattccgaggagcagcaactgctgttgcaagtgcaacagcagcaccagcctcaacagcagcagcaccaccaccaccaccatcaccagcaggctcagccacagcaaactgtacctcagcaagcacagacacagcaggtgttaatccccgcatctcagcaggcaactgctcctcaagtgatcgtgccagactcaaagttgatccagcacatgaacgcctctaacatgagcgccgctgcaacagccgcaaccttagccctgccagccggtgtgacaccggtgcaacaaattctgaccaactctggccagctcctgcaggtggttcgagctgcaaacggtgctcagtatatattccagccccagcaatccgtagtcctacagcagcaggtgattcctcagatgcaaccaggtggagtccaagcaccagtgatacaacaagtgctggctccactcccagggggtataagcccacagacgggggtgattatccagccccagcagattttatttaccggaaataagacacaggtaataccgacaacagtggcagccccaacgccggctcaagcccagatcactgccactggccagcagcagccccaggctcagcccgctcagacacaggcccctcttgttttgcaggtggacgggaccggggacacatcatctgaggaagacgaggacgaagaagaggactatgatgatgatgaagaagaagacaaggagaaggacggcgcagaggacggtcaggtcgaggaggagcctctgaacagcgaagacgatgtctccgacgaagagggccaagagctgtttgataccgaaaatgtggtggtctgtcagtacgacaaaatccatcggtcaaagaataaatggaaattccacctaaaagacggaataatgaatctcaacggacgagactacatcttctctaaagcaattggagatgctgaatggtag

SEQ ID NO: 188169 - DNA, 1199 bp, Artificial Sequence
  derived and/or modified sequence
gctttgcaagttcttcaccgcaaagaactgccgcagacttccgcctgggtgccaaccacgtgatcacgcgagcgttggagaggccctaaattatacagatctgtgattgaagatgtcattaatgatgtgagagacatctttctggatgatggagtggatgaacaagtactgatggaactaaaaactttatgggaaaacaaactaatgcagtccagggcagtagatggatttcattcagaagagcagcagcttctactgcaagttcaacagcagcatcaaccccagcagcagcagcatcaccaccatcaccatcatcagcaagctcagcctcagcagacagtacctcagcaagcgcagacccagcaggttcttattcctgcatcacagcaagccacagcaccacaagttattgttccagattctaagttgatacagcatatgaatgcatcaaacatgagtgctgctgctacagctgctaccttagcactccctgcaggtgtgactcctgttcagcagatattaacaaattcaggccagcttcttcaggtggtcagagcagccaatggtgcccaatatatctttcagcctcagcagtcagtggttctacaacaacaggttataccacaaatgcagcctggtggagtacaagctcctgttatacagcaggtgctggctcctcttcctggagggatttcaccacagacaggtgtcatcatccagcctcagcaaatcttatttacaggaaataagactcaagttatacctacgacagtggcagcacctacaccagcccaagcacagataactgcaactggccagcagcaaccgcaggcccagcctgctcaaacacaagctccattggtcttacaagttgatggaactggggatacatcatctgaagaagatgaagatgaagaagaagactatgatgatgatgaggaggaagacaaagagaaagatggagctgaagatgggcaggtggaagaagagcccctcaatagtgaagatgatgtgagtgatgaggaaggacaggaactctttgacacagaaaatgttgttgtatgccaatatgataagatacacagaagtaaaaacaaatggaaatttcatctcaaggatggcattatgaatcttaatggaagagattatatattttccaaagccattggagatgcagaatggtgaagagttgctttttt

SEQ ID NO: 188170 - DNA, 6306 bp, Artificial Sequence
  derived and/or modified sequence
cgcagcttgttggctcgctatataaaggagagaagcgggcggaccggacggctggagctgcagccggtggcggcagcggcggcgcagggagcggtgaccggtggtggtttccctccttggcgcggggtggggagcgggcaacgccccccggacccctgaagggtcgtggctttttttttttttttaaggcgattctcgaggttttcagctgcgggaggagtgcccccctcctcctcctctctccgctctcccctactccttcaggattgattttgtttaaaattttttccccaatcttgcggtgatttgggtcaccctccgggtgttatagtttttttttttttggttttgtttttatcttgttttcttggggttgccccctcttgtttgtgttgtgtgtggaaatggcgaactcggcaaatacaaacaccgtgcctaaattatacagatctgtgattgaagatgtcattaatgatgtgagagacatctttctggatgatggagtggatgaacaagtactgatggaactaaaaactttatgggaaaacaaactaatgcagtccagggcagtagatggatttcattcagaagagcagcagcttctactgcaagttcaacagcagcatcaaccccagcagcagcagcatcaccaccatcaccatcatcagcaagctcagcctcagcagacagtacctcagcaagcgcagacccagcaggttcttattcctgcatcacagcaagccacagcaccacaagttattgttccagattctaagttgatacagcatatgaatgcatcaaacatgagtgctgctgctacagctgctaccttagcactccctgcaggtgtgactcctgttcagcagatattaacaaattcaggccagcttcttcaggtggtcagagcagccaatggtgcccaatatatctttcagcctcagcagtcagtggttctacaacaacaggttataccacaaatgcagcctggtggagtacaagctcctgttatacagcaggtgctggctcctcttcctggagggatttcaccacagacaggtgtcatcatccagcctcagcaaatcttatttacaggaaataagactcaagttatacctacgacagtggcagcacctacaccagcccaagcacagataactgcaactggccagcagcaaccgcaggcccagcctgctcaaacacaagctccattggtcttacaagttgatggaactggggatacatcatctgaagaagatgaagatgaagaagaagactatgatgatgatgaggaggaagacaaagagaaagatggagctgaagatgggcaggtggaagaagagcccctcaatagtgaagatgatgtgagtgatgaggaaggacaggaactctttgacacagaaaatgttgttgtatgccaatatgataagatacacagaagtaaaaacaaatggaaatttcatctcaaggatggcattatgaatcttaatggaagagattatatattttccaaagccattggagatgcagaatggtgaagagttgctttttttcttttataaataaaagaaacttaaaaaaaatgtaaagcggacagtttgaaacttggggcatatgccaaccaaaacttcgtttctgcatgtcagaaaagtgcagtagaagcaaagctactggaacaaagatagaccttgacaacatagacactacttactggcaagccatggaactgtagcacctagggtttttgggtgggagggttggggttttgtgtaggaaaaccataattgttgattttaaatacaggtacctgccaccggtaattagcatgtaaagctttgtctatattccttcctccaacttgggttcaatcagaagatacttgttggaatgaactgaagaaacttcccttttgatagattgaactgaaactgcttattgtatgtggttatatttggtaaaagttgcgtgtgagctttttacaaaagggtaagaattgtgttgaattttaattcacttgtataagaaaacaatttaaaactctcataataggtcttaaatatttttacttgctattctccctcagtgatatatacctcttcctttccagctttatgaaacatctatttaagatttaaagttatcagtgatcatagtttggagataaaatttgacccaggaatgaatatttattttaattaggttttcatacttattaaatgtaattaaagacttgggtcttgtctgagttcagtggaattgaaaccacaactttaatttccttacagaaaaacttaatttgtttcttttagtgccacaccttaaaaagaaaccccaaactagctcctcaggaatatagttttattttgcaagcataccatctagctgaaattgtatacacatgaatatatgtagacttttcctgttgggctgaagtgtgtgcttataaatgtgtttagtttttaagctaaacattcagttaacagtctgtgcattgattagcatagggcaggtggtgaggacctggatttttattaaacagtttagtaattataaaagtttcttgtgtttactagtaaagaattttaaaaatctattctaattcaacaagtttttaaaatcaactttgtaatttgaggggaaaatttggggggaagaggtgggtgggccactaagttacctctctttcatttggtggcccttccaggccattgaaaataaagacgttggctccagtttgcacattgggaagaaagcatagaaatttgacttgtatattaaaaataatagaaatgtaatatgtatattaagaatgcataggtctgtattctgtaaggggctctgaagaacaatatggcactgctgtgttcagtgtgaattcactgcctgggagaactgcaggaatgcttgtcttcaccattgtgttcttacaacgaattcaactttccatggtttatcttgacaaaatttacatgtgtttaggttacttgtatattgatatatttttttaatcttcagtttttgtcttccttttgcctttgtgttttcagaagtaacacatgaacactttttaaagtacattacagagaagaaaactgtgagctattatatagtgtttcttttttaacacaaatcttttaactttaaaaaaaggcaaaaattttttttttctacttcccacccagcttaccaccttgatctctttaacttatgttctaaactttggtgttaatggtggtgtctagcatgctagtagttagattttatttagatgccataactggtaatacagcttttattttgactatattaatttagttttttgaggggaagtttgtttattctgtgactctcaaagcacacagaggttttaaaatatatattattaagactgagagaagaggaaatgggagggagtaacatcacagaagtgctgttgttcaactgttcttcaatatagttgctagtaggtttgtatttactcagtaaggaagtcagtgacctgaactacctataaaaattcagcagtgctgcagtgttgcttaagtgaaaccctttggctatctagtagtttttatgctactgaaacttggattactgtatgatattcagcttgtcttgggccctctatgtagacaaacattcatattcatagtagtgttgtatactggcctgtttttataactttatttttcaaatattaacaaccactgctttcagagtggttattttgttatttttgaagcaggaaataaccatttgtatttgcacctgcgtattgcatatgaattatggtatacttggcaaatgcttttcttttacctgtgaaaattctgaaagctggtccaagctacattgcataccaaattgtgctcttatatattatttgcatcgtgtcctttttaatcaaatagcatgttttagttttattatagtagcttttgctgtaagaatgtcacttgcttatcttttattgtacttgaattcttaatcatgcttttaacattgtatttaacaaatcatttcgtattaggttccattaaaatgtcattcctttgaaaaggcaagggatttccactttcagaatttgaaaatgaaagtagcatgtttatctaaaggcagaaaatagttcggacttggtattatgaaaataagtaatggtttctggagaggatttgtttagatttgcacagatggcgatggcaccttttacttaaattaacattaatcaacagtgctaaggaaaatttacacaaaattacaagataaaacatggaaatgtgtgcctttcagtatacaaactcttgcttggtggccatttgggtaatcagaccatttgaatgcctgagagcatgtttaatttctgtggagtgccacatatggctaaaacaactctttaatgtgcaattaatttctagagtaaaatgtctgttatgtgagggggatctttatgttgggcttttctattttttaaatgttcacatttctttctgttaattaaaatgccatcataatgtcacatttacactgttgcctcttttaaaagcaaagccactttcttgttctaagattacatcaagacttgagcagtgtgtagtaattaaaatgtgtgcttaatgagcataatagattctggttttaggaaataacatatagcttttatatgaatattttcttttgctataatgaaagtcacagattttttttttcctggcttttatggaggaatgaaaagagttgtctccctctaagagtatactatttttgattctcatagcaataatgtcaccattcttatcagagggtaaataccccttgtataggaaaacagacataatttcctcttgggagttctctttatgacttagcattttcttctacttgagaaaattcctgtttttccgattatttcatcttgaactttcttttttttaagcttttgtgcaatgtaatagtttgttgatccatctttgtacattttcattttatttcatgtctttctctcacctacctgtcagaatcagctatagcagattttgaattctttagttaaaaaatagttgctttacttgtttcctcatgagtttgttaaatagctttgcattttagtcctctattatgctatgaaaattattacgaagtttatattgttccctttttaagcctgccttactcttgtcttttgtcattgtctatggtttaatgaagaacacaccaaactaacatttttgtttattttgaggaacaaaaaaacttttctcttttaagggaagttactacacattgagttagtaactactctttcagtcaaggttccttaatcagtccagtctacatcaggactatgacttggggggcggggctaatcctttttgctgttctgagctactattgtcaactgctgttgtacatactgttatgtgtaatggcgtaaatatatttattatgtttgtaaaattcattgcagatcaaggttgctcttctgtgatatatgggatattatgttttaaagaccatcttggaatacaattagagaacttagtattttgatgtactaagacctattttaagtttaatattctactttgcaaaaactttaattaaagatgttatttaaaaaaaaatgttgcttgctttgcttactagtatatggcattgttatagataattgaataaaatacaatttagaaaggaaaatgctttacattgttaatgagaattccatttaacaacaacaaaaagatgctaaattctgtaccttaaagataagtagattgagatgtcaatttgaattagtaaactgtgttacaaatgattaatactagcttttaaaaagttgtattttccaggcacacaggaatttaggttgggcgaattcacactaacaaattataactaaaaattggtataattaacattgtttttcaaaataaagattactccttgtgaaatattaataattaacatattgtattaaataagtatttctactccaaagtatagattacttaggataaaaacattgttatttctctgtttagtcaaaccacttcctcttagttcagaggttataaataattgcatattaggagaattggattactgaggtttgtattgcgtattgaatatattttgtgttattttagaagataataattagcaggtattttaattttatagttaattcagctgaatcattaagaagctcgcctttttgtatttttttatcctgttaacagactatctagaaaacatgcaaattttaactattaacataatcataataaagatatcttatttattgccagcaaa

SEQ ID NO: 188171 - DNA, 1776 bp, Artificial Sequence
  derived and/or modified sequence
atgctagtgggatctcagagcttcagtcccggtggacctaatggaattatcagatcgcagtcatttgcaggcttttccggcctgcaggagaggcgctcccggtgtaatagctttattgagaattccagtgcccttaaaaagccgcaggccaagctgaagaagatgcacaatttgggccacaagaataacaatcctcctaaggaaccacaacctaaacgagtcgaggaagtgtatcgggccctgaaaaatggtcttgatgaatacctcgaggtccatcaaacagaactcgacaaactgacagctcaactgaaggacatgaaaagaaattcccggcttggcgtgctgtatgacttggataagcagataaagaccattgagcggtacatgagacggctggagttccatataagtaaggttgacgagttatacgaagcctactgcattcaaaggagactccaggatggggcctctaaaatgaaacaggcctttgccacatcaccagcatctaaagccgcaagggagtccttaactgagataaaccgatccttcaaagagtacaccgaaaacatgtgtacaatcgaggtggagcttgagaacctgttaggtgagtttagtattaagatgaaaggcctggcgggcttcgcccgcctctgtcccggcgatcagtatgaaattttcatgaaatacgggcgtcagcggtggaaactgaagggaaagatagaagtgaatgggaaacagtcatgggacggggaagagactgttttcctgcccttgatagttggcttcatctcaatcaaggtgacagaattaaaaggcttggctacccatattctggtgggcagtgtgacttgcgaaactaaagagctgtttgcggcacgtccgcaggtcgtagcggttgatataaatgacctgggaaccatcaagctaaatctagagatcacttggtacccttttgatgtagaagatatgacagcatcctcaggcgctggaaacaaggccgccgcactgcagcgccgcatgagcatgtattcgcagggaactcctgagacgccaacctttaaggaccacagtttcttctctaacctccctgacgacatttttgaaaacggtaaggctgcagaggagaagatgccattgtctctaagcttttccgacctacctaatggcgactgtgccctcacaagccattccaccggaagccctagtaactcaacaaaccccgagattaccattacgcccgccgagttcaatctatcaagtctcgcctctcaaaatgaaggaatggacgacacctcgtctgcctcgtccaggaatagcttgggagagggccaagagccaaagagtcaccttaaggaggaagatcccgaggaaccaaggaaaccagcctcagccccgagtgaggcctgccggagacagagttcaggggcgggcgccgaacacttgttccttgaaaacgacgtggctgaagcactgcttcaggagagcgaagaagcgtcggaattgaagcctgtggaactggacacctctgagggaaacatcacaaaacagctggtgaagcgactcacctccgcggaagttcccatggcaacagatcgactgctttccgaaggaagtgtgggtggagaatctgagggctgcagatcttttctagacggcagtctcgaggacgcctttaacggcctacttctggccctggagcctcataaggagcagtataaggagtttcaggacctaaaccaggaagttatgaacctcgatgacattctgaaaaagtag

SEQ ID NO: 188172 - DNA, 1776 bp, Artificial Sequence
  derived and/or modified sequence
atgctggtgggcagccagagcttcagccctgggggccccaacggcatcatccgcagccagagctttgctggcttcagcggcctgcaggagaggaggagccgctgcaacagcttcatcgagaacagcagcgccctgaagaagccccaggccaagctgaagaagatgcacaacctgggccacaagaacaacaacccccccaaggagccccagcccaagagggtggaggaggtgtaccgggccctgaagaatggcctggatgagtacctggaggtgcaccagacagagctggacaagctgacagcccagctgaaggacatgaagaggaacagccggctgggcgtgctgtatgacctggacaagcagatcaagaccatcgagcgctacatgaggcggctggagttccacatcagcaaggtggatgagctgtatgaggcctactgcatccagaggcggctgcaggatggagccagcaagatgaagcaggcctttgccaccagccctgccagcaaggccgcccgggagagcctgacagagatcaacagaagcttcaaggagtacacagagaacatgtgcaccatcgaggtggagctggagaacctgctgggggagttcagcatcaagatgaagggcctggccggctttgcccggctgtgccctggggaccagtatgagatcttcatgaagtatggccggcagcgctggaagctgaagggcaagattgaggtgaatggcaagcagagctgggatggagaggagaccgtcttcctgcccctgattgtgggcttcatcagcatcaaggtgacagagctgaagggcctggccacccacatcctggtgggctctgtgacctgtgagaccaaggagctgtttgctgcccggccccaggtggtggccgtggacatcaatgacctgggcaccatcaagctgaacctggagatcacctggtacccctttgatgtggaggacatgacagccagcagtggagctggcaacaaggccgccgccctgcagaggaggatgtccatgtacagccagggcaccccagagacccccaccttcaaggaccacagcttcttcagcaacctgcctgatgacatctttgaaaatggcaaggctgctgaggagaagatgcccctgagcctgtccttcagtgacctgcccaacggggactgtgccctgaccagccacagcacaggcagccccagcaacagcaccaaccctgagatcaccatcaccccagctgagttcaacctgagcagcctggccagccagaatgaaggcatggatgacaccagcagcgccagcagcaggaacagcctgggggagggccaggagcccaagagccacctgaaggaggaggaccctgaggagcccaggaagccagccagcgcccccagcgaggcctgccggcggcagagcagcggggccggggctgagcacctgttcctggagaatgatgtggccgaggccctgctgcaggagagcgaggaggccagcgagctgaagcctgtggagctggacaccagcgagggcaacatcaccaagcagctggtgaagaggctgaccagcgctgaggtgcccatggccacagaccggctgctgtctgagggctctgtgggcggggagagcgagggctgccgctccttcctggatggcagcctggaggatgccttcaacggcctgctgctggccctggagccccacaaggagcagtacaaggagttccaggacctgaaccaggaggtgatgaacctggatgacatcctgaagaagtag

SEQ ID NO: 188173 - DNA, 1776 bp, Artificial Sequence
  derived and/or modified sequence
atgctggtgggcagccagagcttcagccccggcggccccaacggcatcattcggtcgcagagcttcgctggattcagcgggttacaagagagaagatcaaggtgtaactcgttcatagaaaactcttcagccctgaaaaagccgcaggcgaagcttaaaaagatgcataatctagggcacaagaataacaacccgccaaaagagccacagccgaagagagtggaggaggtataccgagcccttaagaatggcctagatgaatatcttgaagtgcaccaaaccgagctcgacaagctgactgctcagctcaaagatatgaaaagaaactccagattgggtgtcctgtacgacctggacaagcagataaaaactatcgaaaggtacatgcgcagactagagttccacatctcaaaggtggacgaattatatgaagcatactgtattcagaggcgcctgcaggacggtgccagcaagatgaaacaggcttttgccacatcacctgcaagcaaggcggccagggagagtttaaccgaaatcaatcgtagtttcaaggagtacacagaaaacatgtgcacaatcgaagttgaactggagaacctccttggtgaattttccatcaaaatgaagggcctcgccggcttcgcccggctttgccccggcgaccaatacgaaattttcatgaagtatggccgccaaagatggaaactcaaaggcaaaatcgaggtcaacggcaagcagtcatgggatggcgaagaaacagtgttcctgcctttgattgtcggcttcattagtatcaaagtgacagagttgaagggccttgccacacacattctcgtcgggtcagtgacgtgtgaaaccaaagaattatttgccgcaaggcctcaagtcgtggccgtggacattaacgatctcgggacaattaaactcaatctggaaattacctggtacccatttgatgtcgaggatatgacggcctccagtggagctggaaataaagccgccgccctgcagcggagaatgtcgatgtactcgcaaggcactcctgagacccctacctttaaagatcactctttcttttcaaatttgcccgatgacattttcgagaatggcaaagctgctgaagagaagatgcccttatcactgtcgttttccgatctcccaaatggggattgtgccctgacctcccattccacaggttctccctccaattctacgaaccctgagataacaataacgcctgcagagtttaatcttagcagcctggcatcacagaacgaagggatggatgataccagtagcgccagtagtagaaatagcctgggtgaaggccaagagccaaagtcccacctcaaagaagaagatcctgaggaacccagaaaacccgcctctgcccccagcgaggcttgtcgcaggcaatctagtggggccggggcagagcacttgtttcttgagaacgacgtagctgaggcactgctccaggagtctgaagaagcctctgagctcaaacctgtggaattggataccagtgaaggaaacatcactaagcagcttgttaagcgcctcacgagtgccgaagtgccgatggccactgacagactgttatctgaggggtcagttggtggagaaagtgaggggtgtcgctctttcctagatggaagcctcgaggacgctttcaatggcctcctgttggccctcgagcctcataaggagcagtacaaggaattccaggacctgaatcaggaagtgatgaatcttgacgatatcctgaaaaagtag

SEQ ID NO: 188174 - DNA, 1776 bp, Artificial Sequence
  derived and/or modified sequence
atgctggtgggaagccagtctttctccccagggggacctaacggaattattcggagtcagagttttgccggattctcaggcctgcaggagcgaagatctcgctgtaattctttcatcgagaattcatcagccctcaagaaacctcaggctaaattgaagaagatgcacaacctcggccataaaaacaataatccacccaaggagccccagcccaaaagagtggaggaggtctaccgggcactaaagaatggcctggacgaatacttggaggtacaccagacagaactggacaagctgacagcccagctgaaggatatgaaaaggaactcccgcctgggtgttctgtatgacctcgataaacagataaaaactatagagcgctatatgaggagactggaatttcacatcagcaaggtggatgagctgtacgaagcctactgtattcagcgaagattgcaagatggggcttccaagatgaagcaggctttcgcaaccagcccagctagcaaggccgctcgcgagagcctgacagaaatcaatcgctcttttaaggaatacaccgaaaacatgtgcactatcgaggtggagctggagaacttattgggagagttctccatcaaaatgaaaggcctggctggcttcgccaggctttgccccggagaccagtacgaaatcttcatgaaatacggacgccagcgttggaaactcaaagggaaaattgaagtcaacggtaaacagtcatgggacggcgaggaaactgtgttccttcccctcattgtgggttttataagtatcaaagtgaccgaactcaaaggactggctactcatattttggttgggtctgttacgtgcgaaaccaaagagctgttcgctgcccgaccccaggtggttgctgttgatattaatgatctcgggactatcaaactgaacctggagattacctggtacccattcgatgtagaggatatgacagcctcctccggcgctgggaataaagccgctgcgctgcagaggcgcatgtcgatgtattctcagggcacgcctgaaactcccacattcaaagaccattctttcttctcaaatctgcctgacgacatcttcgaaaacggtaaggctgcagaggagaagatgccactgtccctcagcttctctgacctgcccaacggggactgcgccctgacatcccacagcacgggctcacctagtaactctactaatcctgagatcactatcaccccagccgaatttaacctgtcatccctcgcgtcccagaatgaaggaatggatgacacctcatcagccagcagtcggaattcactgggagaaggacaggagcctaagagtcatttgaaagaggaggaccctgaagagccaaggaaacccgcaagcgcaccttcagaggcatgtagaagacagagctccggagccggtgccgagcacctgttcctggagaatgatgtcgctgaagccctcctgcaagagagcgaagaagcaagcgaacttaaaccggtggagctagacacatccgaggggaatattacgaagcagctagtcaagagattaactagcgccgaggttcccatggctacagaccgcctgctgtctgagggttcagtaggcggagagtcagagggatgtcggagtttcctggacggtagcctggaagatgcattcaacggcttgctgttggccctagagccgcataaggaacagtataaagaattccaggacctcaatcaagaggtcatgaatctggatgatatactgaaaaagtag

SEQ ID NO: 188175 - DNA, 1776 bp, Artificial Sequence
  derived and/or modified sequence
atgctggtgggcagccagagcttcagccccggcggccccaacggcatcatcagaagccagagcttcgccggcttcagcggcctgcaggagagaagaagcagatgcaacagcttcatcgagaacagcagcgccctgaagaagccccaggccaagctgaagaagatgcacaacctgggccacaagaacaacaacccccccaaggagccccagcccaagagagtggaggaggtgtacagagccctgaagaacggcctggacgagtacctggaggtgcaccagaccgagctggacaagctgaccgcccagctgaaggacatgaagagaaacagcagactgggcgtgctgtacgacctggacaagcagatcaagaccatcgagagatacatgagaagactggagttccacatcagcaaggtggacgagctgtacgaggcctactgcatccagagaagactgcaggacggcgccagcaagatgaagcaggccttcgccaccagccccgccagcaaggccgccagagagagcctgaccgagatcaacagaagcttcaaggagtacaccgagaacatgtgcaccatcgaggtggagctggagaacctgctgggcgagttcagcatcaagatgaagggcctggccggcttcgccagactgtgccccggcgaccagtacgagatcttcatgaagtacggcagacagagatggaagctgaagggcaagatcgaggtgaacggcaagcagagctgggacggcgaggagaccgtgttcctgcccctgatcgtgggcttcatcagcatcaaggtgaccgagctgaagggcctggccacccacatcctggtgggcagcgtgacctgcgagaccaaggagctgttcgccgccagaccccaggtggtggccgtggacatcaacgacctgggcaccatcaagctgaacctggagatcacctggtaccccttcgacgtggaggacatgaccgccagcagcggcgccggcaacaaggccgccgccctgcagagaagaatgagcatgtacagccagggcacccccgagacccccaccttcaaggaccacagcttcttcagcaacctgcccgacgacatcttcgagaacggcaaggccgccgaggagaagatgcccctgagcctgagcttcagcgacctgcccaacggcgactgcgccctgaccagccacagcaccggcagccccagcaacagcaccaaccccgagatcaccatcacccccgccgagttcaacctgagcagcctggccagccagaacgagggcatggacgacaccagcagcgccagcagcagaaacagcctgggcgagggccaggagcccaagagccacctgaaggaggaggaccccgaggagcccagaaagcccgccagcgcccccagcgaggcctgcagaagacagagcagcggcgccggcgccgagcacctgttcctggagaacgacgtggccgaggccctgctgcaggagagcgaggaggccagcgagctgaagcccgtggagctggacaccagcgagggcaacatcaccaagcagctggtgaagagactgaccagcgccgaggtgcccatggccaccgacagactgctgagcgagggcagcgtgggcggcgagagcgagggctgcagaagcttcctggacggcagcctggaggacgccttcaacggcctgctgctggccctggagccccacaaggagcagtacaaggagttccaggacctgaaccaggaggtgatgaacctggacgacatcctgaagaagtag

SEQ ID NO: 188176 - DNA, 1170 bp, Artificial Sequence
  derived and/or modified sequence
atggaagacagccctaccatggtcagagtggatagccctaccatggtgagaggcgagaatcaggttagcccatgtcaggggcggcgctgcttccccaaggccttgggatatgtaactggtgatatgaaggagctggctaatcagctgaaggataagcccgtggttctacaattcatagactggatcctgcgcggaatctcccaagtggtgtttgtgaacaaccctgtctcaggaatcctcatcctcgtgggtctcctggtgcagaatccctggtgggccctgacagggtggctcggcacagtggtctctaccctgatggccctcctgctgagccaagaccgctccctcatcgcctccggtctgtacgggtacaacgcaaccctggttggggtactgatggcggtgttctccgataaaggtgactatttttggtggctccttctcccggtgtgtgccatgagtatgacgtgtcctatctttagcagtgccctcaactccatgctgtctaaatgggacctgccagtgttcactcttcccttcaatatggcactttcaatgtacctgtccgcaacaggccattataaccccttcttcccagctaagcttgtgatccctattacaacggcacctaacatatcatggtccgacctgagtgccctggaacttctgaaatccataccagtgggcgtgggtcagatttacgggtgtgataatccttggaccggggggatcttcctgggcgctatattgcttagctcccctctcatgtgccttcatgccgcaatcggaagtctgttggggatcgccgctggactttctctgagcgccccatttgaagatatctattttggactttgggggttcaatagcagcctagcttgtatcgcaatggggggcatgttcatggccctaacctggcagacacatctgttggctctgggctgcgcccttttcacggcctacctgggagtaggtatggcaaactttatggccgaggttgggcttcccgcgtgtacctggcctttttgtctcgcaaccttgctgtttctgatcatgactacaaagaacagtaatatctacaaaatgccactgtccaaggtcacttatccagaagagaatcgtatattttatctacaggcaaagaaaaggatggtggaatcccccctgtag

SEQ ID NO: 188177 - DNA, 1170 bp, Artificial Sequence
  derived and/or modified sequence
atggaggacagccccaccatggtgcgggtggacagccccaccatggtgagaggagagaaccaggtgagcccctgccagggccgccgctgcttccccaaggccctgggctacgtgactggagacatgaaggagctggccaaccagctgaaggacaagcctgtggtgctgcagttcatcgactggatcctgcggggcatcagccaggtggtgtttgtgaacaaccctgtgtctggcatcctgatcctggtgggcctgctggtgcagaacccctggtgggccctgaccggctggctgggcaccgtggtgtccaccctgatggccctgctgctgagccaggacaggagcctgattgccagcggcctgtatggctacaatgccaccctggtgggcgtgctgatggctgtgttcagtgacaagggggactacttctggtggctgctgctgcctgtgtgtgccatgtccatgacctgccccatcttcagcagcgccctgaacagcatgctgagcaagtgggacctgcccgtcttcaccctgcccttcaacatggccctgtccatgtacctgagcgccaccggccactacaaccccttcttccctgccaagctggtgatccccatcaccacagcccccaacatctcctggagcgacctgagcgccctggagctgctgaagagcatccctgtgggcgtgggccagatctacggctgtgacaacccctggacaggaggcatcttcctgggcgccatcctgctgagcagccccctgatgtgcctgcacgccgccatcggcagcctgctgggcattgctgctggcctgagcctgagcgccccctttgaggacatctacttcggcctgtggggcttcaacagcagcctggcctgcatcgccatgggcggcatgttcatggccctgacctggcagacccacctgctggccctgggctgtgccctcttcaccgcctacctgggcgtgggcatggccaacttcatggccgaggtgggcctgcctgcctgcacctggcccttctgcctggccaccctgctcttcctgatcatgaccaccaagaacagcaacatctacaagatgcccctgagcaaggtgacctacccagaggagaaccgcatcttctacctgcaggccaagaagaggatggtggagagccccctgtag

SEQ ID NO: 188178 - DNA, 1170 bp, Artificial Sequence
  derived and/or modified sequence
atggaggacagccccaccatggtgcgggtggacagccccaccatggtccgcggcgagaaccaagtctcaccatgccagggaaggcggtgcttccccaaagccctgggatacgtgaccggggatatgaaagagctggcaaatcagctgaaagacaaacctgtggtgctccagttcattgactggattctgcgcggcatctcacaggtggtcttcgtgaacaaccccgttagcggaattttaatattagtgggcctccttgtccagaatccctggtgggctctaactggttggctcggaacggttgtgagcactttgatggcactgctgctctcccaagatcggtctctgatcgcatctggcctgtacggttacaatgccacactggtgggtgtgctcatggcagttttcagcgacaaaggcgactacttttggtggcttctgttaccagtctgcgctatgtctatgacttgccccattttctcatccgcacttaactcaatgctgtccaagtgggatctgccggtgttcacactgccatttaatatggccctttcgatgtaccttagtgccaccggccactacaatccgttcttcccggcaaagttagtgattccaatcacaacggcaccgaacataagctggtcagatctcagcgcactggaactgctcaagagcatacccgtaggtgtgggacagatatacggctgcgacaacccctggactgggggtatctttctgggggcaatccttctcagcagtcctctcatgtgcttacacgcagccattggcagtctgctggggatcgctgcaggactctctctgtcggccccgtttgaggatatttacttcggcctgtggggcttcaattcaagcctggcctgtattgcaatgggggggatgttcatggctctgacatggcagacacacttgttggccttaggctgcgcactcttcactgcttacctgggtgtgggtatggccaatttcatggcggaagttggactgcctgcatgtacatggcccttttgtctcgctactctgctatttctgatcatgaccacaaaaaactccaatatctataagatgcccctctccaaggttacatacccagaagagaatagaatcttctatcttcaggccaagaagcgcatggttgaatctccactttag

SEQ ID NO: 188179 - DNA, 1170 bp, Artificial Sequence
  derived and/or modified sequence
atggaagactctccaacaatggtgagagtcgattctcccacaatggtgcgcggagagaaccaggtgagcccgtgtcagggaagaaggtgctttcctaaagccctcgggtacgtgaccggtgacatgaaagaactggccaaccagctgaaggacaaaccagttgtgctccagttcattgactggatcctgcggggaatttcacaggtggtattcgtgaacaacccagtcagcggtatcctgatcctcgtgggtctgttggtgcaaaatccgtggtgggcgctgactggatggttggggacagttgtatccacactgatggccctgctcctgagtcaagataggagcttaatagcctccggcctgtatggctacaacgctaccttggttggagtgcttatggccgtatttagcgataaaggggactacttctggtggctgttgcttcccgtttgcgctatgagcatgacttgccccattttctcgagtgcactgaactcaatgctgagcaaatgggatttacccgttttcaccctgcccttcaacatggctctgtcaatgtacctgagtgccaccggacactacaaccccttcttcccagccaaactagtaattccaatcaccacagcccctaatatctcttggtctgatctaagcgctctggaactcctgaagtctatcccagttggggtgggacagatttacggctgcgataatccatggacaggaggaatcttcctgggtgccattctcctgtcatcccccttgatgtgcctgcacgccgctatcggctccttgctgggcattgctgcaggcttgagtctcagcgccccttttgaggacatctatttcggactgtgggggttcaactcaagcctcgcatgcattgccatgggcggaatgttcatggccctgacttggcagacccacttgctagccctcggatgtgcactttttaccgcttacctgggtgtgggaatggcaaatttcatggctgaggttgggcttcccgcttgcacctggcctttctgtctggccaccctcctgtttctgatcatgacaaccaaaaacagcaacatctacaagatgcccctgagtaaggtgacttacccagaggagaatagaatcttctatctgcaggcaaagaaaaggatggtggagtccccgctgtag

SEQ ID NO: 188180 - DNA, 1390 bp, Artificial Sequence
  derived and/or modified sequence
atctcctgagaagcactctcccttgtcgtggaggtgggcaaatctttatcagccactgccttctgctgccaggaagccagctagagtggtctttaaagaaaactgggcatctcctgctacttaaaatcaaaaactacctaaaataaagattataacaaacccgtggtgctccagttcattgactggattctccggggcatatcccaagtggtgttcgtcaacaaccccgtcagtggaatcctgattctggtaggacttcttgttcagaacccctggtgggctctcactggctggctgggaacagtggtctccactctgatggccctcttgctcagccaggacaggtcattaatagcatctgggctctatggctacaatgccaccctggtgggagtactcatggctgtcttttcggacaagggagactatttctggtggctgttactccctgtatgtgctatgtccatgacttgcccaattttctcaagtgcattgaattccatgctcagcaaatgggacctccccgtcttcaccctccctttcaacatggcgttgtcaatgtacctttcagccacaggacattacaatccattctttccagccaaactggtcatacctataactacagctccaaatatctcctggtctgacctcagtgccctggagttgttgaaatctataccagtgggagttggtcagatctatggctgtgataatccatggacagggggcattttcctgggagccatcctactctcctccccactcatgtgcctgcatgctgccataggatcattgctgggcatagcagcgggactcagtctttcagccccatttgaggacatctactttggactctggggtttcaacagctctctggcctgcattgcaatgggaggaatgttcatggcgctcacctggcaaacccacctcctggctcttggctgtgccctgttcacggcctatcttggagtcggcatggcaaactttatggctgaggttggattgccagcttgtacctggcccttctgtttggccacgctattgttcctcatcatgaccacaaaaaattccaacatctacaagatgcccctcagtaaagttacttatcctgaagaaaaccgcatcttctacctgcaagccaagaaaagaatggtggaaagccctttgtgagaacaagccccatttgcagccatggtcacgagtcatttctgcctgactgctccagctaacttccagggtctcagcaaactgctgtttttcacgagtatcaactttcatactgacgcgtctgtaatctgttcttatgctcattttgtattttcctttcaactccaggaatatccttgagcatatgagagtcacatccaggtgatgtgctctggtatgg

SEQ ID NO: 188181 - DNA, 1170 bp, Artificial Sequence
  derived and/or modified sequence
atggaggacagccccaccatggtgagagtggacagccccaccatggtgagaggcgagaaccaggtgagcccctgccagggcagaagatgcttccccaaggccctgggctacgtgaccggcgacatgaaggagctggccaaccagctgaaggacaagcccgtggtgctgcagttcatcgactggatcctgagaggcatcagccaggtggtgttcgtgaacaaccccgtgagcggcatcctgatcctggtgggcctgctggtgcagaacccctggtgggccctgaccggctggctgggcaccgtggtgagcaccctgatggccctgctgctgagccaggacagaagcctgatcgccagcggcctgtacggctacaacgccaccctggtgggcgtgctgatggccgtgttcagcgacaagggcgactacttctggtggctgctgctgcccgtgtgcgccatgagcatgacctgccccatcttcagcagcgccctgaacagcatgctgagcaagtgggacctgcccgtgttcaccctgcccttcaacatggccctgagcatgtacctgagcgccaccggccactacaaccccttcttccccgccaagctggtgatccccatcaccaccgcccccaacatcagctggagcgacctgagcgccctggagctgctgaagagcatccccgtgggcgtgggccagatctacggctgcgacaacccctggaccggcggcatcttcctgggcgccatcctgctgagcagccccctgatgtgcctgcacgccgccatcggcagcctgctgggcatcgccgccggcctgagcctgagcgcccccttcgaggacatctacttcggcctgtggggcttcaacagcagcctggcctgcatcgccatgggcggcatgttcatggccctgacctggcagacccacctgctggccctgggctgcgccctgttcaccgcctacctgggcgtgggcatggccaacttcatggccgaggtgggcctgcccgcctgcacctggcccttctgcctggccaccctgctgttcctgatcatgaccaccaagaacagcaacatctacaagatgcccctgagcaaggtgacctaccccgaggagaacagaatcttctacctgcaggccaagaagagaatggtggagagccccctgtag

SEQ ID NO: 188182 - protein, 341 aa, Artificial Sequence
  derived and/or modified sequence
MSLMVVSMVCVGFFLLQGAWPHEGVHRKPSLLAHPGPLVKSEETVILQCWSDVRFQHFLLHREGKFKDTLHLIGEHHDGVSKANFSIGPMMQDLAGTYRCYGSVTHSPYQLSAPSDPLDIVITGLYEKPSLSAQPGPTVLAGESVTLSCSSRSSYDMYHLSREGEAHERRFSAGPKVNGTFQADFPLGPATHGGTYRCFGSFRDSPYEWSNSSDPLLVSVTGNPSNSWPSPTEPSSETGNPRHLHVLIGTSVVIILFILLLFFLLHRWCCNKKNAVVMDQEPAGNRTVNREDSDEQDPQEVTYAQLNHCVFTQRKITRPSQRPKTPPTDIIVYTELPNAEP

SEQ ID NO: 188183 - DNA, 1026 bp, Artificial Sequence
  derived and/or modified sequence
atgagtctgatggttgtgtccatggtgtgcgtgggcttcttcctactgcagggagcatggcctcatgaaggcgtacaccgaaaacccagcttattagcccatcctggaccattagttaagagtgaggaaaccgtcattttgcagtgctggagcgacgtgcgctttcagcattttcttctgcacagagagggtaagtttaaggacactttacacttaataggcgagcaccatgatggcgtgagcaaggcaaactttagcatcggtccaatgatgcaggatttggcgggcacatacaggtgctacggatccgtaacgcacagtccttatcaactgtctgcccctagcgatcccctcgacattgtaatcactggcctgtacgaaaagccttccctgtctgcccagccaggtccgacggttttggccggggaatccgtgacgctctcttgctcctcccgctcgtcatatgacatgtaccatctcagtagagaaggcgaggctcacgaaaggcgctttagtgctgggccgaaggtgaacgggacattccaggctgattttccactcggccctgccacccacggggggacttaccggtgcttcggcagttttcgcgactcaccttatgagtggtccaactcatctgatcccctcctggtgtcagtgacaggtaatccctccaattcctggccttctcccaccgagccttcatctgaaaccggaaacccgaggcacttacatgtcttgattgggactagtgtcgtgatcatcctgttcattcttctgctgttcttcctcctgcaccgttggtgttgtaacaagaaaaatgccgtggtcatggatcaagaaccagcgggcaataggaccgtcaaccgcgaagattcggatgaacaagacccccaagaagtgacctatgcgcagctgaaccactgtgtattcacccaacgtaagatcaccaggccatctcagaggcccaagactccgccgaccgacatcattgtttatactgaattgcccaatgctgagccttag

SEQ ID NO: 188184 - DNA, 1590 bp, Artificial Sequence
  derived and/or modified sequence
ggcgcggccgcctgtctgcacagacagcaccatgtcgctcatggtcgtcagcatggtgtgtgttgggttcttcttgctgcagggggcctggccacatgagggagtccacagaaaaccttccctcctggcccacccaggtcccctggtgaaatcagaagagacagtcatcctgcaatgttggtcagatgtcaggtttcagcacttccttctgcacagagaagggaagtttaaggacactttgcacctcattggagagcaccatgatggggtctccaaggccaacttctccatcggtcccatgatgcaagaccttgcagggacctacagatgctacggttctgttactcactccccctatcagttgtcagctcccagtgaccctctggacatcgtcatcacaggtctatatgagaaaccttctctctcagcccagccgggccccacggttctggcaggagagagcgtgaccttgtcctgcagctcccggagctcctatgacatgtaccatctatccagggagggggaggcccatgaacgtaggttctctgcagggcccaaggtcaacggaacattccaggccgactttcctctgggccctgccacccacggaggaacctacagatgcttcggctctttccgtgactctccatacgagtggtcaaactcgagtgacccactgcttgtttctgtcacaggaaacccttcaaatagttggccttcacccactgaaccaagctccgaaaccggtaaccccagacacctgcatgttctgattgggacctcagtggtcatcatcctcttcatcctcctcctcttctttctccttcatcgctggtgctgcaacaaaaaaaatgctgttgtaatggaccaagagcctgcagggaacagaacagtgaacagggaggactctgatgaacaagaccctcaggaggtgacatatgcacagttgaatcactgcgttttcacacagagaaaaatcactcgcccttctcagaggcccaagacacccccaacagatatcatcgtgtacacggaacttccaaatgctgagccctgatccaaagttgtctcctgcccatgagcaccacagtcaggccttgaggggatcttctagggagacaacagccctgtctcaaaactgggttgccagctccaatgtaccagcagctggaatctgaaggcgtgagtctgcatcttagggcatcgctcttcctcacaccacaaatctgaacgtgcctctcccttgcttacaaatgtctaaggtccccactgcctgctggagagaaaacacactcctttgcttagcccacaattctccatttcacttgacccctgcccacctctccaacctaactggcttacttcctagtctacttgaggctgcaatcacactgaggaactcacaattccaaacatacaagaggctccctcttaacacggcacttagacacgtgctgttccaccttccctcatgctgttccacctcccctcagactagctttcagccttctgtcagcagtaaaacttatatattttttaaaataatttcaatgtagttttccctccttcaaataaacatgtctgccctca

SEQ ID NO: 188185 - DNA, 1026 bp, Artificial Sequence
  derived and/or modified sequence
atgagcctgatggtggtgtccatggtgtgtgtgggcttcttcctgctgcagggcgcctggccccatgagggcgtgcacaggaagcccagcctgctggcccaccctggccccctggtgaagtctgaggagaccgtcatcctgcagtgctggagcgatgtgcgcttccagcacttcctgctgcaccgggagggcaagttcaaggacaccctgcacctgattggagagcaccatgatggagtgtccaaggccaacttcagcatcggccccatgatgcaggacctggccggcacctaccgctgctacggctctgtgacccacagcccctaccagctgagcgcccccagcgaccccctggacatcgtcatcaccggcctgtatgagaagcccagcctgagcgcccagcccggccccaccgtgctggccggggagagcgtgaccctgagctgcagcagccgcagcagctatgacatgtaccacctgagccgggagggggaggcccatgaaagacgcttctctgctggccccaaggtgaatggcaccttccaggccgacttccccctgggccctgccacccacggcggcacctaccgctgcttcggcagcttccgggacagcccctatgagtggagcaacagcagtgaccccctgctggtgtctgtgactggaaaccccagcaacagctggcccagccccacagagcccagcagcgagaccggcaaccccaggcacctgcacgtgctgattggcacctctgtggtgatcatcctcttcatcctgctgctcttcttcctgctgcaccgctggtgctgcaacaagaagaatgctgtggtgatggaccaggagcctgctggcaacagaacagtgaacagagaagattctgatgagcaggacccccaggaggtgacctacgcccagctgaaccactgtgtgttcacccagaggaagatcacccggcccagccagaggcccaagaccccacccacagacatcatcgtgtacacagagctgcccaatgctgagccctag

SEQ ID NO: 188186 - DNA, 1026 bp, Artificial Sequence
  derived and/or modified sequence
atgagcctgatggtggtgagcatggtgtgcgtgggcttcttcctgctgcagggagcatggccacacgagggcgtccaccgtaaaccatcccttcttgcccatcccggaccattggtgaagtcagaggaaactgtcatcctgcagtgttggtccgacgtaagattccagcactttcttctgcacagggaaggcaaatttaaagatactctccacctcatcggggagcatcacgatggcgtctctaaagccaatttttctatcggcccaatgatgcaggatctcgctggcacataccggtgttacgggagtgtgacgcattctccctaccaactgagcgctccaagcgaccctcttgatattgttatcactggcctatacgagaagccctccctgagcgcacagcccggcccgactgtactggccggtgagagtgtgactctttcgtgcagctcccgttcgagctacgatatgtaccacctgagtcgagagggggaggcacatgagaggcgatttagcgccggtcctaaggtcaatgggaccttccaggcagatttcccgctgggtcccgccacgcacggggggacctacaggtgcttcggtagcttcagagattcgccctacgagtggtccaactcctccgacccgttgctagtaagtgtaactggaaatccaagcaatagttggccttcaccaaccgagccgagctcagaaactgggaacccccggcatctgcatgtactgatcggaacttctgtggtgattattctcttcattctgttactcttttttctattacaccgttggtgttgcaacaaaaagaatgctgtggtgatggatcaagaacccgccggaaaccgtacagtgaacagggaagattccgatgagcaggatccccaggaggtcacatacgcccagttgaaccactgcgtcttcacacaacgcaaaataacacgtccaagccagagacctaagactccacctacggatatcatcgtatacacagaattgccgaacgccgagccctag

SEQ ID NO: 188187 - DNA, 1026 bp, Artificial Sequence
  derived and/or modified sequence
atgtctctgatggttgtgagcatggtttgcgtgggcttttttctgctgcaaggtgcttggccccatgagggtgttcaccgcaagccctctctactggcccatccagggcctctggtaaaatcagaagagaccgttatactgcagtgctggtccgacgtccgttttcaacattttctactgcatcgggaaggcaaattcaaggacacactccatttgattggtgagcaccacgatggagtgtcaaaggcgaatttctctatcggtccaatgatgcaagatctcgctggcacctatcggtgttacggcagtgtcacccattctccataccaactctccgccccatcagatcctttggatatcgtgattaccggattgtatgagaagccaagcctgagtgcccagcccggtccaaccgttcttgctggcgagtccgtgaccctgagttgctcatcaaggagttcctacgatatgtatcatctgtcccgtgaaggggaggctcacgagcggaggttcagcgctgggccaaaagttaacgggacatttcaggccgacttcccgctgggacctgcaacacacgggggtacatacaggtgtttcggctctttcagggactccccatacgaatggtccaattcttccgatccattgttggtatctgtcactggcaatccctctaactcctggccaagtccgaccgagccctcatccgaaacaggcaatcctaggcatctccacgtgctgatagggacaagcgtggttatcatactgttcatcctcctgctcttttttctgcttcatcggtggtgctgcaacaaaaagaatgcagtcgtgatggatcaagaaccagccggaaaccgcactgtcaacagggaagactccgatgagcaggacccacaggaggtaacttatgcccagctaaatcactgcgtgtttacgcagagaaaaattacaagaccctcacagcgtcctaagaccccccctaccgatatcatcgtatacactgagctgccgaacgcggaaccctag

SEQ ID NO: 188188 - DNA, 1026 bp, Artificial Sequence
  derived and/or modified sequence
atgagcctgatggtggtgagcatggtgtgcgtgggcttcttcctgctgcagggcgcctggccccacgagggcgtgcacagaaagcccagcctgctggcccaccccggccccctggtgaagagcgaggagaccgtgatcctgcagtgctggagcgacgtgagattccagcacttcctgctgcacagagagggcaagttcaaggacaccctgcacctgatcggcgagcaccacgacggcgtgagcaaggccaacttcagcatcggccccatgatgcaggacctggccggcacctacagatgctacggcagcgtgacccacagcccctaccagctgagcgcccccagcgaccccctggacatcgtgatcaccggcctgtacgagaagcccagcctgagcgcccagcccggccccaccgtgctggccggcgagagcgtgaccctgagctgcagcagcagaagcagctacgacatgtaccacctgagcagagagggcgaggcccacgagagaagattcagcgccggccccaaggtgaacggcaccttccaggccgacttccccctgggccccgccacccacggcggcacctacagatgcttcggcagcttcagagacagcccctacgagtggagcaacagcagcgaccccctgctggtgagcgtgaccggcaaccccagcaacagctggcccagccccaccgagcccagcagcgagaccggcaaccccagacacctgcacgtgctgatcggcaccagcgtggtgatcatcctgttcatcctgctgctgttcttcctgctgcacagatggtgctgcaacaagaagaacgccgtggtgatggaccaggagcccgccggcaacagaaccgtgaacagagaggacagcgacgagcaggacccccaggaggtgacctacgcccagctgaaccactgcgtgttcacccagagaaagatcaccagacccagccagagacccaagaccccccccaccgacatcatcgtgtacaccgagctgcccaacgccgagccctag

SEQ ID NO: 188189 - DNA, 1596 bp, Artificial Sequence
  derived and/or modified sequence
agctggggcgcggccgcctgtctgcacagacagcaccatgtcgctcatggtcgtcagcatggtgtgtgttgggttcttcttgctgcagggggcctggccacatgagggagtccacagaaaaccttccctcctggcccacccaggtcccctggtgaaatcagaagagacagtcatcctgcaatgttggtcagatgtcaggtttcagcacttccttctgcacagagaagggaagtttaaggacactttgcacctcattggagagcaccatgatggggtctccaaggccaacttctccatcggtcccatgatgcaagaccttgcagggacctacagatgctacggttctgttactcactccccctatcagttgtcagctcccagtgaccctctggacatcgtcatcacaggtctatatgagaaaccttctctctcagcccagccgggccccacggttctggcaggagagagcgtgaccttgtcctgcagctcccggagctcctatgacatgtaccatctatccagggagggggaggcccatgaacgtaggttctctgcagggcccaaggtcaacggaacattccaggccgactttcctctgggccctgccacccacggaggaacctacagatgcttcggctctttccgtgactctccatacgagtggtcaaactcgagtgacccactgcttgtttctgtcacaggaaacccttcaaatagttggccttcacccactgaaccaagctccgaaaccggtaaccccagacacctgcatgttctgattgggacctcagtggtcatcatcctcttcatcctcctcctcttctttctccttcatcgctggtgctgcaacaaaaaaaatgctgttgtaatggaccaagagcctgcagggaacagaacagtgaacagggaggactctgatgaacaagaccctcaggaggtgacatatgcacagttgaatcactgcgttttcacacagagaaaaatcactcgcccttctcagaggcccaagacacccccaacagatatcatcgtgtacacggaacttccaaatgctgagccctgatccaaagttgtctcctgcccatgagcaccacagtcaggccttgaggggatcttctagggagacaacagccctgtctcaaaactgggttgccagctccaatgtaccagcagctggaatctgaaggcgtgagtctgcatcttagggcatcgctcttcctcacaccacaaatctgaacgtgcctctcccttgcttacaaatgtctaaggtccccactgcctgctggagagaaaacacactcctttgcttagcccacaattctccatttcacttgacccctgcccacctctccaacctaactggcttacttcctagtctacttgaggctgcaatcacactgaggaactcacaattccaaacatacaagaggctccctcttaacacggcacttagacacgtgctgttccaccttccctcatgctgttccacctcccctcagactagctttcagccttctgtcagcagtaaaacttatatattttttaaaataatttcaatgtagttttccctccttcaaataaacatgtctgccctca

SEQ ID NO: 188190 - protein, 186 aa, Artificial Sequence
  derived and/or modified sequence
MTMVDTEMPFWPTNFGISSVDLSVMEDHSHSFDIKPFTTVDFSSISTPHYEDIPFTRTDPVVADYKYDLKLQEYQSAIKVEPASPPYYSEKTQLYNKPHEEPSNSLMAIECRVCGDKASGFHYGVHACEGCKGFFRRTIRLKLIYDRCDLNCRIHKKSRNKCQYCRFQKCLAVGMSHNEELQKDSY

SEQ ID NO: 188191 - protein, 505 aa, Artificial Sequence
  derived and/or modified sequence
MGETLGDSPIDPESDSFTDTLSANISQEMTMVDTEMPFWPTNFGISSVDLSVMEDHSHSFDIKPFTTVDFSSISTPHYEDIPFTRTDPVVADYKYDLKLQEYQSAIKVEPASPPYYSEKTQLYNKPHEEPSNSLMAIECRVCGDKASGFHYGVHACEGCKGFFRRTIRLKLIYDRCDLNCRIHKKSRNKCQYCRFQKCLAVGMSHNAIRFGRMPQAEKEKLLAEISSDIDQLNPESADLRALAKHLYDSYIKSFPLTKAKARAILTGKTTDKSPFVIYDMNSLMMGEDKIKFKHITPLQEQSKEVAIRIFQGCQFRSVEAVQEITEYAKSIPGFVNLDLNDQVTLLKYGVHEIIYTMLASLMNKDGVLISEGQGFMTREFLKSLRKPFGDFMEPKFEFAVKFNALELDDSDLAIFIAVIILSGDRPGLLNVKPIEDIQDNLLQALELQLKLNHPESSQLFAKLLQKMTDLRQIVTEHVQLLQVIKKTETDMSLHPLLQEIYKDLY

SEQ ID NO: 188192 - protein, 477 aa, Artificial Sequence
  derived and/or modified sequence
MTMVDTEMPFWPTNFGISSVDLSVMEDHSHSFDIKPFTTVDFSSISTPHYEDIPFTRTDPVVADYKYDLKLQEYQSAIKVEPASPPYYSEKTQLYNKPHEEPSNSLMAIECRVCGDKASGFHYGVHACEGCKGFFRRTIRLKLIYDRCDLNCRIHKKSRNKCQYCRFQKCLAVGMSHNAIRFGRMPQAEKEKLLAEISSDIDQLNPESADLRALAKHLYDSYIKSFPLTKAKARAILTGKTTDKSPFVIYDMNSLMMGEDKIKFKHITPLQEQSKEVAIRIFQGCQFRSVEAVQEITEYAKSIPGFVNLDLNDQVTLLKYGVHEIIYTMLASLMNKDGVLISEGQGFMTREFLKSLRKPFGDFMEPKFEFAVKFNALELDDSDLAIFIAVIILSGDRPGLLNVKPIEDIQDNLLQALELQLKLNHPESSQLFAKLLQKMTDLRQIVTEHVQLLQVIKKTETDMSLHPLLQEIYKDLY

SEQ ID NO: 188193 - protein, 483 aa, Artificial Sequence
  derived and/or modified sequence
MKGFSEMTMVDTEMPFWPTNFGISSVDLSVMEDHSHSFDIKPFTTVDFSSISTPHYEDIPFTRTDPVVADYKYDLKLQEYQSAIKVEPASPPYYSEKTQLYNKPHEEPSNSLMAIECRVCGDKASGFHYGVHACEGCKGFFRRTIRLKLIYDRCDLNCRIHKKSRNKCQYCRFQKCLAVGMSHNAIRFGRMPQAEKEKLLAEISSDIDQLNPESADLRALAKHLYDSYIKSFPLTKAKARAILTGKTTDKSPFVIYDMNSLMMGEDKIKFKHITPLQEQSKEVAIRIFQGCQFRSVEAVQEITEYAKSIPGFVNLDLNDQVTLLKYGVHEIIYTMLASLMNKDGVLISEGQGFMTREFLKSLRKPFGDFMEPKFEFAVKFNALELDDSDLAIFIAVIILSGDRPGLLNVKPIEDIQDNLLQALELQLKLNHPESSQLFAKLLQKMTDLRQIVTEHVQLLQVIKKTETDMSLHPLLQEIYKDLY

SEQ ID NO: 188194 - DNA, 1818 bp, Artificial Sequence
  derived and/or modified sequence
ggcgcccgcgcccgcccccgcgccgggcccggctcggcccgacccggctccgccgcgggcaggcggggcccagcgcactcggagcccgagcccgagccgcagccgccgcctggggcgcttgggtcggcctcgaggacaccggagaggggcgccacgccgccgtggccgcagaaatgaccatggttgacacagagatgccattctggcccaccaactttgggatcagctccgtggatctctccgtaatggaagaccactcccactcctttgatatcaagcccttcactactgttgacttctccagcatttctactccacattacgaagacattccattcacaagaacagatccagtggttgcagattacaagtatgacctgaaacttcaagagtaccaaagtgcaatcaaagtggagcctgcatctccaccttattattctgagaagactcagctctacaataagcctcatgaagagccttccaactccctcatggcaattgaatgtcgtgtctgtggagataaagcttctggatttcactatggagttcatgcttgtgaaggatgcaagggtttcttccggagaacaatcagattgaagcttatctatgacagatgtgatcttaactgtcggatccacaaaaaaagtagaaataaatgtcagtactgtcggtttcagaaatgccttgcagtggggatgtctcataatgccatcaggtttgggcggatgccacaggccgagaaggagaagctgttggcggagatctccagtgatatcgaccagctgaatccagagtccgctgacctccgggccctggcaaaacatttgtatgactcatacataaagtccttcccgctgaccaaagcaaaggcgagggcgatcttgacaggaaagacaacagacaaatcaccattcgttatctatgacatgaattccttaatgatgggagaagataaaatcaagttcaaacacatcacccccctgcaggagcagagcaaagaggtggccatccgcatctttcagggctgccagtttcgctccgtggaggctgtgcaggagatcacagagtatgccaaaagcattcctggttttgtaaatcttgacttgaacgaccaagtaactctcctcaaatatggagtccacgagatcatttacacaatgctggcctccttgatgaataaagatggggttctcatatccgagggccaaggcttcatgacaagggagtttctaaagagcctgcgaaagccttttggtgactttatggagcccaagtttgagtttgctgtgaagttcaatgcactggaattagatgacagcgacttggcaatatttattgctgtcattattctcagtggagaccgcccaggtttgctgaatgtgaagcccattgaagacattcaagacaacctgctacaagccctggagctccagctgaagctgaaccaccctgagtcctcacagctgtttgccaagctgctccagaaaatgacagacctcagacagattgtcacggaacacgtgcagctactgcaggtgatcaagaagacggagacagacatgagtcttcacccgctcctgcaggagatctacaaggacttgtactagcagagagtcctgagccactgccaacatttcccttcttccagttgcactattctgagggaaaatctgacacctaagaaatttactgtgaaaaagcattttaaaaagaaaaggttttagaatatgatctattttatgcatattgtttataaagacacatttacaatttacttttaatattaaaaattaccatattatgaaattgctgatagta

SEQ ID NO: 188195 - DNA, 93 bp, Artificial Sequence
  derived and/or modified sequence
aaggattcgaatggaatgaaaaagaattgaatggaatagaacagaatggaatcaaatcgaatgaaatggagtggaatagaaaggaatggaatg

SEQ ID NO: 188196 - DNA, 1518 bp, Artificial Sequence
  derived and/or modified sequence
atgggcgagaccctgggggattcccctatcgaccccgagagcgacagtttcacagatacactgagcgccaatatctcccaagaaatgactatggttgatactgaaatgcctttttggcctaccaatttcggaatctcttccgtcgacctcagcgtgatggaggatcattcccacagctttgatattaagcctttcactacagtagacttcagcagcatctctactccacattacgaagatattccgtttacccgcacagaccctgttgtcgcagactacaaatatgatctaaaactgcaagaataccagagcgccatcaaggtggagccagcatctcccccatattatagcgagaagactcaactctataataagccccacgaggagccttcgaactcactcatggcgatcgagtgtagggtgtgcggtgacaaggctagcgggttccattatggcgttcacgcctgtgaaggatgcaaaggcttcttccgacgaactatcagactgaaactgatatatgataggtgtgatctgaattgtcgtatacacaagaagagccgaaacaagtgccagtattgtcgcttccagaagtgcttggccgtaggaatgtcgcacaacgcaatccgatttggcagaatgccacaggccgagaaagagaagttactggctgagataagctctgatatagaccagctgaaccccgaatcggcagacttgagagctcttgctaagcacttatacgattcatacataaagtcattccctctgaccaaggctaaagcacgagcaatattaacaggaaagaccaccgacaaatctccctttgtgatctatgatatgaattctctcatgatgggcgaggacaaaatcaaattcaaacacatcacacccctccaggagcagtctaaggaggtagccattaggatttttcagggttgccagtttagatcagttgaggccgtacaggagatcaccgagtatgccaagtccattcccggttttgtgaacttagatctgaatgatcaagtgactctgctgaaatatggcgtacacgagatcatctacaccatgctagctagcctgatgaacaaggacggggttctgattagcgaggggcagggattcatgacaagggaattcctcaaatccctcaggaaacctttcggagactttatggaacccaagtttgagtttgccgtgaaattcaacgccctggagctggacgattccgacttggctatcttcatcgcggtgatcatactctctggagaccggcccggtctgctgaacgtcaagccaatcgaggacattcaggacaacctgctgcaggccctggaactgcaattgaaactgaatcaccccgagagtagtcaattgttcgcaaaattactccagaagatgacggacctccgacagatcgtgaccgaacacgtgcagctcttgcaggttatcaagaagaccgagacagacatgtccttgcacccactcctgcaggaaatttataaagacttgtactag

SEQ ID NO: 188197 - DNA, 1452 bp, Artificial Sequence
  derived and/or modified sequence
atgaaagggttcagcgaaatgacaatggtagataccgaaatgccgttctggcccaccaattttggaatctcatcggtcgacctttccgtgatggaagaccattcgcactctttcgacataaaacccttcacaactgtcgacttctctagcatatctacgccccattacgaggatattccttttactaggactgaccccgttgtcgccgattacaaatacgacctcaagttgcaggagtatcagtccgctattaaggtggagcctgcctcacctccctactactccgagaagacccaattgtacaacaagccccacgaagaacccagtaattccctgatggcgatcgagtgtcgcgtgtgcggtgataaggccagcggattccattacggggttcacgcttgtgagggatgcaagggttttttccggcgtaccataaggctcaaactgatctacgaccgctgcgacctgaactgtcgtatccataagaagtcccggaataaatgccaatactgccgattccagaaatgcctggctgtaggaatgtcccacaacgctattagatttgggcgcatgccacaggctgagaaggaaaagctgctggcagaaattagcagtgacatcgaccaactcaacccagaaagtgctgatctccgggcccttgcaaaacatctgtatgattcctatatcaaatccttccctctgaccaaagcgaaagctcgggcaatcctgacagggaaaaccactgataagtcaccattcgtaatctatgatatgaacagtctcatgatgggcgaggataagataaaattcaagcatatcaccccactgcaggagcagagtaaggaggtcgctatccgcatattccagggctgtcagttccgctcagtcgaagcagtccaggaaattacagaatatgccaaatcaatccctggcttcgtgaatcttgatcttaatgaccaggttacactgttaaagtatggtgttcatgagatcatctacaccatgctggcatcccttatgaataaagatggagtcctcataagtgaaggtcagggttttatgacgcgggaatttctgaagagcctgaggaagccttttggcgatttcatggaacctaagtttgagttcgcagtgaagtttaacgctctggaactggatgacagcgacctggcaattttcatcgccgtgattattctttccggggacagacccggattgctaaatgtgaaaccaattgaagatattcaagacaatttactgcaggcactcgagctccaactaaagctgaatcatcctgagtcatcccagttattcgcaaagctgctgcaaaagatgaccgatttaagacagattgttacagaacatgtgcagctgctgcaggtcattaagaaaaccgagacggatatgtccctgcaccctctgcttcaggagatctataaggacctgtattag

SEQ ID NO: 188198 - DNA, 1518 bp, Artificial Sequence
  derived and/or modified sequence
atgggagagaccctgggggacagccccatcgaccctgagagtgacagcttcacagacaccctgagcgccaacatcagccaggagatgaccatggtggacacagagatgcccttctggcccaccaactttggcatcagctctgtggacctgtctgtgatggaggaccacagccacagctttgacatcaagcccttcaccaccgtggacttcagcagcatcagcaccccccactatgaggacatccccttcaccaggacagatcctgtggtggccgactacaagtatgacctgaagctgcaggagtaccagagcgccatcaaggtggagcccgccagccccccctactacagcgagaagacccagctgtacaacaagccccatgaggagcccagcaacagcctgatggccatcgagtgccgggtgtgtggggacaaggccagcggcttccactatggagtgcacgcctgtgagggctgcaagggcttcttccggaggaccatccggctgaagctgatctatgacagatgtgacctgaactgccgcatccacaagaagagcaggaacaagtgccagtactgccgcttccagaagtgcctggccgtgggcatgagccacaatgccatccgcttcggccgcatgccccaggccgagaaggagaagctgctggccgagatcagcagtgacatcgaccagctgaaccctgagagcgctgacctgcgggccctggccaagcacctgtatgacagctacatcaagagcttccccctgaccaaggccaaggcccgggccatcctgaccgggaagaccacagacaagagcccctttgtgatctatgacatgaacagcctgatgatgggagaggacaagatcaagttcaagcacatcacccccctgcaggagcagagcaaggaggtggccatccgcatcttccagggctgccagttccgctctgtggaggccgtgcaggagatcacagaatatgccaagagcatccctggctttgtgaacctggacctgaatgaccaggtgaccctgctgaagtatggagtgcatgagatcatctacaccatgctggccagcctgatgaacaaggatggagtgctgatcagcgagggccagggcttcatgacccgggagttcctgaagagcctgaggaagccctttggagacttcatggagcccaagtttgaatttgctgtgaagttcaatgccctggagctggatgacagcgacctggccatcttcatcgctgtgatcatcctgagcggggaccggcccggcctgctgaatgtgaagcccatcgaggacatccaggacaacctgctgcaggccctggagctgcagctgaagctgaaccaccctgagagcagccagctgtttgccaagctgctgcagaagatgacagacctgcggcagatcgtgacagaacatgtgcagctgctgcaggtgatcaagaagacagaaacagacatgagcctgcaccccctgctgcaggagatctacaaggacctgtactag

SEQ ID NO: 188199 - DNA, 1452 bp, Artificial Sequence
  derived and/or modified sequence
atgaagggcttcagcgagatgaccatggtggacacagagatgcccttctggcccaccaactttggcatcagctctgtggacctgtctgtgatggaggaccacagccacagctttgacatcaagcccttcaccaccgtggacttcagcagcatcagcaccccccactatgaggacatccccttcaccaggacagatcctgtggtggccgactacaagtatgacctgaagctgcaggagtaccagagcgccatcaaggtggagcccgccagccccccctactacagcgagaagacccagctgtacaacaagccccatgaggagcccagcaacagcctgatggccatcgagtgccgggtgtgtggggacaaggccagcggcttccactatggagtgcacgcctgtgagggctgcaagggcttcttccggaggaccatccggctgaagctgatctatgacagatgtgacctgaactgccgcatccacaagaagagcaggaacaagtgccagtactgccgcttccagaagtgcctggccgtgggcatgagccacaatgccatccgcttcggccgcatgccccaggccgagaaggagaagctgctggccgagatcagcagtgacatcgaccagctgaaccctgagagcgctgacctgcgggccctggccaagcacctgtatgacagctacatcaagagcttccccctgaccaaggccaaggcccgggccatcctgaccgggaagaccacagacaagagcccctttgtgatctatgacatgaacagcctgatgatgggagaggacaagatcaagttcaagcacatcacccccctgcaggagcagagcaaggaggtggccatccgcatcttccagggctgccagttccgctctgtggaggccgtgcaggagatcacagaatatgccaagagcatccctggctttgtgaacctggacctgaatgaccaggtgaccctgctgaagtatggagtgcatgagatcatctacaccatgctggccagcctgatgaacaaggatggagtgctgatcagcgagggccagggcttcatgacccgggagttcctgaagagcctgaggaagccctttggagacttcatggagcccaagtttgaatttgctgtgaagttcaatgccctggagctggatgacagcgacctggccatcttcatcgctgtgatcatcctgagcggggaccggcccggcctgctgaatgtgaagcccatcgaggacatccaggacaacctgctgcaggccctggagctgcagctgaagctgaaccaccctgagagcagccagctgtttgccaagctgctgcagaagatgacagacctgcggcagatcgtgacagaacatgtgcagctgctgcaggtgatcaagaagacagaaacagacatgagcctgcaccccctgctgcaggagatctacaaggacctgtactag

SEQ ID NO: 188200 - DNA, 1518 bp, Artificial Sequence
  derived and/or modified sequence
atgggcgagaccctgggcgacagccccatcgaccccgagagcgactcctttacggacacactgtccgctaacatcagccaggagatgacaatggtggacacagaaatgcctttttggcctactaactttggcatctcatccgtcgaccttagcgtcatggaagatcattcacattctttcgatattaagccttttactacagtggatttttccagtatttctacaccacactatgaggacatacccttcaccaggacagatcctgttgtggccgactataaatatgatcttaaactccaagagtatcaatcagcaatcaaggtggaacccgcaagtcctccttattactctgagaagacgcaactatacaataaacctcacgaggagccatcaaactccttgatggcaattgagtgcagggtttgtggcgataaggccagtgggttccactatggcgtgcacgcgtgcgaaggctgtaagggatttttcaggcggaccatcaggctcaagttaatttatgatcggtgtgacctgaactgcaggatccacaaaaagagtcggaataagtgccagtactgcaggttccagaaatgccttgcggttggtatgtcacataacgccataaggttcggaagaatgccacaggcggagaaggaaaaacttctggctgagatttccagtgatattgaccagctgaacccggaatctgcagacctgcgcgcactcgccaagcacttgtacgatagctacattaagtccttccccttgaccaaagctaaggccagagccatccttaccgggaaaacaaccgataaatccccattcgtgatttacgatatgaattctctcatgatgggggaagataaaatcaagttcaagcacataacaccactgcaggaacagtctaaagaggttgccatacgcatatttcagggctgccagttccgtagtgttgaggctgtacaagagataacggaatacgctaagtccatccccggttttgtgaatctcgatctcaacgatcaggtgacccttctcaaatacggcgtccacgagataatttatacaatgctggcctctctgatgaacaaggatggcgtgctcatttcggaaggccagggcttcatgacccgggaatttctgaaatccctcagaaaaccctttggggattttatggagccaaaatttgagttcgccgtaaagtttaatgctcttgagctggatgactcagaccttgccatcttcattgctgttataatactgagtggagaccgccccgggctgctgaatgttaaaccgatcgaagacatccaggataatctgctccaggccttagaactgcagctgaagctgaatcaccccgagagttcccagctgtttgctaagctgctgcagaaaatgacagatctgcgccaaatcgtaacagagcacgtgcagttgctgcaggttattaagaaaaccgagaccgatatgtctctacaccctttattgcaggaaatatacaaggatctttattag

SEQ ID NO: 188201 - DNA, 1452 bp, Artificial Sequence
  derived and/or modified sequence
atgaagggcttcagcgagatgaccatggtggacaccgagatgcccttttggcctacaaatttcggcatttcctctgtggatctcagcgtgatggaggaccattcccattcgtttgacatcaagccatttaccaccgtcgacttcagtagcatctcaacgccccactatgaagacattcctttcacccgaaccgaccccgtggttgccgactacaagtatgacctgaaacttcaggaataccagagcgctattaaagtggaacccgcctcccccccctactactcagaaaaaacccagctatacaataagccccacgaagagccctccaatagtttgatggccatcgaatgccgcgtctgtggcgacaaagcctcgggattccattacggggtgcatgcatgtgagggttgtaagggcttctttagaaggacaatacggctgaagctgatttatgacaggtgcgacctgaactgtcggattcacaaaaaaagcaggaacaaatgccagtactgcaggttccaaaagtgtctggcagtcggcatgtcccataacgctatcagatttggaagaatgcctcaggctgagaaggaaaaactgctcgctgagattagctccgacattgaccagctcaaccccgaatcagccgatctgagagccctggcaaagcacctttatgactcgtacatcaagtcgttccctctgactaaagcaaaagctagagccattctgaccggcaaaaccaccgacaaatcaccgtttgtgatatacgatatgaacagtttaatgatgggcgaagataagattaagtttaaacacattacaccgctacaggaacagtctaaggaggttgctatacgcatcttccaggggtgccagttccgaagcgtggaagctgttcaggagatcacagaatatgcgaagagcattcctgggtttgtgaacctagaccttaatgaccaagtcaccctacttaagtacggtgtccacgagatcatatacacgatgttggcaagtctgatgaacaaggatggagttctcatctccgagggacagggcttcatgacacgcgaattccttaagagccttcggaaaccatttggcgacttcatggagcctaagttcgagtttgcagtaaaattcaatgccttagagctggatgacagcgacctcgccatattcatcgcggttataattctgtctggcgacagacctggactgctcaatgtcaagccaatagaggacattcaggataatctgctccaggcactcgaactgcagctcaagctgaaccaccctgagagcagccagttattcgccaagctgctacagaaaatgacagacctcaggcaaattgttacggaacatgtacagcttctgcaggtcatcaaaaagactgagactgatatgagtcttcaccccctgctgcaggagatttataaagacctttattag

SEQ ID NO: 188202 - DNA, 1850 bp, Artificial Sequence
  derived and/or modified sequence
actcatgggtgtattcacaaattctgttacttcaagtctttttcttttaacggattgatcttttgctagatagagacaaaatatcagtgtgaattacagcaaacccctattccatgctgttatgggtgaaactctgggagattctcctattgacccagaaagcgattccttcactgatacactgtctgcaaacatatcacaagaaatgaccatggttgacacagagatgccattctggcccaccaactttgggatcagctccgtggatctctccgtaatggaagaccactcccactcctttgatatcaagcccttcactactgttgacttctccagcatttctactccacattacgaagacattccattcacaagaacagatccagtggttgcagattacaagtatgacctgaaacttcaagagtaccaaagtgcaatcaaagtggagcctgcatctccaccttattattctgagaagactcagctctacaataagcctcatgaagagccttccaactccctcatggcaattgaatgtcgtgtctgtggagataaagcttctggatttcactatggagttcatgcttgtgaaggatgcaagggtttcttccggagaacaatcagattgaagcttatctatgacagatgtgatcttaactgtcggatccacaaaaaaagtagaaataaatgtcagtactgtcggtttcagaaatgccttgcagtggggatgtctcataatgccatcaggtttgggcggatgccacaggccgagaaggagaagctgttggcggagatctccagtgatatcgaccagctgaatccagagtccgctgacctccgggccctggcaaaacatttgtatgactcatacataaagtccttcccgctgaccaaagcaaaggcgagggcgatcttgacaggaaagacaacagacaaatcaccattcgttatctatgacatgaattccttaatgatgggagaagataaaatcaagttcaaacacatcacccccctgcaggagcagagcaaagaggtggccatccgcatctttcagggctgccagtttcgctccgtggaggctgtgcaggagatcacagagtatgccaaaagcattcctggttttgtaaatcttgacttgaacgaccaagtaactctcctcaaatatggagtccacgagatcatttacacaatgctggcctccttgatgaataaagatggggttctcatatccgagggccaaggcttcatgacaagggagtttctaaagagcctgcgaaagccttttggtgactttatggagcccaagtttgagtttgctgtgaagttcaatgcactggaattagatgacagcgacttggcaatatttattgctgtcattattctcagtggagaccgcccaggtttgctgaatgtgaagcccattgaagacattcaagacaacctgctacaagccctggagctccagctgaagctgaaccaccctgagtcctcacagctgtttgccaagctgctccagaaaatgacagacctcagacagattgtcacggaacacgtgcagctactgcaggtgatcaagaagacggagacagacatgagtcttcacccgctcctgcaggagatctacaaggacttgtactagcagagagtcctgagccactgccaacatttcccttcttccagttgcactattctgagggaaaatctgacacctaagaaatttactgtgaaaaagcattttaaaaagaaaaggttttagaatatgatctattttatgcatattgtttataaagacacatttacaatttacttttaatattaaaaattaccatattatgaaattgctgatagta

SEQ ID NO: 188203 - DNA, 1870 bp, Artificial Sequence
  derived and/or modified sequence
cccgcccccgcgccgggcccggctcggcccgacccggctccgccgcgggcaggcggggcccagcgcactcggagcccgagcccgagccgcagccgccgcctggggcgcttgggtcggcctcgaggacaccggagaggggcgccacgccgccgtggccgcagatttgaaagaagccaacactaaaccacaaatatacaacaaggccattttctcaaacgagagtcagcctttaacgaaatgaccatggttgacacagagatgccattctggcccaccaactttgggatcagctccgtggatctctccgtaatggaagaccactcccactcctttgatatcaagcccttcactactgttgacttctccagcatttctactccacattacgaagacattccattcacaagaacagatccagtggttgcagattacaagtatgacctgaaacttcaagagtaccaaagtgcaatcaaagtggagcctgcatctccaccttattattctgagaagactcagctctacaataagcctcatgaagagccttccaactccctcatggcaattgaatgtcgtgtctgtggagataaagcttctggatttcactatggagttcatgcttgtgaaggatgcaagggtttcttccggagaacaatcagattgaagcttatctatgacagatgtgatcttaactgtcggatccacaaaaaaagtagaaataaatgtcagtactgtcggtttcagaaatgccttgcagtggggatgtctcataatgccatcaggtttgggcggatgccacaggccgagaaggagaagctgttggcggagatctccagtgatatcgaccagctgaatccagagtccgctgacctccgggccctggcaaaacatttgtatgactcatacataaagtccttcccgctgaccaaagcaaaggcgagggcgatcttgacaggaaagacaacagacaaatcaccattcgttatctatgacatgaattccttaatgatgggagaagataaaatcaagttcaaacacatcacccccctgcaggagcagagcaaagaggtggccatccgcatctttcagggctgccagtttcgctccgtggaggctgtgcaggagatcacagagtatgccaaaagcattcctggttttgtaaatcttgacttgaacgaccaagtaactctcctcaaatatggagtccacgagatcatttacacaatgctggcctccttgatgaataaagatggggttctcatatccgagggccaaggcttcatgacaagggagtttctaaagagcctgcgaaagccttttggtgactttatggagcccaagtttgagtttgctgtgaagttcaatgcactggaattagatgacagcgacttggcaatatttattgctgtcattattctcagtggagaccgcccaggtttgctgaatgtgaagcccattgaagacattcaagacaacctgctacaagccctggagctccagctgaagctgaaccaccctgagtcctcacagctgtttgccaagctgctccagaaaatgacagacctcagacagattgtcacggaacacgtgcagctactgcaggtgatcaagaagacggagacagacatgagtcttcacccgctcctgcaggagatctacaaggacttgtactagcagagagtcctgagccactgccaacatttcccttcttccagttgcactattctgagggaaaatctgacacctaagaaatttactgtgaaaaagcattttaaaaagaaaaggttttagaatatgatctattttatgcatattgtttataaagacacatttacaatttacttttaatattaaaaattaccatattatgaaa

SEQ ID NO: 188204 - DNA, 2017 bp, Artificial Sequence
  derived and/or modified sequence
aacttacaaacgcaaggaactctgaaagtgtgcagcaccaccgatcagaagagaaaaccaagggacccgaaatatgctttaattaaattttcttttaaaatgtcactggaaagaacatcttgggaagacggcctggccgatcgccgtgtgaagggcaagccactctggccgagagggagccccacacctcggtctccccagaccggccctggccgggggcatccccctaaacttcggatccctcctcggaaatgggaccctctctgggccgcctcccagcggtggtggcgaggagcaaacgacaccagatttgaaagaagccaacactaaaccacaaatatacaacaaggccattttctcaaacgagagtcagcctttaacgaaatgaccatggttgacacagagatgccattctggcccaccaactttgggatcagctccgtggatctctccgtaatggaagaccactcccactcctttgatatcaagcccttcactactgttgacttctccagcatttctactccacattacgaagacattccattcacaagaacagatccagtggttgcagattacaagtatgacctgaaacttcaagagtaccaaagtgcaatcaaagtggagcctgcatctccaccttattattctgagaagactcagctctacaataagcctcatgaagagccttccaactccctcatggcaattgaatgtcgtgtctgtggagataaagcttctggatttcactatggagttcatgcttgtgaaggatgcaagggtttcttccggagaacaatcagattgaagcttatctatgacagatgtgatcttaactgtcggatccacaaaaaaagtagaaataaatgtcagtactgtcggtttcagaaatgccttgcagtggggatgtctcataatgccatcaggtttgggcggatgccacaggccgagaaggagaagctgttggcggagatctccagtgatatcgaccagctgaatccagagtccgctgacctccgggccctggcaaaacatttgtatgactcatacataaagtccttcccgctgaccaaagcaaaggcgagggcgatcttgacaggaaagacaacagacaaatcaccattcgttatctatgacatgaattccttaatgatgggagaagataaaatcaagttcaaacacatcacccccctgcaggagcagagcaaagaggtggccatccgcatctttcagggctgccagtttcgctccgtggaggctgtgcaggagatcacagagtatgccaaaagcattcctggttttgtaaatcttgacttgaacgaccaagtaactctcctcaaatatggagtccacgagatcatttacacaatgctggcctccttgatgaataaagatggggttctcatatccgagggccaaggcttcatgacaagggagtttctaaagagcctgcgaaagccttttggtgactttatggagcccaagtttgagtttgctgtgaagttcaatgcactggaattagatgacagcgacttggcaatatttattgctgtcattattctcagtggagaccgcccaggtttgctgaatgtgaagcccattgaagacattcaagacaacctgctacaagccctggagctccagctgaagctgaaccaccctgagtcctcacagctgtttgccaagctgctccagaaaatgacagacctcagacagattgtcacggaacacgtgcagctactgcaggtgatcaagaagacggagacagacatgagtcttcacccgctcctgcaggagatctacaaggacttgtactagcagagagtcctgagccactgccaacatttcccttcttccagttgcactattctgagggaaaatctgacacctaagaaatttactgtgaaaaagcattttaaaaagaaaaggttttagaatatgatctattttatgcatattgtttataaagacacatttacaatttacttttaatattaaaaattaccatattatgaaa

SEQ ID NO: 188205 - DNA, 2006 bp, Artificial Sequence
  derived and/or modified sequence
ctttgtgggctcctgcaagtgccaggcgctgaccactcctcctgggagcctaactgaggggggtagaggcagcagaggttaacagaaatctcaggtcccttggtggaaggtgggtgtgtagtcgtggtactttacgcctcggtgtttagggaggagcctaaggtaaggagtcagaaacggggagtaaccgagctgcggcttttatataaggtcagtggtaggtaaggaaggggccttaacctctgctggtgaccagaagcctgcatttctgcattctgcttaattccctttccttagatttgaaagaagccaacactaaaccacaaatatacaacaaggccattttctcaaacgagagtcagcctttaacgaaatgaccatggttgacacagagatgccattctggcccaccaactttgggatcagctccgtggatctctccgtaatggaagaccactcccactcctttgatatcaagcccttcactactgttgacttctccagcatttctactccacattacgaagacattccattcacaagaacagatccagtggttgcagattacaagtatgacctgaaacttcaagagtaccaaagtgcaatcaaagtggagcctgcatctccaccttattattctgagaagactcagctctacaataagcctcatgaagagccttccaactccctcatggcaattgaatgtcgtgtctgtggagataaagcttctggatttcactatggagttcatgcttgtgaaggatgcaagggtttcttccggagaacaatcagattgaagcttatctatgacagatgtgatcttaactgtcggatccacaaaaaaagtagaaataaatgtcagtactgtcggtttcagaaatgccttgcagtggggatgtctcataatgccatcaggtttgggcggatgccacaggccgagaaggagaagctgttggcggagatctccagtgatatcgaccagctgaatccagagtccgctgacctccgggccctggcaaaacatttgtatgactcatacataaagtccttcccgctgaccaaagcaaaggcgagggcgatcttgacaggaaagacaacagacaaatcaccattcgttatctatgacatgaattccttaatgatgggagaagataaaatcaagttcaaacacatcacccccctgcaggagcagagcaaagaggtggccatccgcatctttcagggctgccagtttcgctccgtggaggctgtgcaggagatcacagagtatgccaaaagcattcctggttttgtaaatcttgacttgaacgaccaagtaactctcctcaaatatggagtccacgagatcatttacacaatgctggcctccttgatgaataaagatggggttctcatatccgagggccaaggcttcatgacaagggagtttctaaagagcctgcgaaagccttttggtgactttatggagcccaagtttgagtttgctgtgaagttcaatgcactggaattagatgacagcgacttggcaatatttattgctgtcattattctcagtggagaccgcccaggtttgctgaatgtgaagcccattgaagacattcaagacaacctgctacaagccctggagctccagctgaagctgaaccaccctgagtcctcacagctgtttgccaagctgctccagaaaatgacagacctcagacagattgtcacggaacacgtgcagctactgcaggtgatcaagaagacggagacagacatgagtcttcacccgctcctgcaggagatctacaaggacttgtactagcagagagtcctgagccactgccaacatttcccttcttccagttgcactattctgagggaaaatctgacacctaagaaatttactgtgaaaaagcattttaaaaagaaaaggttttagaatatgatctattttatgcatattgtttataaagacacatttacaatttacttttaatattaaaaattaccatattatgaaa

SEQ ID NO: 188206 - DNA, 1722 bp, Artificial Sequence
  derived and/or modified sequence
gccgcgggcaggcggggcccagcgcactcggagcccgagcccgagccgcagccgccgcctggggcgcttgggtcggcctcgaggacaccggagaggggcgccacgccgccgtggccgcagaaatgaccatggttgacacagagatgccattctggcccaccaactttgggatcagctccgtggatctctccgtaatggaagaccactcccactcctttgatatcaagcccttcactactgttgacttctccagcatttctactccacattacgaagacattccattcacaagaacagatccagtggttgcagattacaagtatgacctgaaacttcaagagtaccaaagtgcaatcaaagtggagcctgcatctccaccttattattctgagaagactcagctctacaataagcctcatgaagagccttccaactccctcatggcaattgaatgtcgtgtctgtggagataaagcttctggatttcactatggagttcatgcttgtgaaggatgcaagggtttcttccggagaacaatcagattgaagcttatctatgacagatgtgatcttaactgtcggatccacaaaaaaagtagaaataaatgtcagtactgtcggtttcagaaatgccttgcagtggggatgtctcataatgccatcaggtttgggcggatgccacaggccgagaaggagaagctgttggcggagatctccagtgatatcgaccagctgaatccagagtccgctgacctccgggccctggcaaaacatttgtatgactcatacataaagtccttcccgctgaccaaagcaaaggcgagggcgatcttgacaggaaagacaacagacaaatcaccattcgttatctatgacatgaattccttaatgatgggagaagataaaatcaagttcaaacacatcacccccctgcaggagcagagcaaagaggtggccatccgcatctttcagggctgccagtttcgctccgtggaggctgtgcaggagatcacagagtatgccaaaagcattcctggttttgtaaatcttgacttgaacgaccaagtaactctcctcaaatatggagtccacgagatcatttacacaatgctggcctccttgatgaataaagatggggttctcatatccgagggccaaggcttcatgacaagggagtttctaaagagcctgcgaaagccttttggtgactttatggagcccaagtttgagtttgctgtgaagttcaatgcactggaattagatgacagcgacttggcaatatttattgctgtcattattctcagtggagaccgcccaggtttgctgaatgtgaagcccattgaagacattcaagacaacctgctacaagccctggagctccagctgaagctgaaccaccctgagtcctcacagctgtttgccaagctgctccagaaaatgacagacctcagacagattgtcacggaacacgtgcagctactgcaggtgatcaagaagacggagacagacatgagtcttcacccgctcctgcaggagatctacaaggacttgtactagcagagagtcctgagccactgccaacatttcccttcttccagttgcactattctgagggaaaatctgacacctaagaaatttactgtgaaaaagcattttaaaaagaaaaggttttagaatatgatctattttatgcatattgtttataaagacacatttacaattt

SEQ ID NO: 188207 - DNA, 2029 bp, Artificial Sequence
  derived and/or modified sequence
ccttaacctctgctggtgaccagaagcctgcatttctgcattctgcttaattccctttccttagatttgaaagaagccaacactaaaccacaaatatacaacaaggccattttctcaaacgagagtcagcctttaacgtgtttcaggatgattcttgtctctggatgtcgctgtcatgatgggagaggaattagtaaattcccaggtcagtttacactgcagagtgatcttgatctgcatgaatcagtaaggatgggctggataaacaagttggaaccacagttatgagtaccatgacattaactgaaacaaatgagaagggattgaaaaatcggcggttaagtgtcttttaaggtcatttccaacaaaactacaaaggacctatgaaaggcttttcagaaatgaccatggttgacacagagatgccattctggcccaccaactttgggatcagctccgtggatctctccgtaatggaagaccactcccactcctttgatatcaagcccttcactactgttgacttctccagcatttctactccacattacgaagacattccattcacaagaacagatccagtggttgcagattacaagtatgacctgaaacttcaagagtaccaaagtgcaatcaaagtggagcctgcatctccaccttattattctgagaagactcagctctacaataagcctcatgaagagccttccaactccctcatggcaattgaatgtcgtgtctgtggagataaagcttctggatttcactatggagttcatgcttgtgaaggatgcaagggtttcttccggagaacaatcagattgaagcttatctatgacagatgtgatcttaactgtcggatccacaaaaaaagtagaaataaatgtcagtactgtcggtttcagaaatgccttgcagtggggatgtctcataatgccatcaggtttgggcggatgccacaggccgagaaggagaagctgttggcggagatctccagtgatatcgaccagctgaatccagagtccgctgacctccgggccctggcaaaacatttgtatgactcatacataaagtccttcccgctgaccaaagcaaaggcgagggcgatcttgacaggaaagacaacagacaaatcaccattcgttatctatgacatgaattccttaatgatgggagaagataaaatcaagttcaaacacatcacccccctgcaggagcagagcaaagaggtggccatccgcatctttcagggctgccagtttcgctccgtggaggctgtgcaggagatcacagagtatgccaaaagcattcctggttttgtaaatcttgacttgaacgaccaagtaactctcctcaaatatggagtccacgagatcatttacacaatgctggcctccttgatgaataaagatggggttctcatatccgagggccaaggcttcatgacaagggagtttctaaagagcctgcgaaagccttttggtgactttatggagcccaagtttgagtttgctgtgaagttcaatgcactggaattagatgacagcgacttggcaatatttattgctgtcattattctcagtggagaccgcccaggtttgctgaatgtgaagcccattgaagacattcaagacaacctgctacaagccctggagctccagctgaagctgaaccaccctgagtcctcacagctgtttgccaagctgctccagaaaatgacagacctcagacagattgtcacggaacacgtgcagctactgcaggtgatcaagaagacggagacagacatgagtcttcacccgctcctgcaggagatctacaaggacttgtactagcagagagtcctgagccactgccaacatttcccttcttccagttgcactattctgagggaaaatctgacacctaagaaatttactgtgaaaaagcattttaaaaagaaaaggttttagaatatgatctattttatgcatattgtttataaagacacatttacaatttacttttaatattaaaaattaccatatta

SEQ ID NO: 188208 - DNA, 1518 bp, Artificial Sequence
  derived and/or modified sequence
atgggtgagacactgggcgatagccccatcgaccctgagtcggattctttcactgataccctgagcgcgaacatttcacaggagatgaccatggtcgataccgagatgcccttttggcctaccaatttcggcatctcctcagtcgatctatctgttatggaggatcactctcactcctttgatatcaagccattcaccaccgtcgactttagttccatcagcacgccacactatgaagacatcccattcaccagaaccgatcccgtggtggcagactacaagtacgacctcaaactgcaagagtatcagtccgcgattaaggtggaaccggctagtccgccttactatagtgagaaaacgcagctatacaacaagcctcacgaggaaccatcaaattctttaatggcaatcgaatgcagagtgtgtggggataaggctagcggttttcactatggagtccacgcgtgtgaggggtgcaagggatttttccgcaggacaatccgattaaaactcatttatgaccggtgtgatctgaactgccgtattcacaagaagtcaagaaacaagtgtcagtattgcaggttccagaagtgtctcgccgtggggatgagccataacgccattcggtttgggagaatgccacaggctgagaaggaaaaactcctcgctgagatcagtagcgatatcgaccaactgaatccggagtccgctgatctgcgagctcttgccaaacatctctacgacagttacatcaaaagctttccactaaccaaggcaaaggcaagagccatcttgacaggtaagactacggataagtcaccttttgtgatctacgacatgaacagtctgatgatgggcgaggataaaatcaagttcaaacatatcacgcccctgcaagaacaatcaaaggaagttgccattagaattttccagggctgccagttccgctccgtggaggccgtgcaagaaatcacagagtacgctaagagcatacccggattcgtcaaccttgatctaaacgaccaggtaaccctccttaagtatggggtgcacgaaataatctacacaatgctggcctcgctgatgaataaagatggggtgctgatcagcgaaggtcagggcttcatgactcgcgagttcctcaagtctttgcgaaaaccctttggcgacttcatggaacctaaatttgagtttgctgttaaatttaatgccctggagcttgacgactccgatctggctatttttatcgccgtgatcattctctcaggagatcgcccagggctgttaaacgttaaaccaatcgaagacatacaagacaatcttctgcaggccctggagcttcagcttaagcttaatcacccagagagctcccagctgtttgcaaaattactgcagaagatgaccgatctcaggcaaatagtgacagagcatgttcaattactccaggtgataaagaagaccgagactgacatgtctctgcaccctctgctgcaagaaatctataaggatctctactag

SEQ ID NO: 188209 - DNA, 1452 bp, Artificial Sequence
  derived and/or modified sequence
atgaagggattttccgaaatgacaatggtagacactgagatgcctttttggcctaccaatttcggtattagcagtgtagaccttagtgtgatggaagatcactcccactcgtttgatatcaaacccttcaccacagttgacttctcttccatctcaacaccacactacgaagacataccattcactaggactgaccctgtagtggctgactataagtacgatttgaaactccaggagtaccagtccgctatcaaggtcgagccagccagcccgccttactacagtgaaaagactcagctgtacaataaaccgcatgaggagccttccaattcgcttatggctattgagtgtcgagtttgtggcgacaaggcgagtggttttcactacggagtgcatgcatgcgaggggtgtaagggattcttccgccgaaccattagactcaaattgatctacgaccggtgcgacctcaactgtagaatacataagaagtcacgcaataagtgccagtactgtagatttcaaaaatgcctagcagtcggcatgagtcataatgctatccgtttcggtcgcatgccgcaggcagagaaggaaaaactcctggcagagatcagctcagatatcgatcagctgaacccggaatctgccgatctgagagctcttgcgaaacatctgtacgacagttacataaagagcttcccattgactaaggctaaagctcgagctatcctgaccggtaaaacaaccgacaagtcccccttcgtaatctatgacatgaattccttgatgatgggcgaagacaagattaaattcaagcatatcacccctttgcaggaacagtctaaagaggttgccatccgtattttccaggggtgtcagttccgaagcgtggaggcggtgcaagagatcacagaatatgctaagtccattcccggttttgtgaatctggacctcaacgatcaggtaactctcctgaagtacggagttcatgagattatatacaccatgctcgctagcctaatgaataaagacggcgtgctgatctctgaaggccagggctttatgacaagggaattcttaaagtcactcaggaaaccttttggcgatttcatggagccaaagttcgagttcgctgttaagtttaacgcgttagagctcgacgactctgatctggcgatattcatcgcagtcattatcctctctggagaccgtcccggtttacttaatgtcaagcccatagaggatatccaagataatctactccaggccctagagctacagcttaagctcaaccatccagagagctctcaacttttcgccaaactcctgcaaaagatgactgatctccgacagatagttacagaacacgtgcagcttttgcaggtgataaagaaaactgagacggatatgtcgctgcaccctctgctgcaggagatttataaggacctttactag

SEQ ID NO: 188210 - DNA, 1518 bp, Artificial Sequence
  derived and/or modified sequence
atgggcgagaccctgggcgacagccccatcgaccccgagagcgacagcttcaccgacaccctgagcgccaacatcagccaggagatgaccatggtggacaccgagatgcccttctggcccaccaacttcggcatcagcagcgtggacctgagcgtgatggaggaccacagccacagcttcgacatcaagcccttcaccaccgtggacttcagcagcatcagcaccccccactacgaggacatccccttcaccagaaccgaccccgtggtggccgactacaagtacgacctgaagctgcaggagtaccagagcgccatcaaggtggagcccgccagccccccctactacagcgagaagacccagctgtacaacaagccccacgaggagcccagcaacagcctgatggccatcgagtgcagagtgtgcggcgacaaggccagcggcttccactacggcgtgcacgcctgcgagggctgcaagggcttcttcagaagaaccatcagactgaagctgatctacgacagatgcgacctgaactgcagaatccacaagaagagcagaaacaagtgccagtactgcagattccagaagtgcctggccgtgggcatgagccacaacgccatcagattcggcagaatgccccaggccgagaaggagaagctgctggccgagatcagcagcgacatcgaccagctgaaccccgagagcgccgacctgagagccctggccaagcacctgtacgacagctacatcaagagcttccccctgaccaaggccaaggccagagccatcctgaccggcaagaccaccgacaagagccccttcgtgatctacgacatgaacagcctgatgatgggcgaggacaagatcaagttcaagcacatcacccccctgcaggagcagagcaaggaggtggccatcagaatcttccagggctgccagttcagaagcgtggaggccgtgcaggagatcaccgagtacgccaagagcatccccggcttcgtgaacctggacctgaacgaccaggtgaccctgctgaagtacggcgtgcacgagatcatctacaccatgctggccagcctgatgaacaaggacggcgtgctgatcagcgagggccagggcttcatgaccagagagttcctgaagagcctgagaaagcccttcggcgacttcatggagcccaagttcgagttcgccgtgaagttcaacgccctggagctggacgacagcgacctggccatcttcatcgccgtgatcatcctgagcggcgacagacccggcctgctgaacgtgaagcccatcgaggacatccaggacaacctgctgcaggccctggagctgcagctgaagctgaaccaccccgagagcagccagctgttcgccaagctgctgcagaagatgaccgacctgagacagatcgtgaccgagcacgtgcagctgctgcaggtgatcaagaagaccgagaccgacatgagcctgcaccccctgctgcaggagatctacaaggacctgtactag

SEQ ID NO: 188211 - DNA, 1452 bp, Artificial Sequence
  derived and/or modified sequence
atgaagggcttcagcgagatgaccatggtggacaccgagatgcccttctggcccaccaacttcggcatcagcagcgtggacctgagcgtgatggaggaccacagccacagcttcgacatcaagcccttcaccaccgtggacttcagcagcatcagcaccccccactacgaggacatccccttcaccagaaccgaccccgtggtggccgactacaagtacgacctgaagctgcaggagtaccagagcgccatcaaggtggagcccgccagccccccctactacagcgagaagacccagctgtacaacaagccccacgaggagcccagcaacagcctgatggccatcgagtgcagagtgtgcggcgacaaggccagcggcttccactacggcgtgcacgcctgcgagggctgcaagggcttcttcagaagaaccatcagactgaagctgatctacgacagatgcgacctgaactgcagaatccacaagaagagcagaaacaagtgccagtactgcagattccagaagtgcctggccgtgggcatgagccacaacgccatcagattcggcagaatgccccaggccgagaaggagaagctgctggccgagatcagcagcgacatcgaccagctgaaccccgagagcgccgacctgagagccctggccaagcacctgtacgacagctacatcaagagcttccccctgaccaaggccaaggccagagccatcctgaccggcaagaccaccgacaagagccccttcgtgatctacgacatgaacagcctgatgatgggcgaggacaagatcaagttcaagcacatcacccccctgcaggagcagagcaaggaggtggccatcagaatcttccagggctgccagttcagaagcgtggaggccgtgcaggagatcaccgagtacgccaagagcatccccggcttcgtgaacctggacctgaacgaccaggtgaccctgctgaagtacggcgtgcacgagatcatctacaccatgctggccagcctgatgaacaaggacggcgtgctgatcagcgagggccagggcttcatgaccagagagttcctgaagagcctgagaaagcccttcggcgacttcatggagcccaagttcgagttcgccgtgaagttcaacgccctggagctggacgacagcgacctggccatcttcatcgccgtgatcatcctgagcggcgacagacccggcctgctgaacgtgaagcccatcgaggacatccaggacaacctgctgcaggccctggagctgcagctgaagctgaaccaccccgagagcagccagctgttcgccaagctgctgcagaagatgaccgacctgagacagatcgtgaccgagcacgtgcagctgctgcaggtgatcaagaagaccgagaccgacatgagcctgcaccccctgctgcaggagatctacaaggacctgtactag

SEQ ID NO: 188212 - protein, 487 aa, Artificial Sequence
  derived and/or modified sequence
MAPVVTGKFGERPPPKRLTREAMRNYLKERGDQTVLILHAKVAQKSYGNEKRFFCPPPCVYLMGSGWKKKKEQMERDGCSEQESQPCAFIGIGNSDQEMQQLNLEGKNYCTAKTLYISDSDKRKHFMLSVKMFYGNSDDIGVFLSKRIKVISKPSKKKQSLKNADLCIASGTKVALFNRLRSQTVSTRYLHVEGGNFHASSQQWGAFFIHLLDDDESEGEEFTVRDGYIHYGQTVKLVCSVTGMALPRLIIRKVDKQTALLDADDPVSQLHKCAFYLKDTERMYLCLSQERIIQFQATPCPKEPNKEMINDGASWTIISTDKAEYTFYEGMGPVLAPVTPVPVVESLQLNGGGDVAMLELTGQNFTPNLRVWFGDVEAETMYRCGESMLCVVPDISAFREGWRWVRQPVQVPVTLVRNDGIIYSTSLTFTYTPEPGPRPHCSAAGAILRANSSQVPPNESNTNSEGSYTNASTNSTSVTSSTATVVS

SEQ ID NO: 188213 - protein, 465 aa, Artificial Sequence
  derived and/or modified sequence
MRNYLKERGDQTVLILHAKVAQKSYGNEKRFFCPPPCVYLMGSGWKKKKEQMERDGCSEQESQPCAFIGIGNSDQEMQQLNLEGKNYCTAKTLYISDSDKRKHFMLSVKMFYGNSDDIGVFLSKRIKVISKPSKKKQSLKNADLCIASGTKVALFNRLRSQTVSTRYLHVEGGNFHASSQQWGAFFIHLLDDDESEGEEFTVRDGYIHYGQTVKLVCSVTGMALPRLIIRKVDKQTALLDADDPVSQLHKCAFYLKDTERMYLCLSQERIIQFQATPCPKEPNKEMINDGASWTIISTDKAEYTFYEGMGPVLAPVTPVPVVESLQLNGGGDVAMLELTGQNFTPNLRVWFGDVEAETMYRCGESMLCVVPDISAFREGWRWVRQPVQVPVTLVRNDGIIYSTSLTFTYTPEPGPRPHCSAAGAILRANSSQVPPNESNTNSEGSYTNASTNSTSVTSSTATVVS

SEQ ID NO: 188214 - DNA, 1464 bp, Artificial Sequence
  derived and/or modified sequence
atggctccggtggtcaccgggaagtttggagaacgtccaccaccaaaaagattaaccagagaggcaatgagaaactatctcaaagagcggggggaccaaaccgtgctcattcttcatgctaaggtagcacagaaatcttatgggaatgaaaagagatttttctgtccacctccctgtgtgtatctgatgggtagtgggtggaagaagaaaaaagagcaaatggagagagacggctgttcagaacaagagtcccaaccttgcgcgttcattggtattggcaactccgatcaggagatgcaacagctcaatctagaggggaagaactattgcactgcgaagacactttacatcagcgatagtgacaagagaaaacattttatgctgtcagttaaaatgttttatggcaattcagacgacattggagtcttcctgagcaaacggatcaaggttattagtaagcctagcaagaagaagcagagtctgaagaacgcagacctctgcattgcctctggcacgaaagtggctctgttcaatcgactgaggtctcaaacagtgtcaactaggtacttgcatgtggaaggtggaaactttcacgcgtccagtcagcagtggggcgcattttttattcaccttctcgatgatgacgaaagcgaaggcgaggagtttactgtgcgtgatggctacatacactatggtcagaccgtgaaactcgtctgctccgtcacaggaatggcactgccaaggctaatcattcgcaaggtcgataaacagaccgctctgcttgacgccgatgacccggtaagccaactgcacaaatgcgcattttacctgaaagatacagaaagaatgtatctttgcttgagccaagaaaggattatccagttccaggccactccttgccccaaggagcccaacaaggaaatgatcaatgatggagcaagctggacaattatcagtacagacaaggccgaatatacattctatgaaggtatgggaccggttctcgcccctgtgactccggtccccgtagtggaaagtctgcaactgaatggaggcggcgacgtcgctatgctcgagctcacggggcagaactttacaccaaacctgcgcgtctggtttggcgacgtagaagcagaaaccatgtacaggtgcggagagagcatgctgtgtgttgtgcccgatattagtgcgttccgggagggatggagatgggtacgccagcccgttcaggtgccggtcaccttggtccgcaatgatgggatcatctactcgacatctctgacattcacctacactcccgagcctggcccaaggccccactgcagtgctgcaggagcgatactgcgcgctaattcttctcaggtccctccaaacgaatccaacaccaacagcgagggctcctacaccaatgcaagcactaattcaacaagtgtcacctcttcgacagcaacagtggtctcatag

SEQ ID NO: 188215 - DNA, 1464 bp, Artificial Sequence
  derived and/or modified sequence
atggcccctgtggtgacaggcaagtttggagagcggcccccacccaagaggctgacccgggaggccatgaggaactacctgaaggagcggggggaccagacagtgctgatcctgcacgccaaggtggcccagaagagctatggaaatgagaagcgcttcttctgccccccaccctgtgtgtacctgatgggcagcggctggaagaagaagaaggagcagatggagagagatggctgcagcgagcaggagagccagccctgtgccttcatcggcatcggcaacagcgaccaggagatgcagcagctgaacctggagggcaagaactactgcacagccaagaccctgtacatcagtgacagcgacaagaggaagcacttcatgctgtctgtgaagatgttctacggcaacagtgatgacatcggggtcttcctgagcaagaggatcaaggtgatcagcaagcccagcaagaagaagcagagcctgaagaatgctgacctgtgcatcgccagcggcaccaaggtggccctcttcaaccggctgcggagccagacagtgtccacccgctacctgcacgtggagggcggcaacttccacgccagcagccagcagtggggcgccttcttcatccacctgctggatgatgatgaaagtgaaggagaggagttcaccgtgagagatggctacatccactacggccagacagtgaagctggtgtgcagcgtgacaggcatggccctgcccaggctcatcatcaggaaggtggacaagcagacagccctgctggatgctgatgatcctgtgtcccagctgcacaagtgtgccttctacctgaaggacacagagaggatgtacctgtgcctgagccaggagcgcatcatccagttccaggccaccccctgccccaaggagcccaacaaggagatgatcaatgatggagcctcctggaccatcatcagcacagacaaggccgagtacaccttctatgagggcatgggccctgtgctggcccctgtgacccctgtgcctgtggtggagagcctgcagctgaatggaggaggagatgtggccatgctggagctgaccggccagaacttcacccccaacctgcgggtgtggtttggagatgtggaggccgagaccatgtaccgctgtggggagagcatgctgtgtgtggtgcctgacatcagcgccttccgggagggctggcgctgggtgcggcagcctgtgcaggtgcctgtgaccctggtgagaaatgatggcatcatctacagcaccagcctgaccttcacctacaccccagagcccggcccccggccccactgcagcgctgctggggccatcctgcgggccaacagcagccaggtgcccccaaatgaaagcaacaccaacagcgagggcagctacaccaatgccagcaccaacagcacctctgtgaccagcagcacagccaccgtggtgtcctag

SEQ ID NO: 188216 - DNA, 1464 bp, Artificial Sequence
  derived and/or modified sequence
atggcccccgtggtgaccggcaagttcggcgagcggcccccccccaagcgtctcactagagaagctatgaggaactacctcaaagagaggggagatcaaaccgtcctgattctgcacgccaaggtcgcacaaaagagctatggaaacgaaaagcgatttttctgtcccccgccctgcgtttacttaatgggctccgggtggaagaagaaaaaagagcagatggaacgagatggctgcagtgagcaggagtctcagccatgtgctttcatcgggatcggcaatagcgaccaagagatgcagcagctcaacctggagggtaaaaattactgtaccgcaaaaaccttgtacataagcgacagtgacaagcgcaaacatttcatgctcagcgttaagatgttctacgggaacagcgacgacatcggggtgttcctttcaaagcgaataaaagtgatctccaagcctagtaagaaaaagcagtccctgaagaacgccgacctgtgtattgcctcaggaactaaagttgccttatttaatcggctgagatcacagaccgtgagcacccggtatctgcacgtcgaaggcggtaatttccacgcatcatcacagcagtggggcgccttctttatacaccttctggatgatgatgagagtgaaggcgaggagttcactgtgagggatggttatattcattatgggcagaccgttaaactagtatgttctgtcacagggatggcccttccgcgactgattatccgtaaggtggataaacagaccgcattgctggacgccgacgatccggtgagtcaactgcacaagtgtgcgttttatcttaaggacactgagcgcatgtacttgtgtctgagccaggagcggattattcaattccaggccaccccgtgccccaaggagccgaataaggaaatgatcaacgacggggcttcgtggactataatctccactgacaaggctgaatacaccttttacgaagggatgggtcctgtgctggctccagtcactccagtacctgtagtggagagcctgcaactgaacggtgggggagacgtcgccatgctggagctgacggggcaaaattttactcccaacctgcgagtttggttcggcgacgtggaggccgaaactatgtatagatgcggagagagcatgctgtgtgttgtacctgacatttccgcttttagagagggctggaggtgggtgcggcagccagttcaagtgcccgtcacccttgtgcgtaatgatgggatcatctacagtacaagtctaacgtttacttacactccagagcctggaccgcgcccgcactgtagtgctgccggggctatccttagggcaaattctagccaagtccctcccaatgagtcaaatacaaattcagagggctcgtacacaaacgcgtctaccaactcgacatcggtgacttcttcgactgctacagttgtgtcttag

SEQ ID NO: 188217 - DNA, 1464 bp, Artificial Sequence
  derived and/or modified sequence
atggccccagtggtcaccggcaaattcggagaacgccctccccctaagcggctaacacgagaagctatgcggaactacctgaaagaaaggggcgaccagacggtactgatcctccacgccaaggttgcccagaagtcctatgggaacgagaagcgattcttctgccctccaccctgtgtgtatctgatgggaagtggctggaaaaagaagaaagagcaaatggagagagacggatgcagcgagcaagagagccagccttgtgccttcattgggatcggaaacagcgatcaggaaatgcaacagctaaacctggagggtaaaaattactgtactgctaagactctgtatatcagtgatagcgacaagaggaagcatttcatgctgtccgtcaagatgttctatggtaattccgatgacatcggtgtgttcttatctaaacggatcaaggttatatccaaacccagcaaaaagaaacagtctttgaaaaatgctgacctctgtatcgcttctgggaccaaggtggctctgttcaacagactccgcagccagaccgtgtctacacggtacctgcacgtcgagggaggcaatttccacgcttcatctcagcagtggggcgcattctttatccatctactggatgatgatgagagtgagggggaggaatttacagtgcgggatggatacatccactatggtcagacagtgaagctagtttgctcagtcactgggatggcccttcccagacttatcattcgtaaagtagacaagcagaccgccctgctcgatgccgacgaccctgtcagccagctgcacaagtgtgcgttctatctgaaagataccgagcggatgtacttgtgcctgtcacaggagagaatcatccaattccaggccactccttgccccaaagaaccaaataaggaaatgatcaacgacggcgcaagttggacaataatcagtactgacaaggcagagtatactttttacgaggggatggggcctgtattggccccagtgacacctgtgcccgttgtggagagtttacaactgaatgggggaggcgatgtggcaatgttggaactaacagggcagaacttcaccccgaacctgcgggtgtggttcggtgatgttgaagcagagactatgtaccgttgtggagagagcatgctttgcgtcgtgccggacatctccgcgttccgggaaggctggcgctgggtgaggcagcctgtccaagtcccagtgactttggtgaggaatgacgggatcatctactccacttcattaaccttcacttacacacccgagcccggtcctaggccgcattgctccgccgctggggcaattctgcgtgctaactcttcccaggttccacccaacgaaagtaacaccaatagtgaggggtcttacaccaacgccagtaccaactccacaagcgtcacgtcctccacagccaccgtggtgtcttag

SEQ ID NO: 188218 - DNA, 1752 bp, Artificial Sequence
  derived and/or modified sequence
atgctccatcgcctgggtaggtttccagggaaggcagcgagcaggatcccctactctgcgggcggcgcgaggcgtctggctcttcgcggcggcggcgaggggaaagggagcgcgggggctgggtggaatcgaggagtgaggaaaaagggaaggggcgggggagagggaccagggaaggcgtcggggggaatctcgcgagggttggagttttggcgagagtttgtggaagatggcgcctgttgtgacagggaaatttggtgagcggcctccacctaaacgacttactagggaagctatgcgaaattatttaaaagagcgaggggatcaaacagtacttattcttcatgcaaaagttgcacagaagtcatatggaaatgaaaaaaggtttttttgcccacctccttgtgtatatcttatgggcagtggatggaagaaaaaaaaagaacaaatggaacgcgatggttgttctgaacaagagtctcaaccgtgtgcatttattgggataggaaatagtgaccaagaaatgcagcagctaaacttggaaggaaagaactattgcacagccaaaacattgtatatatctgactcagacaagcgaaagcacttcatgttgtctgtaaagatgttctatggcaacagtgatgacattggtgtgttcctcagcaagcggataaaagtcatctccaaaccttccaaaaagaagcagtcattgaaaaatgctgacttatgcattgcctcaggaacaaaggtggctctgtttaatcgactacgatcccagacagttagtaccagatacttgcatgtagaaggaggtaattttcatgccagttcacagcagtggggagccttttttattcatctcttggatgatgatgaatcagaaggagaagaattcacagtccgagatggctacatccattatggacaaacagtcaaacttgtgtgctcagttactggcatggcactcccaagattgataattaggaaagttgataagcagaccgcattattggatgcagatgatcctgtgtcacaactccataaatgtgcattttaccttaaggatacagaaagaatgtatttgtgcctttctcaagaaagaataattcaatttcaggccactccatgtccaaaagaaccaaataaagagatgataaatgatggcgcttcctggacaatcattagcacagataaggcagagtatacattttatgagggaatgggccctgtccttgccccagtcactcctgtgcctgtggtagagagccttcagttgaatggcggtggggacgtagcaatgcttgaacttacaggacagaatttcactccaaatttacgagtgtggtttggggatgtagaagctgaaactatgtacaggtgtggagagagtatgctctgtgtcgtcccagacatttctgcattccgagaaggttggagatgggtccggcaaccagtccaggttccagtaactttggtccgaaatgatggaatcatttattccaccagccttacctttacctacacaccagaaccagggccgcggccacattgcagtgcagcaggagcaatccttcgagccaattcaagccaggtgccccctaacgaatcaaacacaaacagcgagggaagttacacaaacgccagcacaaattcaaccagtgtcacatcatctacagccacagtggtatcctaactaccgtctttttgctaggacttaaactgacttgagtgtggcaaaaagttaacaaaaaa

SEQ ID NO: 188219 - DNA, 1464 bp, Artificial Sequence
  derived and/or modified sequence
atggcccccgtggtgaccggcaagttcggcgagagacccccccccaagagactgaccagagaggccatgagaaactacctgaaggagagaggcgaccagaccgtgctgatcctgcacgccaaggtggcccagaagagctacggcaacgagaagagattcttctgcccccccccctgcgtgtacctgatgggcagcggctggaagaagaagaaggagcagatggagagagacggctgcagcgagcaggagagccagccctgcgccttcatcggcatcggcaacagcgaccaggagatgcagcagctgaacctggagggcaagaactactgcaccgccaagaccctgtacatcagcgacagcgacaagagaaagcacttcatgctgagcgtgaagatgttctacggcaacagcgacgacatcggcgtgttcctgagcaagagaatcaaggtgatcagcaagcccagcaagaagaagcagagcctgaagaacgccgacctgtgcatcgccagcggcaccaaggtggccctgttcaacagactgagaagccagaccgtgagcaccagatacctgcacgtggagggcggcaacttccacgccagcagccagcagtggggcgccttcttcatccacctgctggacgacgacgagagcgagggcgaggagttcaccgtgagagacggctacatccactacggccagaccgtgaagctggtgtgcagcgtgaccggcatggccctgcccagactgatcatcagaaaggtggacaagcagaccgccctgctggacgccgacgaccccgtgagccagctgcacaagtgcgccttctacctgaaggacaccgagagaatgtacctgtgcctgagccaggagagaatcatccagttccaggccaccccctgccccaaggagcccaacaaggagatgatcaacgacggcgccagctggaccatcatcagcaccgacaaggccgagtacaccttctacgagggcatgggccccgtgctggcccccgtgacccccgtgcccgtggtggagagcctgcagctgaacggcggcggcgacgtggccatgctggagctgaccggccagaacttcacccccaacctgagagtgtggttcggcgacgtggaggccgagaccatgtacagatgcggcgagagcatgctgtgcgtggtgcccgacatcagcgccttcagagagggctggagatgggtgagacagcccgtgcaggtgcccgtgaccctggtgagaaacgacggcatcatctacagcaccagcctgaccttcacctacacccccgagcccggccccagaccccactgcagcgccgccggcgccatcctgagagccaacagcagccaggtgccccccaacgagagcaacaccaacagcgagggcagctacaccaacgccagcaccaacagcaccagcgtgaccagcagcaccgccaccgtggtgagctag

SEQ ID NO: 188220 - protein, 380 aa, Artificial Sequence
  derived and/or modified sequence
MRNCKMARVASVLGLVMLSVALLILSLISYVSLKKENIFTTPKYASPGAPRMYMFHAGFRSQFALKFLDPSFVPITNSLTQELQEKPSKWKFNRTAFLHQRQEILQHVDVIKNFSLTKNSVRIGQLMHYDYSSHKYVFSISNNFRSLLPDVSPIMNKHYNICAVVGNSGILTGSQCGQEIDKSDFVFRCNFAPTEAFQRDVGRKTNLTTFNPSILEKYYNNLLTIQDRNNFFLSLKKLDGAILWIPAFFFHTSATVTRTLVDFFVEHRGQLKVQLAWPGNIMQHVNRYWKNKHLSPKRLSTGILMYTLASAICEEIHLYGFWPFGFDPNTREDLPYHYYDKKGTKFTTKWQESHQLPAEFQLLYRMHGEGLTKLTLSHCA

SEQ ID NO: 188221 - protein, 487 aa, Artificial Sequence
  derived and/or modified sequence
AGGRGRTALRAPSPRRRAAPPSSCSAPGPARPCLRGPAALRGSCQPQPPAPVASPHPRPGPPPPPHARAHTHTHTHTHTHTHIYTPASCWPLNGPISPVSLNPAQPGMRNCKMARVASVLGLVMLSVALLILSLISYVSLKKENIFTTPKYASPGAPRMYMFHAGFRSQFALKFLDPSFVPITNSLTQELQEKPSKWKFNRTAFLHQRQEILQHVDVIKNFSLTKNSVRIGQLMHYDYSSHKYVFSISNNFRSLLPDVSPIMNKHYNICAVVGNSGILTGSQCGQEIDKSDFVFRCNFAPTEAFQRDVGRKTNLTTFNPSILEKYYNNLLTIQDRNNFFLSLKKLDGAILWIPAFFFHTSATVTRTLVDFFVEHRGQLKVQLAWPGNIMQHVNRYWKNKHLSPKRLSTGILMYTLASAICEEIHLYGFWPFGFDPNTREDLPYHYYDKKGTKFTTKWQESHQLPAEFQLLYRMHGEGLTKLTLSHCA

SEQ ID NO: 188222 - DNA, 1143 bp, Artificial Sequence
  derived and/or modified sequence
atgagaaactgcaagatggccagagtggccagcgtgctgggcctggtgatgctgagcgtggccctgctgatcctgagcctgatcagctacgtgagcctgaagaaggagaacatcttcaccacccccaagtacgccagccccggcgcccccagaatgtacatgttccacgccggcttcagaagccagttcgccctgaagttcctggaccccagcttcgtgcccatcaccaacagcctgacccaggagctgcaggagaagcccagcaagtggaagttcaacagaaccgccttcctgcaccagagacaggagatcctgcagcacgtggacgtgatcaagaacttcagcctgaccaagaacagcgtgagaatcggccagctgatgcactacgactacagcagccacaagtacgtgttcagcatcagcaacaacttcagaagcctgctgcccgacgtgagccccatcatgaacaagcactacaacatctgcgccgtggtgggcaacagcggcatcctgaccggcagccagtgcggccaggagatcgacaagagcgacttcgtgttcagatgcaacttcgcccccaccgaggccttccagagagacgtgggcagaaagaccaacctgaccaccttcaaccccagcatcctggagaagtactacaacaacctgctgaccatccaggacagaaacaacttcttcctgagcctgaagaagctggacggcgccatcctgtggatccccgccttcttcttccacaccagcgccaccgtgaccagaaccctggtggacttcttcgtggagcacagaggccagctgaaggtgcagctggcctggcccggcaacatcatgcagcacgtgaacagatactggaagaacaagcacctgagccccaagagactgagcaccggcatcctgatgtacaccctggccagcgccatctgcgaggagatccacctgtacggcttctggcccttcggcttcgaccccaacaccagagaggacctgccctaccactactacgacaagaagggcaccaagttcaccaccaagtggcaggagagccaccagctgcccgccgagttccagctgctgtacagaatgcacggcgagggcctgaccaagctgaccctgagccactgcgcctag

SEQ ID NO: 188223 - DNA, 1464 bp, Artificial Sequence
  derived and/or modified sequence
gccggcggcagaggcagaaccgccctgagagcccccagccccagaagaagagccgccccccccagcagctgcagcgcccccggccccgccagaccctgcctgagaggccccgccgccctgagaggcagctgccagccccagccccccgcccccgtggccagcccccaccccagacccggcccccccccccccccccacgccagagcccacacccacacccacacccacacccacacccacacccacatctacacccccgccagctgctggcccctgaacggccccatcagccccgtgagcctgaaccccgcccagcccggcatgagaaactgcaagatggccagagtggccagcgtgctgggcctggtgatgctgagcgtggccctgctgatcctgagcctgatcagctacgtgagcctgaagaaggagaacatcttcaccacccccaagtacgccagccccggcgcccccagaatgtacatgttccacgccggcttcagaagccagttcgccctgaagttcctggaccccagcttcgtgcccatcaccaacagcctgacccaggagctgcaggagaagcccagcaagtggaagttcaacagaaccgccttcctgcaccagagacaggagatcctgcagcacgtggacgtgatcaagaacttcagcctgaccaagaacagcgtgagaatcggccagctgatgcactacgactacagcagccacaagtacgtgttcagcatcagcaacaacttcagaagcctgctgcccgacgtgagccccatcatgaacaagcactacaacatctgcgccgtggtgggcaacagcggcatcctgaccggcagccagtgcggccaggagatcgacaagagcgacttcgtgttcagatgcaacttcgcccccaccgaggccttccagagagacgtgggcagaaagaccaacctgaccaccttcaaccccagcatcctggagaagtactacaacaacctgctgaccatccaggacagaaacaacttcttcctgagcctgaagaagctggacggcgccatcctgtggatccccgccttcttcttccacaccagcgccaccgtgaccagaaccctggtggacttcttcgtggagcacagaggccagctgaaggtgcagctggcctggcccggcaacatcatgcagcacgtgaacagatactggaagaacaagcacctgagccccaagagactgagcaccggcatcctgatgtacaccctggccagcgccatctgcgaggagatccacctgtacggcttctggcccttcggcttcgaccccaacaccagagaggacctgccctaccactactacgacaagaagggcaccaagttcaccaccaagtggcaggagagccaccagctgcccgccgagttccagctgctgtacagaatgcacggcgagggcctgaccaagctgaccctgagccactgcgcctag

SEQ ID NO: 188224 - DNA, 1143 bp, Artificial Sequence
  derived and/or modified sequence
atgagaaattgcaaaatggccagagtggcgagtgtgctgggccttgtgatgctcagtgttgctcttctgatactctctctgatctcgtatgtttcactcaagaaagagaacattttcacaaccccgaaatatgcctccccaggggcacccaggatgtacatgttccatgccggattcagatcacagttcgctttaaagttccttgacccctcctttgtaccaataactaattctttgacacaggagctgcaggaaaagccttctaaatggaaattcaaccggactgcattcttgcaccagagacaggaaattctccagcacgtagacgtcatcaaaaattttagccttactaaaaactctgtccgaattgggcagctgatgcactacgattactcatctcataagtacgtgttctccattagtaacaatttccgtagtctgcttcctgatgtctctccaattatgaacaaacactataacatctgcgccgtggtggggaactccggaatcctgacaggctcccagtgtggacaggagattgataagagcgattttgtgttccggtgcaattttgcccccactgaagccttccagcgcgacgtaggtcgtaagacaaacctgactacatttaacccttctatcctggagaaatattataataacttgttaaccattcaagatcggaataacttctttctgagcttgaaaaagctggatggagctatcttgtggattccagccttttttttccacacctcggccacggttacgagaaccctggtggatttcttcgttgaacaccgaggccagctgaaggtgcagctggcttggccagggaacataatgcagcacgtgaataggtactggaaaaataagcacttgtccccgaagcgcctgtccacaggcattctgatgtacacactggcatcagccatttgtgaggaaatccatctgtatggattttggccctttgggtttgaccctaacacccgcgaggaccttccctaccattattatgacaaaaagggaactaaattcaccactaaatggcaggaaagtcaccagttgcctgcagagttccaactcctgtatagaatgcacggggagggacttactaaactgactttgtcccattgtgcgtag

SEQ ID NO: 188225 - DNA, 1464 bp, Artificial Sequence
  derived and/or modified sequence
gctggtggaaggggccggacagcgctgcgtgccccctcaccccggagaagggccgctcctcctagcagctgctctgctccgggtcctgcgagaccctgtctccggggtcccgccgccctacggggatcctgccagcctcagcccccagcgcccgtggcttccccacaccctagacctggccccccgccccctccgcacgcaagagcccatacacacacacatactcatactcatactcacactcatatttacacccccgcctcatgttggcccctgaacggaccaatcagtcctgtcagcctgaaccccgcccagccaggaatgcggaactgtaagatggcaagggtggcgagtgttctcgggcttgttatgctcagcgtggcactgttgatcctttcacttattagttacgtgagtctaaagaaagagaatattttcacgacaccaaaatatgcctccccaggcgcgcctaggatgtacatgtttcatgccggttttagatcccagttcgccctcaagtttcttgacccgtccttcgtgcctattactaattctctgactcaggagttgcaggagaagccaagtaagtggaaatttaaccggacagcctttcttcaccaaagacaagaaattctgcagcatgtcgacgtgataaagaacttcagcctgaccaagaattctgtaaggattggtcagttaatgcattacgactactcatctcacaaatacgttttctctatttccaacaactttagatcgcttttgcctgacgtaagccctattatgaacaaacactacaatatttgtgccgtggttggcaactcaggaattttgacaggatctcagtgcggccaggagattgataagtctgattttgtcttcaggtgtaactttgcaccaacagaggcatttcagcgcgatgtgggacggaaaaccaacctcacgacctttaatcccagcatcctggaaaaatattataacaacctccttacaatacaggataggaataacttctttctgagcctgaagaaattggacggggccatcttgtggatcccagcttttttctttcacacttccgccacggttaccagaactctggtagatttcttcgttgagcatcgaggtcagctgaaggtgcagctggcgtggcctgggaatattatgcagcacgtgaataggtactggaagaataaacacctaagcccaaaacggctttcgaccggaatcttgatgtataccttagcttctgccatttgtgaggagatccacctctacggcttttggccttttggattcgacccaaatactcgagaagatcttccctatcattattatgacaaaaaaggcaccaagttcactacaaagtggcaggagagtcatcaacttcccgcggagttccagctgctataccggatgcatggcgagggtttaacaaaactgacactgagccactgtgcctag

SEQ ID NO: 188226 - DNA, 1143 bp, Artificial Sequence
  derived and/or modified sequence
atgaggaactgcaagatggcccgggtggcctctgtgctgggcctggtgatgctgtctgtggccctgctgatcctgagcctcatctcctatgtgtccctgaagaaggagaacatcttcaccacccccaagtatgccagccctggggcccccaggatgtacatgttccacgccggcttccgcagccagtttgccctgaagttcctggaccccagctttgtgcccatcaccaacagcctgacccaggagctgcaggagaagcccagcaagtggaagttcaacagaacagccttcctgcaccagaggcaggagatcctgcagcacgtggatgtgatcaagaacttcagcctgaccaagaacagcgtgagaattggccagctgatgcactatgactacagcagccacaagtatgtgttcagcatcagcaacaacttccgcagcctgctgcctgatgtgagccccatcatgaacaagcactacaacatctgtgctgtggtgggcaacagcggcatcctgaccggcagccagtgtggccaggagattgacaagagtgactttgtgttccgctgcaactttgcccccacagaggccttccagagagatgtgggcaggaagaccaacctgaccaccttcaaccccagcatcctggagaagtactacaacaacctgctgaccatccaggacaggaacaacttcttcctgagcctgaagaagctggatggagccatcctgtggatcccagccttcttcttccacaccagcgccaccgtgaccaggaccctggtggacttctttgtggagcaccggggccagctgaaggtgcagctggcctggccaggcaacatcatgcagcacgtgaaccgctactggaagaacaagcacctgagccccaagaggctgagcacaggcatcctgatgtacaccctggccagcgccatctgtgaggagatccacctgtatggcttctggcccttcggctttgaccccaacacccgggaggacctgccctaccactactatgacaagaagggcaccaagttcaccaccaagtggcaggagagccaccagctgcctgctgagttccagctgctgtacaggatgcatggagagggcctgaccaagctgaccctgagccactgtgcctag

SEQ ID NO: 188227 - DNA, 1464 bp, Artificial Sequence
  derived and/or modified sequence
gctgggggccggggccgcacagccctgcgggcccccagcccccggcggcgggccgccccacccagcagctgcagcgcccctggccctgcccggccctgcctgcggggccctgctgccctgcggggcagctgccagccccagcccccagcccctgtggccagcccccaccccaggcctggccccccacctccaccccacgcccgggcccacacccacacccacacccacacccacacccacacccacatctacaccccagccagctgctggcccctgaatggccccatcagccctgtgtccctgaacccagcccagcccggcatgaggaactgcaagatggcccgggtggcctctgtgctgggcctggtgatgctgtctgtggccctgctgatcctgagcctcatctcctatgtgtccctgaagaaggagaacatcttcaccacccccaagtatgccagccctggggcccccaggatgtacatgtttcatgctggcttccgcagccagtttgccctgaagttcctggaccccagctttgtgcccatcaccaacagcctgacccaggagctgcaggagaagcccagcaagtggaagttcaacagaacagccttcctgcaccagaggcaggagatcctgcagcacgtggatgtgatcaagaacttcagcctgaccaagaacagcgtgcgcatcggccagctgatgcactatgactacagcagccacaagtatgtgttcagcatcagcaacaacttccgcagcctgctgcctgatgtgagccccatcatgaacaagcactacaacatctgtgctgtggtgggcaacagcggcatcctgaccggcagccagtgtggccaggagattgacaagagtgactttgtgttccgctgcaactttgcccccacagaggccttccagagagatgtgggcaggaagaccaacctgaccaccttcaaccccagcatcctggagaagtactacaacaacctgctgaccatccaggacaggaacaacttcttcctgagcctgaagaagctggatggagccatcctgtggatcccagccttcttcttccacaccagcgccaccgtgaccaggaccctggtggacttctttgtggagcaccggggccagctgaaggtgcagctggcctggccaggcaacatcatgcagcacgtgaaccgctactggaagaacaagcacctgagccccaagaggctgagcacaggcatcctgatgtacaccctggccagcgccatctgtgaggagatccacctgtatggcttctggccctttggatttgaccccaacacccgggaggacctgccctaccactactatgacaagaagggcaccaagttcaccaccaagtggcaggagagccaccagctgcctgctgagttccagctgctgtacaggatgcacggggagggcctgaccaagctgaccctgagccactgtgcctag

SEQ ID NO: 188228 - DNA, 1143 bp, Artificial Sequence
  derived and/or modified sequence
atgcggaactgcaagatggcccgggtggccagcgtgctgggcctggtgatgctctccgtcgctctgttgattctgtcactcattagttatgtgtcactcaagaaggagaacatttttacaactccgaagtacgcatctccgggcgctccccggatgtacatgtttcacgctggcttccgctcacagttcgccctgaagttcctggatccaagtttcgtgcctataaccaattcattaacccaagagttgcaggagaagccctccaaatggaaatttaatagaacggctttcctgcaccaacggcaagagattctccagcatgtcgacgtgatcaagaatttctcactcaccaagaactctgtgcgtattgggcagctcatgcactatgattatagcagtcacaaatatgtgttctctatatcgaacaactttcgttcactgctgccagacgtgtccccaatcatgaacaagcattacaacatctgcgcagtggtgggcaactccgggatccttactggttcccaatgcggccaggaaatagacaagtccgactttgtcttccgctgcaatttcgcccctacagaagcatttcaacgagacgtagggcgcaagacaaacctcaccactttcaacccctcgatactcgaaaagtattacaacaaccttctgacgatccaggaccggaataacttttttctgagcctgaaaaaactagatggcgccattttgtggattcccgccttcttctttcatacctccgccactgtgactaggacactcgtcgactttttcgtggaacacagggggcaactgaaggtccaactcgcctggcctggaaacattatgcagcatgtgaaccggtactggaagaataagcatctatccccgaaaaggttgagcactggcattttaatgtatacccttgctagcgccatttgcgaagagatacacttgtatggcttttggcctttcggatttgaccccaacacgcgggaagatttgccttatcattattacgataagaaggggactaagttcaccaccaaatggcaggaatcccaccagctgcccgctgagtttcagctcctgtatcggatgcacggcgaaggcctaacaaagctgaccctgtcccactgtgcttag

SEQ ID NO: 188229 - DNA, 1464 bp, Artificial Sequence
  derived and/or modified sequence
gccggcggccggggccggaccgccctgcgggcccccagcccccggcgtcgtgctgctccaccctcaagctgttctgcacctggccctgcgcgcccctgtttgcggggcccagcggctctgagggggtcctgtcaaccccagcctccagctcccgtggccagcccacacccccgacctggccccccacctcccccccacgcgcgggctcatacccacacacacactcatacccacacacacacgcatatttatactcccgcgagctgttggcctttaaacggacccatctcacccgtgagcttaaaccccgcccagccaggcatgagaaactgtaagatggccagggttgcctcagttctcgggctcgttatgctatccgttgcgctgctcatacttagtttgatttcatacgtctccctcaagaaggagaatatttttacaacccctaaatacgcctctcccggggcgcctcgcatgtacatgtttcatgccggatttcgatcccagttcgcactgaagtttttggatccctctttcgtaccaatcacaaactctctcactcaggagctgcaagagaaaccatccaaatggaagtttaatcgcacagccttcttacatcagaggcaagagatcctgcagcacgtggatgtgataaaaaacttttcacttacgaagaatagcgtgcgaatcgggcaacttatgcactatgattactcctcacataaatatgtgttctctatcagtaacaatttccggagcttactccccgacgtgtctccaatcatgaataagcactataatatctgcgcggtggtcggcaacagcggtattcttacaggttctcagtgcggacaggagatcgacaaatccgacttcgtgtttagatgcaattttgctcctacggaagccttccagcgtgacgtcggacgaaagaccaatctgactacatttaacccgtcaattttggaaaaatattacaataacctgctgacgattcaggaccggaataatttttttctgtcactcaagaaactggacggtgccattttgtggatccccgcgttttttttccataccagcgcaaccgtgacacggaccctggtggatttcttcgtggagcaccgtggccaacttaaggtgcagcttgcttggccaggaaacataatgcagcacgtaaaccgttactggaaaaacaaacatctgagcccaaaaagactcagcactgggattctcatgtacacactggcatcagccatttgtgaggagattcatctctatggcttttggccctttggcttcgatcccaacacccgggaggatttaccataccactactacgacaaaaaggggaccaaattcaccacgaagtggcaggaaagccaccagctgccggcagaattccaactgctctacagaatgcacggagaaggcctaaccaagcttactctctcccactgcgcatag

SEQ ID NO: 188230 - DNA, 1143 bp, Artificial Sequence
  derived and/or modified sequence
atgagaaactgcaaaatggccagggtcgcctccgtgctggggctggtcatgctatccgtggcactcctgattctgagtctgatttcttatgtttcgttgaagaaagaaaacatattcacgacgccaaaatacgcctcacctggtgctccgagaatgtatatgttccacgccggttttcggagtcagtttgcactcaaatttctagatccttcttttgtgcctataactaactcccttacacaggaactccaggagaagccaagtaagtggaagttcaatcgaacggcctttctgcaccagaggcaggagattctgcaacatgttgatgtgattaagaacttctccctcaccaaaaactcagttaggattggacagctcatgcattatgattatagttcacacaagtacgtattctccatttctaataatttccgaagtctgctgcctgacgtgtcccccatcatgaacaagcattacaatatctgcgccgttgtaggaaactcaggcatactgaccggaagccagtgcgggcaggaaatcgacaagagcgattttgtgttccgctgcaactttgctccgaccgaggcatttcaacgggatgtggggaggaagactaatttaacaaccttcaacccatcgatcctggaaaaatattataacaaccttctcacaattcaagataggaataacttctttttgtctctgaagaaactggatggtgccatcctttggatccccgcatttttcttccacacgagcgccactgtgactcggactttggtagattttttcgtagaacacagaggccaactgaaagtgcagcttgcctggcctggtaacattatgcagcatgtgaaccgctattggaaaaataagcatttgtctccaaaacggctcagtaccgggattcttatgtacactttggcgagcgcaatctgtgaggagatacacctttacggcttttggccttttggttttgatccaaacacaagagaagatctgccatatcactactatgataaaaagggaactaagttcacgacgaaatggcaagagtcccaccagcttcctgccgaatttcagcttctatatcgaatgcacggggaaggcttaaccaagctgacactgagtcactgtgcctag

SEQ ID NO: 188231 - DNA, 1464 bp, Artificial Sequence
  derived and/or modified sequence
gctgggggaagaggccgtaccgccctgagagcccctagtccccgacgcagggcagcaccgccttcatcctgttcagcacccggtcctgctcgaccttgcttgcgcggtcctgccgctctccgcggatcctgtcaaccacagcctcctgccccagtggcctctccacatccacgccctggtcctcctccccctccacacgctagggcccacactcacacacatacgcacactcacacacatactcacatctatacccctgctagttgctggccgttaaatggacccatatccccagtttccctcaatcctgcacaacctggtatgaggaattgcaaaatggcaagggtggcaagtgtactgggtttagtgatgttgtcggtagccttgctcatattatcgctcatctcctatgtttccctgaaaaaggagaacattttcaccacacctaaatatgcctctcctggggcacctaggatgtacatgtttcatgcgggttttaggtcccagttcgctctcaagtttctcgacccctcattcgttcctataacgaactcattgacgcaggaactccaggaaaaacctagtaagtggaaatttaaccgcaccgcttttttacaccagaggcaagaaatcttgcagcacgtagacgttataaagaacttctccttgacaaaaaatagcgtccgcatcggccagctaatgcattatgattactctagtcacaaatacgtcttctccatcagtaataattttaggtccctcctcccggatgtaagtcccattatgaacaagcactataatatatgtgctgttgtaggaaactcaggcatccttacaggatcacaatgcggacaggagattgataagtcagactttgtgttccgctgcaatttcgctccaaccgaagcttttcagcgggatgtggggaggaaaaccaacctgacaacgttcaacccatcaatcctcgagaagtattacaacaatctgttgaccatccaggacagaaacaactttttcctgtcactgaaaaaattagacggcgctatcctgtggattcccgctttttttttccacacaagcgcaacggtgacccgcacactggtagatttttttgttgaacatcggggacagttgaaggtccagctggcctggccaggtaacataatgcaacacgttaaccgctattggaagaataagcaccttagtcccaaacgactcagcaccggaatccttatgtacacattagcctctgctatttgtgaggagattcatttgtacggattctggccattcggctttgatccgaacactagagaagacctgccctaccactattacgataaaaaaggtaccaaatttacaaccaagtggcaggaatctcaccagctccctgccgagttccagctcctgtacagaatgcatggagaggggttgacaaaactcactctctcccattgtgcttag

SEQ ID NO: 188232 - DNA, 10154 bp, Artificial Sequence
  derived and/or modified sequence
ggcagcctcgctggaaacgcgcgggggagcctgagccggcggccggggacgcacggcgctgcgcgctccttcgccacgccgccgcgcagcccctccatcttcctgctcggcaccgggccccgcgcgcccctgcctacggggtcccgctgctctccggggctcctgccagccccaacccccggccccggtggcctccccccacccccgcccgggtccccctcctccgccacacgcgcgcgcgctcacacacacacacacacacacacacacacacacacacatatatacacgccagcgagctgctggccgctcaatggaccgatttccccggtttccctgaacccagcccagcccgggatgagaaactgcaaaatggcccgggtcgccagtgtgctggggctggtcatgctcagcgtcgccctgctgattttatcgctcatcagctacgtgtccctgaaaaaggagaacatcttcaccactcccaagtacgccagcccgggggcgccccgaatgtacatgttccacgcgggattccggtcacaatttgcgctgaagtttctagacccgtcattcgtgcccattacgaattctctcacccaggaactccaagagaaaccttctaagtggaaatttaatcggacagcgtttttacatcaaaggcaagaaattcttcagcatgtcgatgtaataaaaaatttttctttgaccaagaatagtgttcggattggacaactgatgcactatgattattccagccataaatatgttttctctattagcaataacttccggtcacttcttccagatgtgtcacccattatgaacaagcattataatatttgtgctgtggttggaaatagtgggatcctgacagggagccagtgtggacaagaaatagataaatcagattttgttttccgttgcaatttcgcccctacggaggctttccaaagagatgttggaagaaaaaccaatcttaccaccttcaaccccagcatcctggaaaaatattacaacaatctcttgactattcaggaccgtaacaactttttcctcagtttaaaaaagcttgacggggccattctttggatccctgcatttttcttccacacttcagcaactgtgaccaggacattagttgacttttttgttgaacacagaggtcagttaaaagtccaactggcttggccgggaaatataatgcaacatgtcaacaggtactggaaaaacaaacatttgtcacctaaacggctgagcacaggtattcttatgtacacccttgcatcagcaatatgtgaagagatccacttgtatggattttggccgtttggatttgaccccaacacaagggaagatcttccataccattactatgacaaaaaaggaaccaaatttaccaccaagtggcaggagtcccaccagctgcctgctgagtttcagctgctgtaccgaatgcatggggaagggctcaccaagctgactctgtcacactgtgcctaagaactccaaacggaaagcgccaaatggctgtttaaaaagtgccccaaatcaaattgaatagccttcagaatagaaccctagagaatgtcttataaggattgtctgccatttaaaaggaaagatgtcttttctcttttgcactgctcttttaagagttttagcagatttagcaggacagatgcattgaagccacatggtttagacttgattgataaagggaatgttgcatttgggactatgctgctaacgaaatggtttgaagtattttcatgtttggattttaataataaactgcctctcatttttatgaggactagagctatagtttctgcagctctgctcagatagtcctcataatcagaggcctctggccaactggggcaggacctgttttgctggtgggatcagactctgaaaaatggaaacgtaaaaaactggtttgcatatctcatcttctatctatctccctatctccatctctatcaccatctcactccttccctctgcaactactccctgccctaccaccgtggagtttaataatttgctaggaatcctattgaattcgctttgcttgtatatgttgcatttgtacttgatgtgtttaaggttctgggtaactttgatgcttcatgacaaaataggcaaatcacgatggactcccttgtgattccttttttaaagaaatgcctctgatgcagtcctcaccagtccattcagtcattctacagcaagatggtccctctgtggtgagtgggatataaggcagtgcatctttcatgatcacaaagaaagcctatgttgtggatagcattgcgtctcttgatgtaggcattgttatggcaaataatagcactgtggccacatctgtaaggccattccagcctaaatttagtgtctcccataatcccaacccatgcactaggctgggtgttctctcagaatatagaggcaatgaatcagcttaagaccctgggacacacaaaggaaaaggaagaagaatatttagaagttgttatggaatcctgtgtaccctaaagtgtggtaaccatgttacccattccagctgggttaaagtggaggaggatcttggccaggccaggtgcccaggtgactagtgctgaggtgcgatcgttttccgtatcattgtgtgcaccaccaccaatccagaaccatttgctctctttgagaacattgtagcactggatattccctctttccactgaagtcagatctatacaactacaaattaagcatttcaaaagaaaaagccattgtgcagtggcaagagttggaatccaagattatgtagacctgcgatgaaggaagtagctggccattctcattttctttatttcagccatatgagtagaaatcaaatcattcccatccctggctttttactgagcagcactttgttcttccaattcagcccaacgtctggccaagttgatgttaaattttaataagagtttctttcttctttccaaatgccagtcaagcatatttgttatgcatttgagtggggtagctcattcttttcctgaaatctcatctagattgcttgcaatgcgacaaataactgtttaaaaaatgtgctgtagttcagtgatgagctcattgcccctctttaggaaggtaagatcatgcctaaaattaaaccgaatatggtaaggaaagacactatcgttatgctcacgttctgcctggtcctaaacctgccttattattattttcagaaagcaatctaattagagcaacttgcatagatctagatattaactaatgaaagaaacaccaagttcaaatgtgttaccaattatgacacacattacaatataattataaggggagacattaaaaacattttgtaattcagtggtataatttgatgggtatcacaaccacaccgtgtttgttccctgtccctttgaagaggactgtactaccatcctcacactgtgctctgttgggatcactgagagattgacaactgacagaagtgtttagttggctgttcctgagcacttagttcatttggttatagctaagtgatattaatgccaatattacttgggccagattctgactctggagttttaatcccaatgtgcccattcattttcactaaatataaatgcatagacactttaaaccaagaagattaaaagaggaaaagaccagaatctctaaaaaacagtttactgttctgtagtggacaatttaaattttatctcatcataatgccaaggatttttgtttgttttttaagttcagggagattttttaaatctccttgcagtcttggctccatcttaaccttagagtgggaggactttcccatcccccaccaccgtgttatctatcactttaatgaaaactcaaaatagtgaggaaatggacttttcttcagaacttgaggggtttagagatcaggctcatctctgcttataaggaggacttcctggagatgatcccaatagatcacccttcacttttgaagaatagcagcttctagctgaccatgcaaaatctctgtttgtttttaaagactgtttcaaagattaaatctatacaaccacttttatgaccaaaaaagttgttgtgtcccaagtgtcctaattagaaaggcagctggctctcctgcagctcccaggcttgtgtagtcaagtgcagtgaactgggcagtaatcagctcaggaccattggctctttcctcctctttcagctacagacacatgccctggcttttgcattgaccttgctttgttagttctagactaatttatccttttgtcagacactttcccttttttaggatactcacaacagagtccactttcagctattggaatacattttaccataaagcccccaaggctttctacccataacaccaacacaaaaaaccaattaagttgcagaggggggaaataatcacaaacttttggcaacctgcttaatgctagacgctctgttttcactggttattctgagtgtcatatgcagatgcagatccaagggagacagggctaaatggtggtgtcaagaattcctcccacaccccaaaaattctttccaatatttgattattaaaatatctatcatttctccaccttgtgtctgtgtcttaagtgtctgtgaatattgtaaaagtgctgtatgtttagtagtgttgtgtgcctggcagtgctgactatgactactgtgccatctgtctgtgaccttgatgtcaggtacctggccatggggctaccagcaaggatgtgcaaaggaagaaccgctgcccctgccctcagcttccttatgcccgagccactacttatccgtgaatgtgagtgccaagagaaacctaatttggtggggaagccaaggaatgggagaacgttttttctgatttgagtcaaggcactaattattagacactctcagacaacaaagcggtattgacctgagatcaaaggaagcagggacaatattgtagaatgctaggacactggaaatgaagaggccttcagcttcgccagtcttgattcttgactttacaaatgagaaaatggagaaacagggaggctaggtgatttgccccagatgacactgtcaattagtggagaaattatgattcctcctctagtacttcttggtcttaccagcatcaaatgaagctgggctcacagggaaagtggtttttggtctgggatctgcagagcacataaaataagttagaaagtctataaaagaggaaaaaaggttctcctctccctcccaaaaatgacttcccaacacagaacaataaaggagatgcttgtgtgggtatgcaactgtccaccaattatcacctaccttctccctgagatgaaacaaaacacgcttggtaaatcatgatttgataaataacaattaagttactggtggttcatgcttgacagctgcaatcttacccaataagctattcatcttagtaaaaccttgttttagtaatatacatgcataatttagaagttgaaggctgaaaattgttgtgttcttctccatatatatacaactttcatcggggtcccttgagttaagaaatgccttctattttataggtaatctcaacagcagactttgaaatattgtgtttggttcaatatgctaagaagatatacaaataataataacttcgtgagtcttcatgtgcaaaatgacaaactgagcaattttctgtataattctagattcttaaaaccttttttcccataattgtttgaatgcactaggcacaagtttctgtttaagcctctgcttctccctgaatgtgtagaactgtcactttgcttacaaaggggctgtgtgtttgtggctggcagcccagatagagcactctgggtgctggggattgagggcaccttggccagctgattgacctgtctggactctgtggcccaattaatcgaggccacagatcagttggtactaagcatcaaaatgattcattatgcctctctcacactccgattgctttgccacatagataacagcatttgaaatgggaaacactttagaatgtcattattgtattatatattgtcatcttatgcagtatttctgaaaatttatttttattgtgatgactgattgaagacatatgtgtatgaatagatgttcctcagtgaagcctattctcttgttgttgatgacagtggcatcagagtgaagagttgttgcagagtaactgacttcagtttaaggttaccctggggttctggggttaggacccggattatgcagctgatctcccagcaaacacagctgtatgaaataagcaactcttcaaaatacaattcttgccactcattctggacctttgattcataatgtcctgggataagtccaacttacaaagattcccaggtgattcgtgtgaccaccatttggaaaccagtaatatatacatccggagtcatatataccattttgaacaaagtagctaaatgcttatctctccttgtgcgattagtttcacatgttcgttgaggttatcatgttaaatggcaatatagacacagtcttagtgattcaacaattcagctgtttcagccgaattgaccagttgctaatttataagcaaattgtaactgatcaatttagtcagaatggatgcaagcccaaagacaaggtggagagcaagctttaatatacactttgtctcaaggccagctcttcatatttccctctttatatttcaaactaagaggcagatctcaggtcactcatctttagaattggtgagaatgagaaacagggaactgaagtgattcattcagattcaatttggaagtcattcccagagcctaaaatatttatctaaggggtctgatttatcaacctcaggtagtctccaaaacacaaaggtattcaggctaaaataaaaccaatcaaaaaaggaaattcaggaggctccagttctaagactaacccagtataacaagggtgatcagttattacttgtggccttgtaccacctctgttggataatgtgccaccgtcctaatgaagctttggccagacttctttctatagctgtgcacatagaaaggctttagacaacagtgataccaaagggttcctttgattttccttctgtgtgattctcagacagttttagctctttggtgtgctgccaaatgtttaacaactggctctggaaaacagtggaacccagatttttagcacctaccaatttctatggtgtaaatactctcatctcagccaatttcaggctactaacttaatgtcaaccagctgaaaacacaacaatatgttttcaagagccagtataagttggctccaatacagcatgagccagctccagcatagcactgcctgaacaatttttaagtcagtgagtaccaaataggagaggctagcagaggctttggagggacttttaaatgtcccctccaccaagggaagcatttccatgttggttagttttactgatttttagtaaaagagcatattattggatcccaaggtgttcaaatattccacgtgactcttaggaacctctcaacagactccccagtatcttgggagattaccaactgtggcttttctaatttctaagggtgaccctccaggaaaacattctttaatttaactaccagttaaaaccatgtttggctgatcttttttaaaaaatctatacctatagttcatcacttgtttccccaactttgtcattttccctatccacttgcccctcatccttctgacacaataaaaaaaatacaggtacccacaaaacagtgcctgcaaaggagcaggggaagaacaaggcacccagtaagctcacttggctctacatatctggaaaggcactgaggttccaaggtctctaccccaccaggggacacccagtaaacatcacgctgagagtttaagttgcactcaactggagttgatttgcccttagaaaagtttccaacggtgaagaaataccacttggtaggaatatctctgggcaacttcattgctgactgggcaaactttgtaggataaggtgtcatgtgatgtaaggctggaccatgaaaaacaaaaatctactaatacacatttggcccctgcagtcccctggcattgagcaatagagcaactgtcctttctcaccactagttgtgagtgtacttccaactgagtgtttagaaatcaggtaatctggtaatccacagaacaagctttgtttgcaaattgcaaatttttctggtagaagtcattcttaggtgggcttcattaaatctttggagaggcaatgctgggaaaaaatatgcctaattcctaggacacagtgagtggccgtaagttgttatctgcatgtactaaatcaaaattagatcatgaaggaccaaatctacttccgttgctataataaaataccctacaggttctgtaaggcatttctaaactgtaaatgcttgaaacgcaagttggacattttctatactatgtgtaaaatgccaggttatacctctattttctttcttcctaatggtcattgaaatgagcttgtttctctacattgagcaagctacattttattttaaatgagtcaggtgcatgttcagatgtctgtattcccaatacattgcatgcagcctgagcacaagtatgccttcaccctctggctcttttcctgacaccaaacagagaagtccacagctacaagcacaaggggcttgacaggtaggccttgttttattatgaacaaattcaccagaaaaccattcttgaggaaccagccactcccatagcatttttagtcttagggaagaaaattggcagggaagaaaaattggcagacaatgggaaagaggtttggtcaacctgcataagtggaataaagtcattgaagtacttgcaaaaagaagagggaggtttccctctgaaggaatctagaccattttttaatatggagaataactgtaccccatgttagaagtgctctttagccatatttcaagatccagatctgaacccatactgtgcagaaaagcacaagagcgcttacagccaagagccctgggaggagttgagtaacaggctgagatccggtcaccaagcatcattagttagcactgaaattctcccaggacacaaaacaaatgtatggaaacatcgcaatacactatcatttactcacatgggacaaccacctaagtccatagcaaaactttacagatctagatgttatctcaagtcaggattccagatcaacatcctccatgtggagatgagacaactgaggttcagaaagttggagtgacttatttgcccagctagctaactggaattagagtctgggtctcccaaccactgattctgctacaccacactgtgctgcttccattagttagatggacattgacaattaattgtgaaagcattaattagaagtcaagacaaaagaatgtttgtgatatcttctctcgcttaacatactttgatttcaccattgcatttcagcattttaaagaatagtgtatcagtatagaaggaggagcaaagctctttaagagtaatgatgaaaccaaaaggtcaaaaagtagaagaatagcgaatgtaagttattaaataaatgagcaagaagtatgtgtcagggaaaataaatgcttcttatattgttaataccgtgattccctgcccgctcaccccgtcactcaacacttgatgcatttgttttggaaagtgccattttatgctgagatactggtattgaaaacttccctctttcccaactctgtcagaagttctcttgctctttggaagaagccgagggccttaacaaatcagactgacctcccttgtgacaggcagcctcgcctgcccttggaaacaagctgccagaatgtgagggccacagagacccaagagaagccagcactgctagactgaggaacttgtaaatatcttctgctttcttggtgaacaaggacagaggcaattgcgtgtatattgtgactgtagtttgtgaagaaaatgcaaccatttgcttcgacagctcctcaaatgtacttgttaagtgtgaatgtgcctgcctcattgccttgtgttccaaacacagtactgaatgcgttgtttttaaataaaccatttcgttttgctttgggaaa

SEQ ID NO: 188233 - DNA, 10152 bp, Artificial Sequence
  derived and/or modified sequence
ggcagcctcgctggaaacgcgcgggggagcctgagccggcggccggggacgcacggcgctgcgcgctccttcgccacgccgccgcgcagcccctccatcttcctgctcggcaccgggccccgcgcgcccctgcctacggggtcccgctgctctccggggctcctgccagccccaacccccggccccggtggcctccccccacccccgcccgggtccccctcctccgccacacgcgcgcgcgcacacacacacacacacacacacacacacacacacacatatatacacgccagcgagctgctggccgctcaatggaccgatttccccggtttccctgaacccagcccagcccgggatgagaaactgcaaaatggcccgggtcgccagtgtgctggggctggtcatgctcagcgtcgccctgctgattttatcgctcatcagctacgtgtccctgaaaaaggagaacatcttcaccactcccaagtacgccagcccgggggcgccccgaatgtacatgttccacgcgggattccggtcacaatttgcgctgaagtttctagacccgtcattcgtgcccattacgaattctctcacccaggaactccaagagaaaccttctaagtggaaatttaatcggacagcgtttttacatcaaaggcaagaaattcttcagcatgtcgatgtaataaaaaatttttctttgaccaagaatagtgttcggattggacaactgatgcactatgattattccagccataaatatgttttctctattagcaataacttccggtcacttcttccagatgtgtcacccattatgaacaagcattataatatttgtgctgtggttggaaatagtgggatcctgacagggagccagtgtggacaagaaatagataaatcagattttgttttccgttgcaatttcgcccctacggaggctttccaaagagatgttggaagaaaaaccaatcttaccaccttcaaccccagcatcctggaaaaatattacaacaatctcttgactattcaggaccgtaacaactttttcctcagtttaaaaaagcttgacggggccattctttggatccctgcatttttcttccacacttcagcaactgtgaccaggacattagttgacttttttgttgaacacagaggtcagttaaaagtccaactggcttggccgggaaatataatgcaacatgtcaacaggtactggaaaaacaaacatttgtcacctaaacggctgagcacaggtattcttatgtacacccttgcatcagcaatatgtgaagagatccacttgtatggattttggccgtttggatttgaccccaacacaagggaagatcttccataccattactatgacaaaaaaggaaccaaatttaccaccaagtggcaggagtcccaccagctgcctgctgagtttcagctgctgtaccgaatgcatggggaagggctcaccaagctgactctgtcacactgtgcctaagaactccaaacggaaagcgccaaatggctgtttaaaaagtgccccaaatcaaattgaatagccttcagaatagaaccctagagaatgtcttataaggattgtctgccatttaaaaggaaagatgtcttttctcttttgcactgctcttttaagagttttagcagatttagcaggacagatgcattgaagccacatggtttagacttgattgataaagggaatgttgcatttgggactatgctgctaacgaaatggtttgaagtattttcatgtttggattttaataataaactgcctctcatttttatgaggactagagctatagtttctgcagctctgctcagatagtcctcataatcagaggcctctggccaactggggcaggacctgttttgctggtgggatcagactctgaaaaatggaaacgtaaaaaactggtttgcatatctcatcttctatctatctccctatctccatctctatcaccatctcactccttccctctgcaactactccctgccctaccaccgtggagtttaataatttgctaggaatcctattgaattcgctttgcttgtatatgttgcatttgtacttgatgtgtttaaggttctgggtaactttgatgcttcatgacaaaataggcaaatcacgatggactcccttgtgattccttttttaaagaaatgcctctgatgcagtcctcaccagtccattcagtcattctacagcaagatggtccctctgtggtgagtgggatataaggcagtgcatctttcatgatcacaaagaaagcctatgttgtggatagcattgcgtctcttgatgtaggcattgttatggcaaataatagcactgtggccacatctgtaaggccattccagcctaaatttagtgtctcccataatcccaacccatgcactaggctgggtgttctctcagaatatagaggcaatgaatcagcttaagaccctgggacacacaaaggaaaaggaagaagaatatttagaagttgttatggaatcctgtgtaccctaaagtgtggtaaccatgttacccattccagctgggttaaagtggaggaggatcttggccaggccaggtgcccaggtgactagtgctgaggtgcgatcgttttccgtatcattgtgtgcaccaccaccaatccagaaccatttgctctctttgagaacattgtagcactggatattccctctttccactgaagtcagatctatacaactacaaattaagcatttcaaaagaaaaagccattgtgcagtggcaagagttggaatccaagattatgtagacctgcgatgaaggaagtagctggccattctcattttctttatttcagccatatgagtagaaatcaaatcattcccatccctggctttttactgagcagcactttgttcttccaattcagcccaacgtctggccaagttgatgttaaattttaataagagtttctttcttctttccaaatgccagtcaagcatatttgttatgcatttgagtggggtagctcattcttttcctgaaatctcatctagattgcttgcaatgcgacaaataactgtttaaaaaatgtgctgtagttcagtgatgagctcattgcccctctttaggaaggtaagatcatgcctaaaattaaaccgaatatggtaaggaaagacactatcgttatgctcacgttctgcctggtcctaaacctgccttattattattttcagaaagcaatctaattagagcaacttgcatagatctagatattaactaatgaaagaaacaccaagttcaaatgtgttaccaattatgacacacattacaatataattataaggggagacattaaaaacattttgtaattcagtggtataatttgatgggtatcacaaccacaccgtgtttgttccctgtccctttgaagaggactgtactaccatcctcacactgtgctctgttgggatcactgagagattgacaactgacagaagtgtttagttggctgttcctgagcacttagttcatttggttatagctaagtgatattaatgccaatattacttgggccagattctgactctggagttttaatcccaatgtgcccattcattttcactaaatataaatgcatagacactttaaaccaagaagattaaaagaggaaaagaccagaatctctaaaaaacagtttactgttctgtagtggacaatttaaattttatctcatcataatgccaaggatttttgtttgttttttaagttcagggagattttttaaatctccttgcagtcttggctccatcttaaccttagagtgggaggactttcccatcccccaccaccgtgttatctatcactttaatgaaaactcaaaatagtgaggaaatggacttttcttcagaacttgaggggtttagagatcaggctcatctctgcttataaggaggacttcctggagatgatcccaatagatcacccttcacttttgaagaatagcagcttctagctgaccatgcaaaatctctgtttgtttttaaagactgtttcaaagattaaatctatacaaccacttttatgaccaaaaaagttgttgtgtcccaagtgtcctaattagaaaggcagctggctctcctgcagctcccaggcttgtgtagtcaagtgcagtgaactgggcagtaatcagctcaggaccattggctctttcctcctctttcagctacagacacatgccctggcttttgcattgaccttgctttgttagttctagactaatttatccttttgtcagacactttcccttttttaggatactcacaacagagtccactttcagctattggaatacattttaccataaagcccccaaggctttctacccataacaccaacacaaaaaaccaattaagttgcagaggggggaaataatcacaaacttttggcaacctgcttaatgctagacgctctgttttcactggttattctgagtgtcatatgcagatgcagatccaagggagacagggctaaatggtggtgtcaagaattcctcccacaccccaaaaattctttccaatatttgattattaaaatatctatcatttctccaccttgtgtctgtgtcttaagtgtctgtgaatattgtaaaagtgctgtatgtttagtagtgttgtgtgcctggcagtgctgactatgactactgtgccatctgtctgtgaccttgatgtcaggtacctggccatggggctaccagcaaggatgtgcaaaggaagaaccgctgcccctgccctcagcttccttatgcccgagccactacttatccgtgaatgtgagtgccaagagaaacctaatttggtggggaagccaaggaatgggagaacgttttttctgatttgagtcaaggcactaattattagacactctcagacaacaaagcggtattgacctgagatcaaaggaagcagggacaatattgtagaatgctaggacactggaaatgaagaggccttcagcttcgccagtcttgattcttgactttacaaatgagaaaatggagaaacagggaggctaggtgatttgccccagatgacactgtcaattagtggagaaattatgattcctcctctagtacttcttggtcttaccagcatcaaatgaagctgggctcacagggaaagtggtttttggtctgggatctgcagagcacataaaataagttagaaagtctataaaagaggaaaaaaggttctcctctccctcccaaaaatgacttcccaacacagaacaataaaggagatgcttgtgtgggtatgcaactgtccaccaattatcacctaccttctccctgagatgaaacaaaacacgcttggtaaatcatgatttgataaataacaattaagttactggtggttcatgcttgacagctgcaatcttacccaataagctattcatcttagtaaaaccttgttttagtaatatacatgcataatttagaagttgaaggctgaaaattgttgtgttcttctccatatatatacaactttcatcggggtcccttgagttaagaaatgccttctattttataggtaatctcaacagcagactttgaaatattgtgtttggttcaatatgctaagaagatatacaaataataataacttcgtgagtcttcatgtgcaaaatgacaaactgagcaattttctgtataattctagattcttaaaaccttttttcccataattgtttgaatgcactaggcacaagtttctgtttaagcctctgcttctccctgaatgtgtagaactgtcactttgcttacaaaggggctgtgtgtttgtggctggcagcccagatagagcactctgggtgctggggattgagggcaccttggccagctgattgacctgtctggactctgtggcccaattaatcgaggccacagatcagttggtactaagcatcaaaatgattcattatgcctctctcacactccgattgctttgccacatagataacagcatttgaaatgggaaacactttagaatgtcattattgtattatatattgtcatcttatgcagtatttctgaaaatttatttttattgtgatgactgattgaagacatatgtgtatgaatagatgttcctcagtgaagcctattctcttgttgttgatgacagtggcatcagagtgaagagttgttgcagagtaactgacttcagtttaaggttaccctggggttctggggttaggacccggattatgcagctgatctcccagcaaacacagctgtatgaaataagcaactcttcaaaatacaattcttgccactcattctggacctttgattcataatgtcctgggataagtccaacttacaaagattcccaggtgattcgtgtgaccaccatttggaaaccagtaatatatacatccggagtcatatataccattttgaacaaagtagctaaatgcttatctctccttgtgcgattagtttcacatgttcgttgaggttatcatgttaaatggcaatatagacacagtcttagtgattcaacaattcagctgtttcagccgaattgaccagttgctaatttataagcaaattgtaactgatcaatttagtcagaatggatgcaagcccaaagacaaggtggagagcaagctttaatatacactttgtctcaaggccagctcttcatatttccctctttatatttcaaactaagaggcagatctcaggtcactcatctttagaattggtgagaatgagaaacagggaactgaagtgattcattcagattcaatttggaagtcattcccagagcctaaaatatttatctaaggggtctgatttatcaacctcaggtagtctccaaaacacaaaggtattcaggctaaaataaaaccaatcaaaaaaggaaattcaggaggctccagttctaagactaacccagtataacaagggtgatcagttattacttgtggccttgtaccacctctgttggataatgtgccaccgtcctaatgaagctttggccagacttctttctatagctgtgcacatagaaaggctttagacaacagtgataccaaagggttcctttgattttccttctgtgtgattctcagacagttttagctctttggtgtgctgccaaatgtttaacaactggctctggaaaacagtggaacccagatttttagcacctaccaatttctatggtgtaaatactctcatctcagccaatttcaggctactaacttaatgtcaaccagctgaaaacacaacaatatgttttcaagagccagtataagttggctccaatacagcatgagccagctccagcatagcactgcctgaacaatttttaagtcagtgagtaccaaataggagaggctagcagaggctttggagggacttttaaatgtcccctccaccaagggaagcatttccatgttggttagttttactgatttttagtaaaagagcatattattggatcccaaggtgttcaaatattccacgtgactcttaggaacctctcaacagactccccagtatcttgggagattaccaactgtggcttttctaatttctaagggtgaccctccaggaaaacattctttaatttaactaccagttaaaaccatgtttggctgatcttttttaaaaaatctatacctatagttcatcacttgtttccccaactttgtcattttccctatccacttgcccctcatccttctgacacaataaaaaaaatacaggtacccacaaaacagtgcctgcaaaggagcaggggaagaacaaggcacccagtaagctcacttggctctacatatctggaaaggcactgaggttccaaggtctctaccccaccaggggacacccagtaaacatcacgctgagagtttaagttgcactcaactggagttgatttgcccttagaaaagtttccaacggtgaagaaataccacttggtaggaatatctctgggcaacttcattgctgactgggcaaactttgtaggataaggtgtcatgtgatgtaaggctggaccatgaaaaacaaaaatctactaatacacatttggcccctgcagtcccctggcattgagcaatagagcaactgtcctttctcaccactagttgtgagtgtacttccaactgagtgtttagaaatcaggtaatctggtaatccacagaacaagctttgtttgcaaattgcaaatttttctggtagaagtcattcttaggtgggcttcattaaatctttggagaggcaatgctgggaaaaaatatgcctaattcctaggacacagtgagtggccgtaagttgttatctgcatgtactaaatcaaaattagatcatgaaggaccaaatctacttccgttgctataataaaataccctacaggttctgtaaggcatttctaaactgtaaatgcttgaaacgcaagttggacattttctatactatgtgtaaaatgccaggttatacctctattttctttcttcctaatggtcattgaaatgagcttgtttctctacattgagcaagctacattttattttaaatgagtcaggtgcatgttcagatgtctgtattcccaatacattgcatgcagcctgagcacaagtatgccttcaccctctggctcttttcctgacaccaaacagagaagtccacagctacaagcacaaggggcttgacaggtaggccttgttttattatgaacaaattcaccagaaaaccattcttgaggaaccagccactcccatagcatttttagtcttagggaagaaaattggcagggaagaaaaattggcagacaatgggaaagaggtttggtcaacctgcataagtggaataaagtcattgaagtacttgcaaaaagaagagggaggtttccctctgaaggaatctagaccattttttaatatggagaataactgtaccccatgttagaagtgctctttagccatatttcaagatccagatctgaacccatactgtgcagaaaagcacaagagcgcttacagccaagagccctgggaggagttgagtaacaggctgagatccggtcaccaagcatcattagttagcactgaaattctcccaggacacaaaacaaatgtatggaaacatcgcaatacactatcatttactcacatgggacaaccacctaagtccatagcaaaactttacagatctagatgttatctcaagtcaggattccagatcaacatcctccatgtggagatgagacaactgaggttcagaaagttggagtgacttatttgcccagctagctaactggaattagagtctgggtctcccaaccactgattctgctacaccacactgtgctgcttccattagttagatggacattgacaattaattgtgaaagcattaattagaagtcaagacaaaagaatgtttgtgatatcttctctcgcttaacatactttgatttcaccattgcatttcagcattttaaagaatagtgtatcagtatagaaggaggagcaaagctctttaagagtaatgatgaaaccaaaaggtcaaaaagtagaagaatagcgaatgtaagttattaaataaatgagcaagaagtatgtgtcagggaaaataaatgcttcttatattgttaataccgtgattccctgcccgctcaccccgtcactcaacacttgatgcatttgttttggaaagtgccattttatgctgagatactggtattgaaaacttccctctttcccaactctgtcagaagttctcttgctctttggaagaagccgagggccttaacaaatcagactgacctcccttgtgacaggcagcctcgcctgcccttggaaacaagctgccagaatgtgagggccacagagacccaagagaagccagcactgctagactgaggaacttgtaaatatcttctgctttcttggtgaacaaggacagaggcaattgcgtgtatattgtgactgtagtttgtgaagaaaatgcaaccatttgcttcgacagctcctcaaatgtacttgttaagtgtgaatgtgcctgcctcattgccttgtgttccaaacacagtactgaatgcgttgtttttaaataaaccatttcgttttgctttgggaaa

SEQ ID NO: 188234 - protein, 330 aa, Artificial Sequence
  derived and/or modified sequence
MIPVSLVVVVVGGWTVVYLTDLVLKSSVYFKHSYEDWLENNGLSISPFHIRWQTAVFNRAFYSWGRRKARMLYQWFNFGMVFGVIAMFSSFFLLGKTLMQTLAQMMADSPSSYSSSSSSSSSSSSSSSSSSSSSSSLHNEQVLQVVVPGINLPVNQLTYFFTAVLISGVVHEIGHGIAAIREQVRFNGFGIFLFIIYPGAFVDLFTTHLQLISPVQQLRIFCAGIWHNFVLALLGILALVLLPVILLPFYYTGVGVLITEVAEDSPAIGPRGLFVGDLVTHLQDCPVTNVQDWNECLDTIAYEPQIGYCISASTLQQLSFPVRGVYISSI

SEQ ID NO: 188235 - protein, 519 aa, Artificial Sequence
  derived and/or modified sequence
MIPVSLVVVVVGGWTVVYLTDLVLKSSVYFKHSYEDWLENNGLSISPFHIRWQTAVFNRAFYSWGRRKARMLYQWFNFGMVFGVIAMFSSFFLLGKTLMQTLAQMMADSPSSYSSSSSSSSSSSSSSSSSSSSSSSLHNEQVLQVVVPGINLPVNQLTYFFTAVLISGVVHEIGHGIAAIREQVRFNGFGIFLFIIYPGAFVDLFTTHLQLISPVQQLRIFCAGIWHNFVLALLGILALVLLPVILLPFYYTGVGVLITEVAEDSPAIGPRGLFVGDLVTHLQDCPVTNVQDWNECLDTIAYEPQIGYCISASTLQQLSFPVRAYKRLDGSTECCNNHSLTDVCFSYRNNFNKRLHTCLPARKAVEATQVCRTNKDCKKSSSSSFCIIPSLETHTRLIKVKHPPQIDMLYVGHPLHLHYTVSITSFIPRFNFLSIDLPVVVETFVKYLISLSGALAIVNAVPCFALDGQWILNSFLDATLTSVIGDNDVKDLIGFFILLGGSVLLAANVTLGLWMVTAR

SEQ ID NO: 188236 - DNA, 993 bp, Artificial Sequence
  derived and/or modified sequence
atgatcccagtttcacttgtggtcgtggtcgtgggcggatggacagtcgtgtatcttacggatctggtgctgaaaagcagcgtgtactttaaacattcatatgaggattggctagaaaataatggcctgtccatcagtccatttcacattcgatggcagaccgccgtattcaacagggcattttacagttggggtagaaggaaagctaggatgctgtaccagtggtttaatttcggaatggtatttggggtcattgcaatgttcagtagcttctttctactcggaaagaccttgatgcagaccctggcccaaatgatggctgactcaccaagcagctacagctccagttcttcgtctagcagctcatccagctcctcttctagttcatcgtcctcctcctcgagctctctccataatgaacaggtgctgcaagtggtggtccctggtataaacctcccagttaatcagcttacttacttttttaccgcggtgctcatttccggcgtagttcacgagatcggtcacggaattgcagcaattcgcgaacaagtcaggtttaacggttttggaattttcctgttcattatatatccaggggcattcgtggacctgtttaccacccacctgcagctgattagcccagtgcagcaactacgcatattctgtgcggggatctggcacaactttgttctggcattactgggaatattggcgcttgtacttctcccagtgattttactacccttctactatacaggagtaggagtcctcattaccgaggtggccgaagactccccagccatagggccacgtggtctgtttgtgggcgatctggtaactcacctgcaggattgtccggttaccaacgttcaggattggaacgaatgtttagacactattgcctacgaaccccagattggttactgtattagcgcgtccactctgcagcagctgagttttcccgtacggggcgtttacatttcttccatttag

SEQ ID NO: 188237 - DNA, 1560 bp, Artificial Sequence
  derived and/or modified sequence
atgataccagtgagcttggtggtagtcgtggtgggaggatggacagtggtctatctgacagatctggttttgaagagttctgtctacttcaaacactcctacgaagattggctcgagaataatggccttagcatctcgccttttcatattagatggcagactgccgtgttcaaccgcgctttctactcatggggccgcaggaaagcccggatgctctatcagtggttcaacttcggcatggtgtttggagtgattgccatgttcagttccttttttctgctgggaaagacattaatgcagactctggcccagatgatggcggactcgcccagctcttactcaagtagctcttcctcttcttcctctagctcatctagctcatcgtccagctcaagcagctcaagctccctgcacaatgagcaggtactgcaagttgtcgtacccggaattaatctgcccgtcaaccaacttacatacttctttactgcagtgttgattagcggagtggtccatgagatcgggcacggcatcgcagccatccgcgaacaggtgcggttcaatggatttggaattttcctgtttatcatctacccgggcgctttcgtggacctgttcacaacacatttgcagctgatttcccccgtgcagcagcttcgcatcttttgcgctggcatctggcataatttcgttctagcgctattagggatacttgctctggtgctgctacccgtgatactcctccctttctattatactggagtaggcgtgctcataactgaggttgccgaggactcccctgccatcggcccaagaggcctgttcgtgggggacctagtgactcaccttcaggactgccccgtcactaacgtgcaggactggaatgaatgtcttgatactattgcctatgaaccgcagatcggctactgcatctctgcaagcacactacagcagctcagctttcctgtgagggcttacaaacgactcgacgggtctacagaatgttgtaataaccattccctgacagacgtctgcttttcctatcgaaataattttaacaagagactacacacctgtcttccagcaaggaaggcagtggaggccacgcaggtctgccgcactaataaggactgtaaaaagagttcgtcctctagcttttgtatcattccttctctggagacccacacaaggctcatcaaggtcaagcatccaccacagatcgacatgctgtatgtcggacaccccctgcacctgcactatacagtgtccatcacttccttcataccgagatttaacttccttagtatcgatctccctgtcgtcgtcgaaacctttgtgaaatatttgataagcttgtcaggggcattggccatcgtaaatgccgtcccttgctttgccctagacggacagtggatcctcaactcttttctagacgcgacgttgacctctgtgatcggagataatgatgtgaaggacctgatcggtttctttatcctgttaggggggagcgttctattggcggcaaatgtcaccctcggtctgtggatggtgactgctagatag

SEQ ID NO: 188238 - DNA, 993 bp, Artificial Sequence
  derived and/or modified sequence
atgatccctgtgtccctggtggtggtggtggtgggcggctggacagtggtgtacctgacagacctggtgctgaagagctctgtgtacttcaagcacagctatgaggactggctggagaacaacggcctgagcatcagccccttccacatccgctggcagacagctgtgttcaacagagccttctacagctggggccgcaggaaggccaggatgctgtaccagtggttcaactttggcatggtgtttggagtgattgccatgttcagcagcttcttcctgctgggcaagaccctgatgcagaccctggcccagatgatggctgacagccccagcagctacagcagcagcagcagcagcagcagcagcagcagcagcagcagcagcagcagcagcagcagcagcagcagcctgcacaatgagcaggtgctgcaggtggtggtgcccggcatcaacctgcctgtgaaccagctgacctacttcttcaccgctgtgctgatctctggagtggtgcatgaaattggacatggaattgctgccatccgggagcaggtgcgcttcaatggatttggcatcttcctgttcatcatctacccaggggcctttgtggacctcttcaccacccacctgcagctgatcagccctgtgcagcagctgcgcatcttctgtgccggcatctggcacaactttgtgctggccctgctgggcatcctggccctggtgctgctgcctgtgatcctgctgcccttctactacacaggagtgggcgtgctgatcacagaggtggccgaggacagccctgccatcggcccccggggcctgtttgtgggggacctggtgacccacctgcaggactgccctgtgaccaacgtgcaggactggaatgaatgtctggacaccatcgcctatgagccccagatcggctactgcatcagcgccagcaccctgcagcagctgtccttccctgtgcggggcgtgtacatcagcagcatctag

SEQ ID NO: 188239 - DNA, 1560 bp, Artificial Sequence
  derived and/or modified sequence
atgatccctgtgtccctggtggtggtggtggtgggcggctggacagtggtgtacctgacagacctggtgctgaagagctctgtgtacttcaagcacagctatgaggactggctggagaacaacggcctgagcatcagccccttccacatccgctggcagacagctgtgttcaacagagccttctacagctggggccgcaggaaggccaggatgctgtaccagtggttcaactttggcatggtgtttggagtgattgccatgttcagcagcttcttcctgctgggcaagaccctgatgcagaccctggcccagatgatggctgacagccccagcagctacagcagcagcagcagcagcagcagcagcagcagcagcagcagcagcagcagcagcagcagcagcagcagcctgcacaatgagcaggtgctgcaggtggtggtgcccggcatcaacctgcctgtgaaccagctgacctacttcttcaccgctgtgctgatctctggagtggtgcatgaaattggacatggaattgctgccatccgggagcaggtgcgcttcaatggatttggcatcttcctgttcatcatctacccaggggcctttgtggacctcttcaccacccacctgcagctgatcagccctgtgcagcagctgcgcatcttctgtgccggcatctggcacaactttgtgctggccctgctgggcatcctggccctggtgctgctgcctgtgatcctgctgcccttctactacacaggagtgggcgtgctgatcacagaggtggccgaggacagccctgccatcggcccccggggcctgtttgtgggggacctggtgacccacctgcaggactgccctgtgaccaacgtgcaggactggaatgaatgtctggacaccatcgcctatgagccccagatcggctactgcatcagcgccagcaccctgcagcagctgtccttccctgtgcgggcctacaagaggctggatggcagcacagagtgctgcaacaaccacagcctgacagatgtgtgcttctcctacagaaacaacttcaacaagaggctgcacacctgcctgcctgccaggaaggctgtggaggccacccaggtgtgcaggaccaacaaggactgcaagaagagcagcagcagcagcttctgcatcatccccagcctggagacccacaccaggctcatcaaggtgaagcaccccccccagattgacatgctgtatgtgggccaccccctgcacctgcactacacagtgtccatcaccagcttcatcccccgcttcaacttcctgagcattgacctgcctgtggtggtggagacctttgtgaagtacctgatcagcctgagcggggccctggccatcgtgaatgctgtgccctgctttgccctggatggccagtggatcctgaacagcttcctggatgccaccctgaccagcgtcatcggggacaatgatgtgaaggacctgattggcttcttcatcctgctgggcggctctgtgctgctggccgccaacgtgaccctgggcctgtggatggtgacagccaggtag

SEQ ID NO: 188240 - DNA, 4457 bp, Artificial Sequence
  derived and/or modified sequence
aaggcgcgcgcggtcagctgttggcggtgcagggaggaggacgccggggctcgccttccctcctctgccgccgctgccgccatgattccggtgtcgctggtggtggtggtggtgggtggctggactgtcgtctacctgaccgacttggtgctgaagtcatctgtctattttaaacattcttatgaagactggctggaaaacaacggactgagcatctcccctttccacataagatggcaaactgctgttttcaatcgtgccttttacagttggggacggcggaaagcaaggatgctttaccaatggttcaattttggaatggtgtttggcgtaattgccatgtttagctcattttttctccttggaaaaacgctgatgcagactttggcacaaatgatggctgactctccctcttcttattcttcctcctcttcttcctcttcctcctcttcttcctcttcctcttcttcatcttcttcctcttcctcgcttcacaatgaacaggtgttacaagttgtggttcctggtataaatttacccgtcaatcaactgacctatttcttcacggcagttctcattagtggtgttgtacatgaaattggacatgggatagcagctattagggaacaagttcgatttaatggctttgggatttttctcttcattatttatcctggagcatttgttgatctgttcaccactcatttgcaacttatatcgccagtccagcagctaaggatattttgtgcaggtatctggcataattttgtccttgcactcttgggtattttagctcttgttctcctcccagtaattctcttgccattttactacactggagttggggtgctcatcactgaagttgctgaggactctcctgccattggacccagaggcctttttgtgggagaccttgtcacccatctacaggattgtcctgttactaatgtgcaagattggaatgaatgtttagataccatcgcctatgagccccaaattggttactgtataagtgcatcaactttacagcagttaagtttcccagttagaggtgtgtatatttcctcaatataatataatgcttcaagcaccagtacctgccattcactaatccttaaaccatgtctatacatttattctgttctaatctgtttaaagcaaatcagtaaagtaaatagattccaaccaatagacatttttcttggtaagttggatgctaatatgtgtttcctttattatatattgttgaacttctaactattttcattatatcatatttaacttttaggactctaatattttctgctttcaaaacacttgtattaaatcatagccgggcgcagtggctcacgcctgtaatcccagcactttgggaggctgaggcgggcggatcacttgaggtcaggagttcatgaccaacctggccaacatagtgaaaccccatctctactaaaaatacaaaaattagcagggcatggtgacgggtgcctgtgatttcagctgctcgggagtctgaggcaggagaatcgcttgaacccgggaggtggaggttgcaatgagccgagatcgggacatggaaagagactctgtctcaaaaaaaaaaaaaaaaatcagcattcaaggtcaatcataaccaattaactaattccaataatcaaataccccaatataatattatctttatgcatgtctgtagatatattatagtactttaaacttttataattgaaaaagggaatataagtaataagaaccggttctactttgcataagcttatgtcagaacagataaacaacgatagttaacaactaaatatataaaaatcaaagcataaacattctgtattaatatattgttagcccaacacagacatgcaataaggaaagattacaagaaataagaaggaacttggcaaacaaaaaaccccatctgggatttagaaaaaattcccttacttcttaaaaattcccttaatacttaaacagttctagtggaatcagtgttggcatgtctgattctatctggggtagagttattttatgtattttatgtggcagccatcctaaagaagttgtcttggcttccaaaaataccatgtgaagtcagatatgttgctctgtgcagcagatgacagagctgaggcaagtttcttctcggatcctgccaaacttatttagagttatttcagctctgaaaaatcagcttcccaattctttatacaaaatcagcttcccaattctttatacaaaattggaggtgttagaaaatagaaattatgctcacagactatatctttaagtaaaaaaatatcctgatacttgtccacatctattggtgtagggaaatatgattaataatcaagaatagttttagtaaagtactgtgtgcaacacaggcaaagtagtaagaactgatttttttaaaaaaactttttaaaatttactcatttgtaagaatttttttattatcaaaaatgtttagacacgatggagaatatatttcctcaatataatataatgcttcaagcaccagtacctgccattcactaatccttagaccatgtctatagatttattctgttctaatctgtttaaagtaaatcagtaaagtaaatagattcaaaccaatagacatttttcttggtaagttggatgctaatatgtgtgtttcctttattatatattgttgaacttctaactattttcataatatcatatttaacttttaggactctaatattttctagtataaacgagcccacatgtatctttctgccagcttcggcagttattaacattttgccaattttttcatctaagcagtccacttttaggggaagtattttaaagtacatcccaggcatcctatcatttcatccataacctttcagcctgcctttaacggatgatgactcattaaacacgaccacaatactgttataattcctaacaaaataacactaatttctgatatctggttggtattcagttgtttctaattcttttcattatagttgatttaaattagttaggatgtcttctaagactttttaaatttgtaacaattttccttgacctgtttttgaaatgttatttttttgttgaagaaactgaggcatttgttttgttgaatttcctaaattctgggtttttctggttatatcttatcctcatgatgtcattaacttgttcagatgtcttccaattttctataaactgctaattaggtccatggcgttgattagattcagaatcctttttttttgtttgggttttttttttggcaaaaacacttcataaacagcgcttggtacttcctgtggcatcatattgcatccagtatctattgttctctgttttaatggtgttaagattgttcagtggagcaatctgattctttaaggttgaaatatttataaattttccccattctcaggagcctcttaccatcttccaaaacttttaagatgacagaagattaatatgtaatccacaatgtgttcttctttaaagaaatgatccattattttccacttcttaagtcctttatccttttcttttggtttctctaaatttgatgtaatgtgtattgaattacaaaaaccaaagtgacacactagttaaataaagttctcttcagtaggattgttttacttaggatatctgcattttcagatgtttagggttttatccttttcctgacagacagactgtaaataaaaattttccctgaaacactcagaaactctcttcttattaactgtttgagtatttcactgttgtggatcatgtgctacattttggaggtatttgtttaaatacctaaagcagatattactctttttatactacaatcaatccagaagtaattcttttttttttttttcaagccctgggctgtcccagcccaagagtaattcttcaatatctattttgtctcagtatacatgtttattttacatgattactatatctgataaatctgtgcctctatttaagcttttgaaaatggagtatgtatacttagccagtttaaaggagtattaatgtctgtaaatatcacttaaaatacatactatggctggtccaaatgcagttgtgcttacaattaattgaacacaaccagttacagaattctttgttccttctctattcccactacatcacttgactagccttaaaaaaaaaatacatactagattaattttgatggcaggcttagcccctgggtctgtggacatttaagaaagctatggattgatggtattttatatgtttctaggtaacttcgttatccttcattgtaagtaggagtgaaagatatggtcagatatactattacagagtgtccaatgatccaaaagttattcatgttcaatttagagtagaattcagtacacataactaaattctaggaatttataccatttcagagcaataaagccacctaggaaaga

SEQ ID NO: 188241 - DNA, 4428 bp, Artificial Sequence
  derived and/or modified sequence
agcggatgctggggctgtaaggcgcgcgcggtcagctgttggcggtgcagggaggaggacgccggggctcgccttccctcctctgccgccgctgccgccatgattccggtgtcgctggtggtggtggtggtgggtggctggactgtcgtctacctgaccgacttggtgctgaagtcatctgtctattttaaacattcttatgaagactggctggaaaacaacggactgagcatctcccctttccacataagatggcaaactgctgttttcaatcgtgccttttacagttggggacggcggaaagcaaggatgctttaccaatggttcaattttggaatggtgtttggcgtaattgccatgtttagctcattttttctccttggaaaaacgctgatgcagactttggcacaaatgatggctgactctccctcttcttattcttcctcctcttcttcctcttcctcctcttcttcctcttcctcttcttcatcttcttcctcttcctcgcttcacaatgaacaggtgttacaagttgtggttcctggtataaatttacccgtcaatcaactgacctatttcttcacggcagttctcattagtggtgttgtacatgaaattggacatgggatagcagctattagggaacaagttcgatttaatggctttgggatttttctcttcattatttatcctggagcatttgttgatctgttcaccactcatttgcaacttatatcgccagtccagcagctaaggatattttgtgcaggtatctggcataattttgtccttgcactcttgggtattttagctcttgttctcctcccagtaattctcttgccattttactacactggagttggggtgctcatcactgaagttgctgaggactctcctgccattggacccagaggcctttttgtgggagaccttgtcacccatctacaggattgtcctgttactaatgtgcaagattggaatgaatgtttagataccatcgcctatgagccccaaattggttactgtataagtgcatcaactttacagcagttaagtttcccagttagagcatacaaacgactagatggttcaactgaatgctgtaacaatcacagcctcacagatgtgtgcttttcctacagaaataattttaataagcgtttgcatacatgtcttcctgcccggaaagcagttgaagcaactcaagtttgcagaaccaataaagactgtaaaaaaagctcaagttcaagtttctgtataataccttctttggaaactcacactcgcttaataaaagtaaaacacccacctcagattgatatgttatacgtaggacatcctctgcatcttcactacacagtgagcatcaccagttttatcccacgttttaactttctaagcatagatctgccagtggttgtggagacatttgtcaagtacctgatttccctctcaggagctctggctattgttaatgcagtaccctgctttgctttggatggacaatggattctaaactctttcttggatgccacccttacctcagtgattggagacaatgatgtcaaagatctaatagggtttttcatcttgctgggtggcagtgtacttttggctgccaatgtgaccctgggactctggatggttacagcacggtaatgtttgcactcatctgacagaatccctgagttacagtatacagctatgtggtaatattcattgccattgaaattcttacttggtatgaaatataaagtgtttccttaaaattacatcttagccaacaaccctgagctcctcccatatccagagtacccaaactctgtggtagaagataagcagaagaaatgaaaggcatagtccctgactatattctaatttaggactgaatgtacccagatgcttgtggaataatatctaagcaagtgcaaattcatgtaataccgttttgtctgattacatattgtgttgaaatagtataaaggagaacagaactgggtggaattaattgggaaaaacttcttacaaaagcatcattaatcaaaatttgaaggagaccagactttggccaagtggaaggatgaccattgtcttggcctgtatctcttgtcctttgtcttgtttgaaaagtattttaaaacttaatggtgtattattttgtgctctgaaagctgaggtctgattacaattagtaaaattctatagaagaatctgctgacgtgaaagggaaaaatctttgtcaaatgataccaaataaatgaacaaaacaggaagtagggcctatgatatcgtgagacatgttttgccccacaagagttgcatcttttataaggtgtctctgccccctcataaagcagcactagctttgacatccacggtgagctgcaggaagcatcacacaccagcagcatgtgagcagagggaggcagttggggttgaacttcggaactaggccgggtctcctgacagatcacaagacaccccagaggatcttcagcagtcctacttcccattctctatagagctttgaagcttggaacccttccagggtaaacattttctcttgtgctgctcaggacatctggggcctagctcctgggttcctgtctccaagaagcaatgaccttaaactctgagccatactctgtcctcaccagcggctcccatgtttttctgtgtcaggttattaagtacctagtccttgttttctgtctctctcctaagctacctctctgggtccacagaagacttggtagtatagtgagaatggctatacgtgagtacaaacgtggattttccagggcttgggaactgattcttgagcccagaagagccacgcctgctttgaggtcttttggagtggagatgcagccctgggaaatttggggagtcagcaggccagtgtgaagctattggtcctaggagtatatgagcttgctgtttctttgatggaaaatacatgcttctcttgtatactcagaagtgactaagggcaataactcattaatagccatctatccaacttctttactgagtgatgtattccatggggttacctttttcagattattgagttgctctgtaagcactaaaactttttaatcatttttaagaaactttttagattgtattacaaatttgccttaacagtaattagatgttgaatataattttaacattttattaatgacttgggtcatcagttaataccagtactaaaaccatacgaattattggtttattccagaaaatacagtatttgttctatttttaggtagacaatcatttgggatcagagtacattagcatagtaatgctcagtcagacctgttcaagtagtagagcttggagaatgccatgaaatacttatataattaatttgattgcatgaactaagcaattttactaatgaaaaggttgtatatgtgcaagtcacttttttaaaaaccaagaaaaaactttaatagaggaaatcttattcattaatttatttttctgagtaaaaaaacgaaacccaaatctcattttatttcaactgttaaacattttgatctgttgacccataggatcaggatttgggaaccactttactaggaaagagcagatcagtaccatttgtataaaaccggcctcattatgtaagaaagaaaatgttacgtgttttcttctttagcttggttgtgggcacttctacagcaaggaccatatcatattcatctttgcatccctggcacagtgcatgagacataagtacttaataaatgcagttgaatggataatgattagtgttatttatggattagaaaaagcatgtttctatttaagtaagctgtaaaaagtattattgaatatttactgtaaatatatgttcacataaaaaaataacttggagggtctttgtgtccctggcatattatcatcttcatggaaagaatccactgtggtttctgtagagtgattggaaaaatggattattttgaggattgaagaaagtgttctttctgcgttgtcactttgttcaacagtaaaactttattctcagtgttcctactctgcattgtttacatttttgacagttttttttaatcacctacaatctgtaaagaatgtatatattcttttcagcatctcagtttgaaaagacatgcagttaaacttgaccttttgataatcgctcttacaggtcattgtctgttctaacagcaaattgtaaacatgtgcttcatagatattgtggctctcagtcatcactttgtcctatggtatttattgaatgttcacatactaatggtgcacaggtgtttttttctataaatcttctgactgtcctgtaattcattcttaagctttaacttgaaggtatcgtaattgccggcatttgatgtttagcaataaaagaataaatgtgtaccagcattttatgtttat

SEQ ID NO: 188242 - DNA, 993 bp, Artificial Sequence
  derived and/or modified sequence
atgatccccgtgagcctggtggtggtggtggtgggcggctggaccgtcgtgtatctaacagacctcgtgctgaaatcttccgtgtatttcaagcactcttacgaagactggttggaaaacaatggcttgtcaatcagcccatttcacattcggtggcagacagccgtcttcaacagagctttctatagctgggggcgccggaaagccaggatgctgtaccagtggttcaactttggcatggttttcggggtaatcgccatgttctccagttttttcctgttaggcaaaacgctgatgcaaaccctggcccagatgatggcagacagtccctcttcctactcttcatccagtagcagctcctctagcagttcatcctccagttccagcagctcaagctccagttcctcccttcataatgagcaggtgctgcaggtcgtcgtgcccggtattaatctacctgtaaaccagttgacctatttttttacagcagttctgatctctggggtcgttcacgaaataggccacgggatcgcagccatcagggagcaagtaaggtttaacggattcggtatcttcttgttcataatttacccgggggcctttgtggatttgttcacaactcatcttcaattaattagtcccgtgcaacagttgcggattttttgtgctggaatatggcacaatttcgtgttagccctgctcgggattctggctcttgtgctcctgccagtaatcctgctaccattctattatacaggggtgggggtcctgatcacagaggttgcagaggatagcccagccatcggcccacgcggtctgtttgtgggtgacctggtcacccacctccaggattgccctgtcacaaatgtgcaagattggaacgagtgtctggacaccatcgcctacgaaccccagatcggctactgtatcagtgcgtctacattgcagcagttgagcttccctgtgcggggggtatatatttcctctatctag

SEQ ID NO: 188243 - DNA, 1560 bp, Artificial Sequence
  derived and/or modified sequence
atgatccccgtgagcctggtggtggtggtggtgggcggctggaccgtggtgtacctcactgatctggtcctcaagagtagcgtctatttcaaacattcatacgaggactggctcgaaaataacgggctgtctattagcccctttcatatccggtggcagacagctgtgtttaatcgtgcgttctattcgtggggcagaaggaaagctcgcatgttgtatcagtggttcaacttcggtatggtctttggagtaatcgctatgttctccagcttctttctgctgggtaagaccctcatgcagaccctggctcagatgatggctgacagcccatcaagctatagcagtagttcctcgtctagcagctccagcagcagctctagctcttcctcttcttccagctccagctctcttcataacgagcaagttctgcaggtggtggtaccaggaatcaacttacctgtgaaccagttaacatattttttcactgcagtgctcatcagcggtgtggtacatgagattgggcatggaattgccgctattagagaacaagtgcggttcaatggttttggcatctttctcttcatcatctaccctggagcctttgtggatctcttcactacccacctgcagcttattagccccgtacagcagctcaggattttctgtgcggggatctggcacaatttcgtgctagctttgctgggcatacttgctctcgtgctgctgccagtgatactgctgcctttctactacaccggcgtaggtgtgctaatcacagaagttgcggaagactctcccgcaataggcccccgcgggttgttcgtaggagacctagtaacccatctccaggattgtcctgtcaccaatgtgcaggactggaatgaatgcctcgacactatagcctatgagccacagatcggatattgcataagtgctagtacactgcaacagttgagctttcctgtccgcgcctacaagcggctagacggtagtactgagtgctgcaataaccactctttaacggacgtgtgcttctcctatagaaataattttaacaagaggctgcatacgtgtctgcctgcccgcaaggctgtagaagccacacaagtgtgtagaaccaacaaagattgcaaaaaaagttcgtctagctctttttgcatcatcccgtccttggaaacccacactaggctgataaaggttaaacatcctccacaaatcgacatgttgtacgtggggcaccccctgcatctgcactacacagtctcaatcacatccttcataccccgctttaacttcctgagtattgacctacccgtggtggttgagacctttgtgaaatatctcatctctctctctggcgccctggcaatcgtgaacgctgtcccgtgtttcgctttggatgggcaatggatactgaattcattcctcgatgccaccttgactagtgtcatcggagataacgacgtgaaggatctgattggattttttatcctcctgggcggtagcgtactgctcgctgctaatgttaccctgggcctctggatggtgacagctcggtag

SEQ ID NO: 188244 - DNA, 993 bp, Artificial Sequence
  derived and/or modified sequence
atgattccggtctccctggtggtggtggtggtgggagggtggactgtggtgtatctgactgacctcgttctgaaaagctctgtgtatttcaagcactcatacgaggactggttggaaaataacgggctgtcaatctccccttttcatatcaggtggcagactgccgtgtttaaccgcgctttctactcgtggggcaggcgtaaagctagaatgctgtaccagtggttcaattttggaatggtttttggtgtgatcgccatgttcagtagcttctttttgttggggaagaccctgatgcagacacttgctcaaatgatggccgatagcccatcttcgtactcctctagctctagcagctcaagctcctcctcttcctcatcttccagttcatctagttctagcagcagtttgcacaatgagcaagtgctgcaggtggttgtccccggtataaatctccccgtgaatcagcttacctatttcttcaccgcagttctcatatcgggagtggtgcacgagattgggcacggcatcgccgctattagagaacaggtccggtttaacggctttgggatattcctgttcataatttaccctggagctttcgtggatttgtttacgacacaccttcaactgataagccctgtacaacagctccgcattttttgtgctgggatatggcataattttgtcctcgccctgttgggaattctggctctagtgcttctgccagtcatccttttgcctttttattacaccggtgttggtgtgctgataactgaagttgcggaagactcacccgcaatcgggccaagaggactctttgttggcgaccttgtgacacacctccaggattgtccagtgaccaatgtgcaggactggaatgagtgcttggacaccattgcatacgaacctcaaattggatattgtattagcgcctccacccttcagcagctgtccttccctgtgagaggggtgtatatttcttctatctag

SEQ ID NO: 188245 - DNA, 1560 bp, Artificial Sequence
  derived and/or modified sequence
atgattcccgtttccctggtcgtggttgtcgtgggcggatggactgttgtctatctcaccgacttagtgctgaagtcatccgtctacttcaaacactcatatgaagactggttggagaacaacggtttgagtatttccccctttcacatcagatggcaaactgcagtcttcaatagagccttttatagctggggtagaaggaaagctaggatgctgtaccaatggttcaacttcggcatggtgtttggggtcattgccatgttctccagcttcttcctactcgggaaaacccttatgcaaaccttggcgcagatgatggccgactctccttcctcttatagcagcagctcaagctcttcatcatcaagctcttcatctagcagttcttcctcaagttccagcagctcattgcacaatgagcaagtcctgcaggtcgtagtccctggcattaacctgcccgtgaatcagctgacctacttcttcaccgccgtcctgatctctggggtggtccacgagattggtcacgggattgctgccatccgcgagcaggttcgcttcaacgggtttggcatctttctattcattatctatccaggggcttttgtagatctcttcacgacccaccttcaactaatctcacccgtgcagcagctcaggattttctgcgccggaatatggcacaacttcgtcctcgcactgctagggatactagctttggtgctcctgcccgtgatactgttgcctttttattacaccggcgtgggtgttctgattaccgaagtggctgaggactcgccagcgatagggcctagaggtcttttcgtcggcgacctcgtgacacacctccaggattgtccagtcaccaatgtccaggactggaacgagtgtctcgatacaattgcttatgaacctcaaattggatattgtatttctgcatccacccttcagcaactgtcatttcctgttagagcttacaagagattggacggcagcacagaatgctgtaacaatcattcattgactgacgtttgtttttcctacagaaataactttaacaagagactgcatacgtgtctgcctgccaggaaggccgttgaagcaacacaagtgtgccgaacaaataaggactgtaaaaaaagttcgtcttctagcttctgcatcattccatctctggagacacatacacggttgataaaggtcaaacacccacctcagattgacatgctctacgtcgggcaccccctgcacctgcactacaccgtgagtatcacgtccttcattccgaggttcaactttctgtcaatagacctgcccgtggttgtcgagacttttgtgaagtacttgatcagcctgtccggagcattggctattgtgaacgccgtgccatgtttcgctcttgacggccagtggatcctcaattcattccttgacgccaccctcacttccgtcattggcgataacgacgtgaaggacctcataggctttttcatcctgctgggagggtctgtccttctggctgctaacgtcactctggggctctggatggtaacggctagatag

SEQ ID NO: 188246 - DNA, 993 bp, Artificial Sequence
  derived and/or modified sequence
atgatccccgtgagcctggtggtggtggtggtgggcggctggaccgtggtgtacctgaccgacctggtgctgaagagcagcgtgtacttcaagcacagctacgaggactggctggagaacaacggcctgagcatcagccccttccacatcagatggcagaccgccgtgttcaacagagccttctacagctggggcagaagaaaggccagaatgctgtaccagtggttcaacttcggcatggtgttcggcgtgatcgccatgttcagcagcttcttcctgctgggcaagaccctgatgcagaccctggcccagatgatggccgacagccccagcagctacagcagcagcagcagcagcagcagcagcagcagcagcagcagcagcagcagcagcagcagcagcagcagcctgcacaacgagcaggtgctgcaggtggtggtgcccggcatcaacctgcccgtgaaccagctgacctacttcttcaccgccgtgctgatcagcggcgtggtgcacgagatcggccacggcatcgccgccatcagagagcaggtgagattcaacggcttcggcatcttcctgttcatcatctaccccggcgccttcgtggacctgttcaccacccacctgcagctgatcagccccgtgcagcagctgagaatcttctgcgccggcatctggcacaacttcgtgctggccctgctgggcatcctggccctggtgctgctgcccgtgatcctgctgcccttctactacaccggcgtgggcgtgctgatcaccgaggtggccgaggacagccccgccatcggccccagaggcctgttcgtgggcgacctggtgacccacctgcaggactgccccgtgaccaacgtgcaggactggaacgagtgcctggacaccatcgcctacgagccccagatcggctactgcatcagcgccagcaccctgcagcagctgagcttccccgtgagaggcgtgtacatcagcagcatctag

SEQ ID NO: 188247 - DNA, 1560 bp, Artificial Sequence
  derived and/or modified sequence
atgatccccgtgagcctggtggtggtggtggtgggcggctggaccgtggtgtacctgaccgacctggtgctgaagagcagcgtgtacttcaagcacagctacgaggactggctggagaacaacggcctgagcatcagccccttccacatcagatggcagaccgccgtgttcaacagagccttctacagctggggcagaagaaaggccagaatgctgtaccagtggttcaacttcggcatggtgttcggcgtgatcgccatgttcagcagcttcttcctgctgggcaagaccctgatgcagaccctggcccagatgatggccgacagccccagcagctacagcagcagcagcagcagcagcagcagcagcagcagcagcagcagcagcagcagcagcagcagcagcagcctgcacaacgagcaggtgctgcaggtggtggtgcccggcatcaacctgcccgtgaaccagctgacctacttcttcaccgccgtgctgatcagcggcgtggtgcacgagatcggccacggcatcgccgccatcagagagcaggtgagattcaacggcttcggcatcttcctgttcatcatctaccccggcgccttcgtggacctgttcaccacccacctgcagctgatcagccccgtgcagcagctgagaatcttctgcgccggcatctggcacaacttcgtgctggccctgctgggcatcctggccctggtgctgctgcccgtgatcctgctgcccttctactacaccggcgtgggcgtgctgatcaccgaggtggccgaggacagccccgccatcggccccagaggcctgttcgtgggcgacctggtgacccacctgcaggactgccccgtgaccaacgtgcaggactggaacgagtgcctggacaccatcgcctacgagccccagatcggctactgcatcagcgccagcaccctgcagcagctgagcttccccgtgagagcctacaagagactggacggcagcaccgagtgctgcaacaaccacagcctgaccgacgtgtgcttcagctacagaaacaacttcaacaagagactgcacacctgcctgcccgccagaaaggccgtggaggccacccaggtgtgcagaaccaacaaggactgcaagaagagcagcagcagcagcttctgcatcatccccagcctggagacccacaccagactgatcaaggtgaagcaccccccccagatcgacatgctgtacgtgggccaccccctgcacctgcactacaccgtgagcatcaccagcttcatccccagattcaacttcctgagcatcgacctgcccgtggtggtggagaccttcgtgaagtacctgatcagcctgagcggcgccctggccatcgtgaacgccgtgccctgcttcgccctggacggccagtggatcctgaacagcttcctggacgccaccctgaccagcgtgatcggcgacaacgacgtgaaggacctgatcggcttcttcatcctgctgggcggcagcgtgctgctggccgccaacgtgaccctgggcctgtggatggtgaccgccagatag

SEQ ID NO: 188248 - protein, 1555 aa, Artificial Sequence
  derived and/or modified sequence
MSEQTPAEAGAAGAREDACRDYQSSLEDLTFNSKPHINMLTILAEENLPFAKEIVSLIEAQTAKAPSSEKLPVMYLMDSIVKNVGREYLTAFTKNLVATFICVFEKVDENTRKSLFKLRSTWDEIFPLKKLYALDVRVNSLDPAWPIKPLPPNVNTSSIHVNPKFLNKSPEEPSTPGTVVSSPSISTPPIVPDIQKNLTQEQLIRQQLLAKQKQLLELQQKKLELELEQAKAQLAVSLSVQQETSNLGPGSAPSKLHVSQIPPMAVKAPHQVPVQSEKSRPGPSLQIQDLKGTNRDPRLNRISQHSHGKDQSHRKEFLMNTLNQSDTKTSKTIPSEKLNSSKQEKSKSGEKITKKELDQLDSKSKSKSKSPSPLKNKLSHTKDLKNQESESMRLSDMNKRDPRLKKHLQDKTDGKDDDVKEKRKTAEKKDKDEHMKSSEHRLAGSRNKIINGIVQKQDTITEESEKQGTKPGRSSTRKRSRSRSPKSRSPIIHSPKRRDRRSPKRRQRSMSPTSTPKAGKIRQSGAKQSHMEEFTPPSREDRNAKRSTKQDIRDPRRMKKTEEERPQETTNQHSTKSGTEPKENVENWQSSKSAKRWKSGWEENKSLQQVDEHSKPPHLRHRESWSSTKGILSPRAPKQQQHRLSVDANLQIPKELTLASKRELLQKTSERLASGEITQDDFLVVVHQIRQLFQYQEGVREEQRSPFNDRFPLKRPRYEDSDKPFVDSPASRFAGLDTNQRLTALAEDRPLFDGPSRPSVARDGPTKMIFEGPNKLSPRIDGPPTPASLRFDGSPGQMGGGGPLRFEGPQGQLGGGCPLRFEGPPGPVGTPLRFEGPIGQAGGGGFRFEGSPGLRFEGSPGGLRFEGPGGQPVGGLRFEGHRGQPVGGLRFEGPHGQPVGGLRFDNPRGQPVGGLRFEGGHGPSGAAIRFDGPHGQPGGGIRFEGPLLQQGVGMRFEGPHGQSVAGLRFEGQHNQLGGNLRFEGPHGQPGVGIRFEGPLVQQGGGMRFEGPSVPGGGLRIEGPLGQGGPRFEGCHALRFDGQPGQPSLLPRFDGLHGQPGPRFERTPGQPGPQRFDGPPGQQVQPRFDGVPQRFDGPQHQQASRFDIPLGLQGTRFDNHPSQRLESVSFNQTGPYNDPPGNAFNAPSQGLQFQRHEQIFDSPQGPNFNGPHGPGNQSFSNPLNRASGHYFDEKNLQSSQFGNFGNIPAPMTVGNIQASQQVLSGVAQPVAFGQGQQFLPVHPQNPGFVQNPSGALPKAYPDNHLSQVDVNELFSKLLKTGILKLSQTDSATTQVSEVTAQPPPEEEEDQNEDQDVPDLTNFTVEELKQRYDSVINRLYTGIQCYSCGMRFTTSQTDVYADHLDWHYRQNRTEKDVSRKVTHRRWYYSLTDWIEFEEIADLEERAKSQFFEKVHEEVVLKTQEAAKEKEFQSVPAGPAGAVESCEICQEQFEQYWDEEEEEWHLKNAIRVDGKIYHPSCYEDYQNTSSFDCTPSPSKTPVENPLNIMLNIVKNELQEPCDSPKVKEERIDTPPACTEESIATPSEIKTENDTVESV

SEQ ID NO: 188249 - protein, 784 aa, Artificial Sequence
  derived and/or modified sequence
MSEQTPAEAGAAGAREDACRDYQSSLEDLTFNSKPHINMLTILAEENLPFAKEIVSLIEAQTAKAPSSEKLPVMYLMDSIVKNVGREYLTAFTKNLVATFICVFEKVDENTRKSLFKLRSTWDEIFPLKKLYALDVRVNSLDPAWPIKPLPPNVNTSSIHVNPKFLNKSPEEPSTPGTVVSSPSISTPPIVPDIQKNLTQEQLIRQQLLAKQKQLLELQQKKLELELEQAKAQLAVSLSVQQETSNLGPGSAPSKLHVSQIPPMAVKAPHQVPVQSEKSRPGPSLQIQDLKGTNRDPRLNRISQHSHGKDQSHRKEFLMNTLNQSDTKTSKTIPSEKLNSSKQEKSKSGEKITKKELDQLDSKSKSKSKSPSPLKNKLSHTKDLKNQESESMRLSDMNKRDPRLKKHLQDKTDGKDDDVKEKRKTAEKKDKDEHMKSSEHRLAGSRNKIINGIVQKQDTITEESEKQGTKPGRSSTRKRSRSRSPKSRSPIIHSPKRRDRRSPKRRQRSMSPTSTPKAGKIRQSGAKQSHMEEFTPPSREDRNAKRSTKQDIRDPRRMKKTEEERPQETTNQHSTKSGTEPKENVENWQSSKSAKRWKSGWEENKSLQQVDEHSKPPHLRHRESWSSTKGILSPRAPKQQQHRLSVDANLQIPKELTLASKRELLQKTSERLASGEITQDDFLVVVHQIRQLFQYQEGVREEQRSPFNDRFPLKRPRYEDSDKPFVDSPASRFAGLDTNQRLTALAEDRPLFDGPSRPSVARDGPTKMIFEGPNKLSPRIDGPP

SEQ ID NO: 188250 - DNA, 4668 bp, Artificial Sequence
  derived and/or modified sequence
atgagcgagcagacacccgctgaagcgggggcagctggcgcacgcgaagacgcttgccgggactaccagtcctcactggaagacctaaccttcaattctaagcctcatatcaatatgctgacaattttggctgaggaaaacctgccttttgctaaggagatcgtctcgttgattgaggcacagaccgcaaaagcaccatcctctgaaaagctcccagtgatgtacttaatggattcaattgtcaaaaatgtgggtcgcgagtatcttactgctttcactaaaaatcttgtggctaccttcatctgtgtgtttgaaaaagtggatgaaaatacccgaaaaagcctatttaagctccggtcaacatgggatgaaatcttccccctgaaaaaattgtatgctctggacgtgagagtcaatagcctggatccagcatggcctatcaagccactccctcctaatgtgaacacatctagcatccatgtcaaccctaaattcttaaataagtcccctgaggaaccgtcgacgccaggcaccgttgtcagttcaccatccataagtaccccacctattgtccctgacatacaaaagaatctcacacaggaacagctaatacgccagcagctattagctaagcaaaaacaactattggagcttcagcagaagaagctcgaactggaacttgagcaggcaaaagcacagctcgctgtctctctctccgttcagcaggaaacctcgaatttaggacctgggtccgccccctccaaactacatgtctcgcagatcccccctatggctgtgaaggcccctcaccaggtgcctgtgcagtccgagaagtctaggccaggaccctctctccaaatccaagatctaaagggtactaacagagatcctcggctgaataggatctcacagcacagccacggtaaagatcaaagccataggaaggagttccttatgaataccctcaaccagagcgacactaagaccagcaaaaccataccttcggagaaactcaactcatccaagcaggagaagtcaaaatctggcgagaagatcacaaaaaaagaactggatcaactagattctaagtccaaatctaaaagtaaatcgcctagtcctctgaagaataaattgtctcatacaaaggacctcaagaaccaggagagcgagtcaatgagattaagcgacatgaacaaaagggatcccaggctcaagaagcacctgcaggacaagaccgatggaaaagacgatgacgtgaaggaaaaacgaaagactgccgagaagaaggataaagacgaacatatgaaatcatccgagcataggctggccggttcgagaaacaaaattataaacggtatagtgcagaagcaggacacgattactgaggaaagtgaaaaacaggggaccaagcccggaagatcctctacacggaagcgtagcagatcaaggagtccgaagagtaggagccctattattcattccccaaagcggcgcgataggcgatcacccaaaaggcgtcagcgtagtatgtccccgactagcacacctaaagctggaaagatccggcaatcaggggcgaagcagagccacatggaggagttcaccccccccagtagagaggataggaatgcaaaaaggtcgacgaaacaggacattagggatcctcggagaatgaaaaagacagaggaggagcgaccacaagaaactacaaaccagcatagtacgaaatccggaaccgaacctaaggagaatgttgagaactggcagtcgagtaaatcagcgaagcgatggaaatccggctgggaagagaataaaagtttgcagcaagtcgacgagcattctaagcccccccacttacgccacagggaatcctggtcatccaccaaaggaatcctcagccctcgcgctcccaagcagcagcagcataggctgtcagtcgacgccaatctgcagattccaaaagaactcaccctggccagcaagcgcgagctgttacagaaaacatccgagcggctcgcctccggtgaaatcacccaggacgacttcctggtggtcgtacaccagatccgtcaattattccagtatcaggagggcgttcgggaagaacagaggtctcctttcaacgatcggttccccttgaaaagacccaggtacgaagattcagataaaccgttcgtagactcacccgccagccggttcgccggattggatacgaaccagcgcctcactgccctcgctgaggatcggccgctgtttgatggaccctcaaggccgagcgtggcgcgtgatggacctaccaaaatgatcttcgagggcccaaataagctgagcccaagaatcgacggcccccctacccctgcatccctcaggtttgacggctcacctggtcagatggggggcggtgggcccttgagattcgaggggccgcaggggcaactgggcggtggctgcccactgcgatttgaggggccccccggccctgtgggtactccactgagatttgaaggcccaattggccaagccggtggaggcgggtttagatttgaagggtccccggggttacggttcgaaggatcacctggaggattgcgctttgaggggcccggcgggcaaccagtaggcggcctacggtttgaaggccaccggggccaaccagtgggtgggctgcggtttgaaggtcctcacggccagccggtggggggactgcgcttcgacaacccccgcgggcagccggtggggggactcagattcgagggaggtcatggccctagcggagccgctatacgcttcgatggaccacacggccagcctggaggcggaatccgctttgagggacccctgttacagcagggcgttggcatgcggttcgaaggaccccacgggcaaagcgtggcaggccttcgttttgagggccagcataaccagctcggagggaatttgcggttcgagggaccacacggacagccgggcgtcggaatccgcttcgagggaccactggtccagcaaggaggcggcatgcggtttgaaggacccagtgtccccggaggaggactccgaatcgagggacctttaggccaaggaggtccacggttcgaaggatgtcacgccctccgctttgatggacaacccggccagccatctctccttccacgctttgatgggctgcacgggcagcctggtccgcggttcgagaggactcctggccagccaggaccacagcgctttgatgggcccccaggccagcaggttcagcctcgctttgacggggttccacagcgctttgacggaccccagcatcaacaggcgagcagatttgacattcctctcgggcttcagggaactcggttcgataaccacccttcgcagcgactggaaagcgtgagtttcaatcaaactggcccttacaacgatccgccaggcaacgcttttaacgctccctcacagggactgcagttccagagacacgaacagatatttgactcaccacaaggccctaactttaatgggcctcacggcccaggcaatcagagttttagcaaccccttgaaccgtgcttccggacactacttcgacgaaaagaatctccaaagttcacaatttggtaatttcggcaacattcctgccccaatgaccgtgggcaacatccaggcaagtcagcaagtcctgtccggggtggctcagccagttgccttcggacagggacagcagtttctcccggtacacccacagaacccaggctttgtgcagaacccttccggcgcgttaccaaaggcttatccagacaaccacctgagtcaggtcgatgtgaacgagcttttctctaagcttctgaaaactggcatcctgaagctctctcagacagacagtgctaccacccaggtttccgaagtgaccgcccagcctccccccgaagaagaagaagatcagaatgaagatcaggatgttcctgatctgaccaattttacagtggaggaactgaaacagaggtatgacagtgttattaatcggctttataccggcattcaatgttactcgtgtggaatgagattcacgacctcacagactgacgtctacgctgaccacctggactggcactaccggcaaaaccgcactgaaaaagatgtgagtagaaaagtcacccaccgaagatggtattatagcctaaccgattggattgagttcgaggagatcgcggatctggaggagcgtgcaaagagccagttcttcgaaaaagtgcacgaggaggtagtgcttaagacacaggaggcagccaaagagaaggaatttcagtctgtccctgcgggtcccgcgggcgccgtggaatcatgcgaaatctgtcaggagcagtttgagcagtattgggacgaggaagaggaggagtggcatctcaagaatgccatcagggtagacggaaagatctatcatccctcgtgttacgaggattaccagaacaccagctcgttcgactgtaccccatcccctagtaaaacaccagtcgagaatccattgaatatcatgctcaatatcgtgaagaacgaacttcaggaaccctgcgactctcccaaggtcaaagaagagagaatagacacacctcctgcctgcactgaagagtccatagcaacaccaagcgagatcaagactgaaaatgacaccgtagagagcgtttag

SEQ ID NO: 188251 - DNA, 2355 bp, Artificial Sequence
  derived and/or modified sequence
atgtccgagcagacccctgctgaggctggagccgccggcgcccgggaagatgcttgccgagattaccaatctagcctagaagacctgaccttcaactctaaaccccacatcaatatgctaacaattcttgccgaggagaacctgcctttcgctaaagagattgtttccctgatagaggcccagaccgcaaaagcaccctcctcggagaagctaccagttatgtacctcatggattccattgttaaaaatgttggcagggaatatctcaccgcatttactaagaatctcgtggccacttttatctgtgtgttcgagaaagtggacgagaatacgcggaaatctctgttcaagcttagatcaacctgggacgaaattttcccgctcaaaaaactgtatgcactggacgtcagggtcaacagcctcgacccagcctggcccattaaacccttgcctcccaatgtgaacacaagcagcattcacgtcaatcctaagtttctgaacaaaagtccagaagagccttccactcccggcaccgtggtctcaagcccgtccattagcacacctcccatagtgcccgacatccaaaagaatctgacccaggagcaactcatccggcagcagctgctcgcgaagcaaaagcagctgctagaattgcagcagaagaagctagaactggaattagagcaggccaaggctcagctggctgtctcactgtctgttcagcaggaaacaagtaacctgggtcctgggtccgccccatctaaactgcacgtatctcaaatccctcctatggcagtcaaagctccccaccaggtcccggtgcagagtgagaaaagcagacccggacctagtctacagatccaggatttgaaaggaactaaccgggatccaaggctcaaccgcatttcccagcattctcacggtaaagaccagtctcaccgaaaggagttcctgatgaacactttgaaccagagcgacaccaagaccagtaagaccattccctcagagaagctgaattctagcaaacaggagaaaagcaaatccggggagaagatcactaagaaggagttggaccagttagatagtaagtcaaagagcaaatccaaaagcccctctccactgaagaacaagttgagccataccaaggacttgaaaaatcaggaaagtgagagcatgcggctatcagatatgaacaaacgcgacccccggctgaaaaagcatttgcaagataagacagacggcaaagacgacgatgtgaaagagaagcgcaagacagccgagaagaaagacaaagacgaacacatgaagtcatccgaacatcggttggcgggttcgcggaacaaaattatcaatggcatcgtgcagaagcaggacaccattacagaagaatcggagaagcaggggacaaaacctggtagatcttcaacccgcaagcggtcacgctcccgttctcccaagtcgcggtccccaataattcactcaccaaaaagacgggatagacgctcacccaaaagacgacaacgttcaatgtcccctacgtctacccctaaggccggaaaaattcggcaatcaggagcgaagcagagtcatatggaagagttcacccccccctcacgtgaggaccggaacgcaaagcgcagtacaaagcaagacatacgcgacccacgacgcatgaagaagaccgaagaagagaggccccaggagaccacaaaccagcactcaaccaagtctggaacagaaccaaaagagaacgtggagaattggcagagtagcaagtctgccaaaaggtggaagtctggctgggaagagaataagtcactgcagcaggtcgatgagcattccaagccgccacatctgcgtcaccgcgagagctggtcctctaccaaggggatcctgtctcccagagcaccaaagcagcagcagcatagactcagcgtcgatgctaatctccagatcccaaaggaactgacgctcgctagcaagcgggagttgttgcagaagacatccgagcgccttgcatctggggagatcacccaagacgattttctggtggtggtccatcaaatccgacagcttttccagtaccaggagggggtgagggaggagcaaaggtctccattcaatgaccgctttccgctcaagaggccccgttacgaagatagcgataaaccctttgtcgattcccctgcaagcagatttgccggtttggacaccaaccaaagactgacagccctagcagaggatcggcctctctttgacgggcctagtcggccctctgtggcccgagatggaccaactaagatgatttttgaagggcccaataagttgtcacccagaatagatggtccaccctag

SEQ ID NO: 188252 - DNA, 7677 bp, Artificial Sequence
  derived and/or modified sequence
ggccggagaagaaggcggtgccagggcgtcctgcggaagggccgggggcggggctcgtgacgttgccgggacagccaatcacgcctggttttatcagtggccccgcccttttaccgcacatttcccctcccctagttcatttcgcacgacgcagcggttgggaacacagacattttcggagctggagccgccactgccgccgccattttgtgtctgtggagaaagaagcttctgtggcggctggaagtggacggagatcacccgcgagacggcggcgtttcatacccgaggttccccctgtgtcgtcccccatcccccctccgcggtcagcatgtggtgaagccggagccgcgagagagccggggagaggaagaggagtcggaagggaggcggggtatccagagcggcttcagcttcagctgcagcggacctcggaggggggccgcggcgcaatgtcagagcagacgccggccgaggccggtgctgcgggggcccgggaggacgcctgtcgggattatcagtcatcgctcgaagacctgaccttcaatagcaagccgcacatcaatatgctgaccattctagccgaggagaacctgcccttcgccaaggagatcgtctctctcatcgaggcccaaaccgccaaggctccttcctcagagaagcttcctgttatgtaccttatggattctattgtgaaaaacgttggaagagagtatctcactgcctttactaaaaatctagttgcaacatttatttgtgtgtttgaaaaggtggatgaaaatactaggaaaagtttatttaagttacgttctacatgggatgaaatattccctttgaagaaactttatgccctggatgtcagagtcaattcattagatcctgcttggcctattaaacctctaccccccaatgtgaatacgtctagcatccatgtgaatcctaaatttttaaataaatcgcccgaggagccttcaacacctggtacagtggtcagttcccctagcatctccactcctccaattgttcctgatatacaaaagaatcttacacaagaacaactaataaggcagcagttactggcaaagcaaaaacagttgttagaacttcagcagaaaaagctggagcttgagctagagcaagctaaggcacagttggcagtttctcttagtgttcagcaggaaacatccaatttaggtcctggatctgcaccatccaaattacatgtttcacagattccccctatggcagttaaagctcctcatcaggttcctgtgcaatctgagaaaagccgtccaggaccatccttacaaattcaggatttaaaaggaactaaccgggatcctcgtctgaacaggataagccaacattctcatggaaaagatcagagtcacaggaaagaatttctaatgaacacattaaaccagtctgatactaagacaagtaaaactataccctctgaaaaactaaattcatccaagcaagaaaaaagtaaatcaggtgaaaaaataaccaagaaagaacttgaccaattagattctaaatcgaaatcgaaatcgaaatcaccctcacctttgaaaaacaaattatctcacacaaaagacttgaaaaatcaagaatcggaaagtatgaggttgtctgatatgaacaagagagatccaagattaaaaaaacatcttcaggataagaccgatggcaaagatgatgatgtgaaagagaagagaaaaactgcagaaaaaaaggataaagatgagcacatgaagtcatccgaacacagactggctggaagtagaaataaaatcataaatggcattgtacaaaaacaggatacaataacagaagagtcagaaaaacaggggacaaaaccagggagatcgagtactagaaagcgatcaagatctcgatcacccaagtctaggtcaccaattatacattccccaaagagaagagataggcggtcacccaaacgaaggcaaagaagtatgtctccaacatcgacacctaaagctggaaagattcgccaatctggagctaagcagtcacatatggaagagtttacaccaccttctagggaagacagaaatgctaagagaagtactaaacaggatattcgggatccaaggcgaatgaaaaagactgaagaggagcgaccacaagaaactacaaatcagcattctacaaagtcaggcactgaaccaaaggagaatgtagaaaactggcaaagttccaagtctgccaaaagatggaaatctggttgggaagaaaataaaagcttacaacaggttgatgaacatagtaaacctcctcatctgaggcatagggagagctggtcaagcactaaaggaattttatcacctcgagccccaaagcagcaacagcatcgattaagtgtagatgccaatcttcagattcctaaagagttaactcttgcaagcaaaagagaattacttcaaaagacgagtgaacgtttagcatctggtgaaattacacaggatgacttccttgttgttgtgcatcaaattcgacagctatttcagtatcaagaaggtgtgcgagaagagcagagatctccattcaatgatcgttttccacttaagcgacctcgatatgaagattcagataaaccatttgtagatagtccagcatcaagattcgccggcctggatacaaatcagcgacttacagctttagctgaagacagaccgttatttgatggacctagtaggccatcagtagcaagagatggcccaacgaagatgatttttgaaggacccaataaattaagccctcgaattgatggacctcccacaccagcttctcttcggtttgatgggtcaccaggacaaatggggggaggaggccctttgagatttgaggggccacaaggtcagctaggaggtgggtgtcctttgagatttgaaggtcctccaggaccagtggggacacctctgcggtttgagggcccaattggtcaagcaggaggaggtggttttcggtttgaaggttcccctggtctgaggtttgagggatctccaggtggtttgagatttgagggaccaggaggccagcctgtgggtggtctgaggtttgagggacatcgtggtcaacctgtgggtggtctaaggtttgagggacctcatggtcagcctgtgggtggacttagatttgataatccccgaggtcagcctgtaggtggacttagatttgaggggggtcatggtccatcaggggctgcgattaggtttgatggacctcatggtcagccaggaggtggaatcagatttgagggccctttgctacagcaaggggttggaatgaggtttgagggcccccatggtcagtcagtagctggtctgagatttgagggacaacataatcaacttggtgggaaccttaggtttgagggtccacatggtcagccaggggttggtatcaggtttgaaggccctttagtccaacaaggaggtggaatgaggtttgagggtccttctgtaccaggaggtggcctgagaattgaagggcctctgggtcaaggtggtccaagatttgaaggttgtcatgctttaaggtttgatgggcagccaggtcagccgtcactcttgccaagatttgatggattacatggtcagccaggtcctagatttgaaaggactcctggtcagccaggccctcagaggtttgatggaccacctggacagcaggttcaacccagatttgacggtgtacctcaaagatttgatggtccacaacatcagcaagcatcaaggtttgatattcctcttggtcttcaaggcacaagatttgacaatcatccttcacaaaggcttgaatcagtatctttcaatcagactggtccatataatgatccacctggcaatgcttttaatgccccatcccaaggactacagttccaaagacatgaacaaatatttgattcacctcaaggaccaaattttaatggaccacatggccctggaaaccagagtttctctaatccacttaacagagcttctggacactattttgatgaaaaaaatcttcagagttctcaatttggaaactttggcaatatacctgctccaatgacagtaggaaatattcaggcatctcaacaggttctgagtggtgttgctcagccagtagcttttggtcaaggacaacagtttttaccagttcatccacaaaatcctggatttgttcagaatccttcaggagccctccctaaggcatatcctgataatcatctcagtcaggtggatgtaaatgaattgttttcaaaattgctaaaaacaggaattctcaaattgtcccaaactgattcagctacaacacaagtaagtgaagtaactgctcagcctccccctgaagaggaggaagatcaaaatgaagatcaagatgttccagatcttactaattttacagttgaagaattgaaacaacgttatgacagtgttataaatcgactgtacactggtattcagtgttactcttgtggaatgaggtttacaacatcacagacagatgtttatgcagatcatttggactggcattatcggcaaaatagaactgaaaaggatgttagccgaaaagtcactcatagacgttggtactacagtttaacagactggatagaatttgaggagatagctgatctggaagaacgggcaaagagccagttttttgaaaaggtgcatgaagaagttgtgctcaaaactcaagaggctgctaaagaaaaagagttccaaagtgtacctgctggaccagctggagcagttgagagttgtgaaatctgtcaagaacaatttgaacaatactgggatgaagaagaggaggaatggcatttgaaaaatgctattagagtagatggaaagatttatcatccatcatgttatgaagattatcaaaatacatcttcatttgattgtacaccatctcccagcaagacaccagttgaaaaccccttgaatattatgttgaacattgtcaaaaacgaattgcaggaaccctgtgacagtcccaaagttaaggaagaacgaattgatacaccaccagcttgtacagaggaaagcatagcaacaccctctgaaattaaaacagaaaatgacacagtcgagtcagtttaaataaaatgagaaaggtatgtttttcttttttaaaaaagctgctgttggatctagaaggtgaagaatttttttatgtatatatagacatatctatataaattgtctggctgaggcagggccttcagctatcatttggttaataaatacattttagtatttgcatttcctactgcctgcagagtttcaggtgcttgttgtgtgaaagttctgtagatgtgtgcaaatttaacgaaatgaaattgtatgtgtaaaaatgtacgatttttcactgtgcaactgtaaattataaataaaaaatatttttgctattcatggagtgtaatatttatgcacaccatcaaatagtttctgtactttttattgggtaaaaatggaattgaacagcaacctcaacataagattttttttctagtagcctcccactgattaaagaagcaagtttgaggtttcatccttcaaaagggggttccgagagagcaccgtagggcttttctcaaatagaaaagccagattttgaaaaaattttaaagataaaataggacatattttgcagatatatatatatatatacacaaacacatctccaggtatagagaaccatccagatgttcacttttgaaaatatctaatgatgcaaagttttattcttgaacttggacactgatgccatcaaacaattaacaaatatatttaagtactaaaggtgattttttttttaaagactttttcaaattgtcaaatgatttaatgcagatgaacatatttctattttaagtaacgggaatctgtaagaatgtttgcttgagatatggttaacttttttcttttgttggttttgacttagatggacaccatgagatgttaatattcatacatgtaataaatagaatgatgaagaaactttgtttgtacttctttatttcttgaaaagctttagaatgtgactttcttgttgtctttcatctgttttttgaaacatgaacatggtacttgctatgagccaggcactctgagacaggttagtcttttctgccatttattggagataggcatataaaacactgagttttattgagcacatagtatgtggcaggcactagcactttctacatgtattttctctggtattcacatctaataactacatggtagatggtgtccccactttacagatgaaattaagccactcactttaaaatttttataagaatttgaacgtggctttgtttcctctaattccatacaatttctgcaattttaaaagatacccccaaattgattgttaggatagaaataagcacaccaaactactggaaggtggctaaggaagattctacaaaagtggtgacatttgagtcttggaggataaccaggagtggagtccatactgatgggaagggtatctttggaaaatgaacagcaaatgtaaaggcttaaaatacttttgtgttttcaaaaattgacttcttatggttaaaactcagtagttttgaatagattatgatgagccattaatttttttagtagaaatggagtctcactacgtagtccaggctggtttcgaattcctgggctcaagtgatcctactgccttggcctcccagagtgctgggattacaggcatgagccacgtgcccagcctttatttttaagtagtgaagagccttcttggtcatgctaaggaatttttattaaactgatgaccagagcagccactagaaattttaaacagggtgacatcctatctgcatttaagcttttttatttttttaagaatcaagtgaatacaattttagagattgctaaatccagagaggtccagtgggaaaactggtagccattggatttgagttgtaaacacgtaacagctgaacttacgtatatgaacactgccataggaactgaggtctgtgaatccaaaaatgtaggcaaaacttcctgttgaacatttttctggggaaaccaccatagcttttatcaaatgcttaaaggtatggaacattctaaaaggaaggtgatattcaaacctaaaagtgtatcaacggtatccacatggagaagagggtcaaggatgggggaacaaagactggtaggtgggaaggtcaaaaagaaaatgggaaaaccagcaatgggaaaatttttttttttctttttttgagacagtcttgctatgttgctcaggctggatcagtgcagtagcacaatctcggctcagtgcagtggcacaatctcggctcactgcaacctctgcctcctgggttcaagtgattctcctgtctcagcctcccaagtagctgggattacaggtgcccgccaccacgcctggctaatttttatattttgagtagaggcggggtttcaccacgttggccaggctggtctcgaactcctgaccttaagtgatctgcccgtcttggcctcccagagtgctgggattacaggtgtgcgcaggaagaaaatttcaatggacgaggtagtcaacaaaatgaagtcaagaaaatatgtaagactcagaaatactctaactgttgacctaagaacagctgagtatgggtgc

SEQ ID NO: 188253 - DNA, 2649 bp, Artificial Sequence
  derived and/or modified sequence
ggttgggaacacagacattttcggagctggagccgccactgccgccgccattttgtgtctgtggagaaagaagcttctgtggcggctggaagtggacggagatcacccgcgagacggcggcgtttcatacccgaggttccccctgtgtcgtcccccatcccccctccgcggtcagcatgtggtgaagccggagccgcgagagagccggggagaggaagaggagtcggaagggaggcggggtatccagagcggcttcagcttcagctgcagcggacctcggaggggggccgcggcgcaatgtcagagcagacgccggccgaggccggtgctgcgggggcccgggaggacgcctgtcgggattatcagtcatcgctcgaagacctgaccttcaatagcaagccgcacatcaatatgctgaccattctagccgaggagaacctgcccttcgccaaggagatcgtctctctcatcgaggcccaaaccgccaaggctccttcctcagagaagcttcctgttatgtaccttatggattctattgtgaaaaacgttggaagagagtatctcactgcctttactaaaaatctagttgcaacatttatttgtgtgtttgaaaaggtggatgaaaatactaggaaaagtttatttaagttacgttctacatgggatgaaatattccctttgaagaaactttatgccctggatgtcagagtcaattcattagatcctgcttggcctattaaacctctaccccccaatgtgaatacgtctagcatccatgtgaatcctaaatttttaaataaatcgcccgaggagccttcaacacctggtacagtggtcagttcccctagcatctccactcctccaattgttcctgatatacaaaagaatcttacacaagaacaactaataaggcagcagttactggcaaagcaaaaacagttgttagaacttcagcagaaaaagctggagcttgagctagagcaagctaaggcacagttggcagtttctcttagtgttcagcaggaaacatccaatttaggtcctggatctgcaccatccaaattacatgtttcacagattccccctatggcagttaaagctcctcatcaggttcctgtgcaatctgagaaaagccgtccaggaccatccttacaaattcaggatttaaaaggaactaaccgggatcctcgtctgaacaggataagccaacattctcatggaaaagatcagagtcacaggaaagaatttctaatgaacacattaaaccagtctgatactaagacaagtaaaactataccctctgaaaaactaaattcatccaagcaagaaaaaagtaaatcaggtgaaaaaataaccaagaaagaacttgaccaattagattctaaatcgaaatcgaaatcgaaatcaccctcacctttgaaaaacaaattatctcacacaaaagacttgaaaaatcaagaatcggaaagtatgaggttgtctgatatgaacaagagagatccaagattaaaaaaacatcttcaggataagaccgatggcaaagatgatgatgtgaaagagaagagaaaaactgcagaaaaaaaggataaagatgagcacatgaagtcatccgaacacagactggctggaagtagaaataaaatcataaatggcattgtacaaaaacaggatacaataacagaagagtcagaaaaacaggggacaaaaccagggagatcgagtactagaaagcgatcaagatctcgatcacccaagtctaggtcaccaattatacattccccaaagagaagagataggcggtcacccaaacgaaggcaaagaagtatgtctccaacatcgacacctaaagctggaaagattcgccaatctggagctaagcagtcacatatggaagagtttacaccaccttctagggaagacagaaatgctaagagaagtactaaacaggatattcgggatccaaggcgaatgaaaaagactgaagaggagcgaccacaagaaactacaaatcagcattctacaaagtcaggcactgaaccaaaggagaatgtagaaaactggcaaagttccaagtctgccaaaagatggaaatctggttgggaagaaaataaaagcttacaacaggttgatgaacatagtaaacctcctcatctgaggcatagggagagctggtcaagcactaaaggaattttatcacctcgagccccaaagcagcaacagcatcgattaagtgtagatgccaatcttcagattcctaaagagttaactcttgcaagcaaaagagaattacttcaaaagacgagtgaacgtttagcatctggtgaaattacacaggatgacttccttgttgttgtgcatcaaattcgacagctatttcagtatcaagaaggtgtgcgagaagagcagagatctccattcaatgatcgttttccacttaagcgacctcgatatgaagattcagataaaccatttgtagatagtccagcatcaagattcgccggcctggatacaaatcagcgacttacagctttagctgaagacagaccgttatttgatggacctagtaggccatcagtagcaagagatggcccaacgaagatgatttttgaaggacccaataaattaagccctcgaattgatggacctccc

SEQ ID NO: 188254 - DNA, 4668 bp, Artificial Sequence
  derived and/or modified sequence
atgtctgagcagaccccagctgaggccggggccgccggggcccgggaggatgcctgccgggactaccagagcagcctggaggacctgaccttcaacagcaagccccacatcaacatgctgaccatcctggccgaggagaacctgccctttgccaaggagatcgtgtccctcatcgaggcccagacagccaaggcccccagcagcgagaagctgcctgtgatgtacctgatggacagcatcgtgaagaatgtgggccgggagtacctgacagccttcaccaagaacctggtggccaccttcatctgtgtgtttgagaaggtggatgagaacaccaggaagagcctcttcaagctgcggagcacctgggatgagatcttccccctgaagaagctgtatgccctggatgtgcgggtgaacagcctggaccctgcctggcccatcaagcccctgcccccaaatgtgaacaccagcagcatccacgtgaaccccaagttcctgaacaagagccctgaggagcccagcaccccaggcaccgtggtgagcagccccagcatcagcaccccacccatcgtgcctgacatccagaagaacctgacccaggagcagctgatccggcagcagctgctggccaagcagaagcagctgctggagctgcagcagaagaagctggagctggagctggagcaggccaaggcccagctggccgtgtccctgtctgtgcagcaggagaccagcaacctgggccctggcagcgcccccagcaagctgcacgtgtcccagatcccccccatggctgtgaaggccccccaccaggtgcctgtgcagagcgagaagagcaggcctggccccagcctgcagatccaggacctgaagggcaccaacagagacccccggctgaaccgcatcagccagcacagccacggcaaggaccagagccacaggaaggagttcctgatgaacaccctgaaccagagcgacaccaagaccagcaagaccatccccagcgagaagctgaacagcagcaagcaggagaagagcaagagcggggagaagatcaccaagaaggagctggaccagctggacagcaagagcaagagcaagagcaagagccccagccccctgaagaacaagctgagccacaccaaggacctgaagaaccaggagagcgagagcatgaggctgagtgacatgaacaagagggacccccggctgaagaagcacctgcaggacaagacagatggcaaggatgatgatgtgaaggagaagaggaagacagctgagaagaaggacaaggatgagcacatgaagagcagcgagcaccggctggccggcagcaggaacaagatcatcaatggaattgtgcagaagcaggacaccatcacagaggagagcgagaagcagggcaccaagccaggccgcagcagcaccaggaagaggagccgcagccgcagccccaagagccgcagccccatcatccacagccccaagagaagagaccggcgcagccccaagaggcggcagaggtccatgagccccaccagcacccccaaggccggcaagatccggcagagcggggccaagcagagccacatggaggagttcaccccacccagccgggaggacagaaatgccaagaggagcaccaagcaggacatccgggaccccaggaggatgaagaagacagaggaggagcggccccaggagaccaccaaccagcacagcaccaagtctggaacagagcccaaggaaaatgtggagaactggcagagcagcaagagcgccaagcgctggaagagcggctgggaggagaacaagagcctgcagcaggtggatgagcacagcaagccaccccacctgcggcaccgggagagctggagcagcaccaagggcatcctgagcccccgggcccccaagcagcagcagcaccggctgtctgtggatgccaacctgcagatccccaaggagctgaccctggccagcaagcgggagctgctgcagaagaccagcgagcggctggccagcggggagatcacccaggatgacttcctggtggtggtgcaccagatccggcagctgttccagtaccaggagggcgtgcgggaggagcagaggagccccttcaatgaccgcttccccctgaagaggcccaggtatgaagattctgacaagccctttgtggacagccctgccagcagatttgctggcctggacaccaaccagaggctgacagccctggctgaagatcggcccctgtttgatggccccagccggcccagcgtggccagagatggccccaccaagatgatctttgagggccccaacaagctgagccccagaattgatggcccccccaccccagccagcctgcgctttgatggcagccctggccagatgggcggcggcggccccctgcgctttgagggcccccagggccagctgggcggcggctgccccctgcgctttgagggccccccaggccctgtgggcacccccctgcgctttgagggccccatcggccaggccggcggcggcggcttccgctttgagggcagccctggcctgcgctttgagggcagccctgggggcctgcgctttgagggccctgggggccagcctgtgggcggcctgcgctttgagggccaccggggccagcctgtgggcggcctgcgctttgagggcccccacggccagcctgtgggcggcctgcgctttgacaacccccggggccagcctgtgggcggcctgcgctttgaaggaggccacggccccagcggggccgccatccgctttgatggcccccacggccagcccggcggcggcatccgctttgagggccccctgctgcagcagggcgtgggcatgagatttgagggcccccacggccagagcgtggccggcctgcgctttgagggccagcacaaccagctgggcggcaacctgcgctttgagggcccccacggccagcccggggtgggcatccgctttgagggccccctggtgcagcagggcggcggcatgagatttgagggccccagcgtgcctgggggcggcctgcgcatcgagggccccctgggccagggcggccccaggtttgagggctgccacgccctgcgctttgatggccagcccggccagcccagcctgctgcccaggtttgatggcctgcacggccagcccggccccaggtttgagaggaccccaggccagcccggcccccagagatttgatggccccccaggccagcaggtgcagcccaggtttgatggagtgccccagagatttgatggcccccagcaccagcaggccagcagatttgacatccccctgggcctgcagggcaccaggtttgacaaccaccccagccagaggctggagagcgtgtccttcaaccagacaggcccctacaatgaccccccaggaaatgccttcaatgcccccagccagggcctgcagttccagagacatgagcagatctttgacagcccccagggccccaacttcaacggcccccacggccctggcaaccagagcttcagcaaccccctgaacagagccagcggccactactttgatgagaagaacctgcagagcagccagtttggaaactttggaaacatcccagcccccatgacagtgggcaacatccaggccagccagcaggtgctgtctggagtggcccagcctgtggccttcggccagggccagcagttcctgcctgtgcacccccagaaccctggctttgtgcagaaccccagcggggccctgcccaaggcctacccagacaaccacctgagccaggtggatgtgaatgagctgttcagcaagctgctgaagacaggcatcctgaagctgagccagacagattctgccaccacccaggtgtctgaggtgacagcccagcccccacctgaggaggaggaggaccagaatgaagaccaggatgtgcctgacctgaccaacttcaccgtggaggagctgaagcagagatatgacagcgtcatcaacagactctacacaggcatccagtgctacagctgtggcatgaggttcaccaccagccagacagatgtgtatgctgaccacctggactggcactaccggcagaacagaacagagaaggatgtgtccaggaaggtgacccaccggcgctggtactacagcctgacagactggattgaatttgaggagattgctgacctggaggagcgggccaagagccagttctttgagaaggtgcatgaggaggtggtgctgaagacccaggaggccgccaaggagaaggagttccagagcgtgcctgctggccctgctggagctgtggagagctgtgagatctgccaggagcagtttgagcagtactgggatgaggaggaggaggagtggcacctgaagaatgccatccgggtggatggcaagatctaccaccccagctgctatgaggactaccagaacaccagcagctttgactgcacccccagccccagcaagacccctgtggagaaccccctgaacatcatgctgaacatcgtgaagaatgagctgcaggagccctgtgacagccccaaggtgaaggaggagagaattgacaccccaccagcctgcacagaggagagcatcgccaccccatctgagatcaagacagaaaatgacacagtggagagcgtgtag

SEQ ID NO: 188255 - DNA, 2355 bp, Artificial Sequence
  derived and/or modified sequence
atgtctgagcagaccccagctgaggccggggccgccggggcccgggaggatgcctgccgggactaccagagcagcctggaggacctgaccttcaacagcaagccccacatcaacatgctgaccatcctggccgaggagaacctgccctttgccaaggagatcgtgtccctcatcgaggcccagacagccaaggcccccagcagcgagaagctgcctgtgatgtacctgatggacagcatcgtgaagaatgtgggccgggagtacctgacagccttcaccaagaacctggtggccaccttcatctgtgtgtttgagaaggtggatgagaacaccaggaagagcctcttcaagctgcggagcacctgggatgagatcttccccctgaagaagctgtatgccctggatgtgcgggtgaacagcctggaccctgcctggcccatcaagcccctgcccccaaatgtgaacaccagcagcatccacgtgaaccccaagttcctgaacaagagccctgaggagcccagcaccccaggcaccgtggtgagcagccccagcatcagcaccccacccatcgtgcctgacatccagaagaacctgacccaggagcagctgatccggcagcagctgctggccaagcagaagcagctgctggagctgcagcagaagaagctggagctggagctggagcaggccaaggcccagctggccgtgtccctgtctgtgcagcaggagaccagcaacctgggccctggcagcgcccccagcaagctgcacgtgtcccagatcccccccatggctgtgaaggccccccaccaggtgcctgtgcagagcgagaagagcaggcctggccccagcctgcagatccaggacctgaagggcaccaacagagacccccggctgaaccgcatcagccagcacagccacggcaaggaccagagccacaggaaggagttcctgatgaacaccctgaaccagagcgacaccaagaccagcaagaccatccccagcgagaagctgaacagcagcaagcaggagaagagcaagagcggggagaagatcaccaagaaggagctggaccagctggacagcaagagcaagagcaagagcaagagccccagccccctgaagaacaagctgagccacaccaaggacctgaagaaccaggagagcgagagcatgaggctgagtgacatgaacaagagggacccccggctgaagaagcacctgcaggacaagacagatggcaaggatgatgatgtgaaggagaagaggaagacagctgagaagaaggacaaggatgagcacatgaagagcagcgagcaccggctggccggcagcaggaacaagatcatcaatggaattgtgcagaagcaggacaccatcacagaggagagcgagaagcagggcaccaagccaggccgcagcagcaccaggaagaggagccgcagccgcagccccaagagccgcagccccatcatccacagccccaagagaagagaccggcgcagccccaagaggcggcagaggtccatgagccccaccagcacccccaaggccggcaagatccggcagagcggggccaagcagagccacatggaggagttcaccccacccagccgggaggacagaaatgccaagaggagcaccaagcaggacatccgggaccccaggaggatgaagaagacagaggaggagcggccccaggagaccaccaaccagcacagcaccaagtctggaacagagcccaaggaaaatgtggagaactggcagagcagcaagagcgccaagcgctggaagagcggctgggaggagaacaagagcctgcagcaggtggatgagcacagcaagccaccccacctgcggcaccgggagagctggagcagcaccaagggcatcctgagcccccgggcccccaagcagcagcagcaccggctgtctgtggatgccaacctgcagatccccaaggagctgaccctggccagcaagcgggagctgctgcagaagaccagcgagcggctggccagcggggagatcacccaggatgacttcctggtggtggtgcaccagatccggcagctgttccagtaccaggagggcgtgcgggaggagcagaggagccccttcaatgaccgcttccccctgaagaggcccaggtatgaagattctgacaagccctttgtggacagccctgccagcagatttgctggcctggacaccaaccagaggctgacagccctggctgaagatcggcccctgtttgatggccccagccggcccagcgtggccagagatggccccaccaagatgatctttgagggccccaacaagctgagccccagaattgatggccccccatag

SEQ ID NO: 188256 - DNA, 4668 bp, Artificial Sequence
  derived and/or modified sequence
atgagcgagcagacccccgccgaggccggcgccgccggcgcccgggaggacgcctgccgggactaccagtccagtctggaggatcttactttcaattcaaaaccccatatcaacatgctcactattctcgccgaggaaaatttgccatttgcgaaggagattgtctccctcatcgaagcacaaactgctaaggccccaagctctgaaaaactccccgtgatgtatctaatggactccatcgtgaagaatgttggaagggagtacctgactgcatttactaagaacctggtggccacctttatttgtgtgtttgaaaaggtggacgagaacacccggaaatcattgttcaagttacgatccacgtgggacgagatctttccattgaagaagctgtatgcgttggatgtgcgcgtcaatagccttgaccctgcttggcctataaagccactacccccaaacgtgaacacatcatccatccatgtaaaccccaaattccttaataagagtcccgaggagcccagtacccctggtaccgtcgtgagcagcccctccatctccactccccctatcgtgcctgacatccagaagaatctgacacaggagcagctgattaggcagcaactcctagccaaacagaagcagctgctggagctccagcagaagaaacttgagctcgagctcgagcaggctaaggcccagcttgctgtatcactgagtgttcagcaggaaaccagtaatctgggtcctggatccgctccctcaaaactgcacgtgagtcagattcccccaatggccgtgaaggcaccccaccaggtccctgtgcaatccgagaaatcccggcctggaccctccctgcagatccaagacctgaaaggaacaaacagggatccacgcctgaatcgtatcagccagcactcccatggtaaagatcagtctcaccgaaaggagttcctcatgaacaccctgaatcagtcggacacaaagacgtcaaagaccatcccgtccgaaaaattgaactcttctaaacaagagaagagcaagagcggcgaaaaaattacgaagaaggaactcgaccagctggactccaagtccaagtccaaaagtaagtcaccctcgcctttgaagaataagctttcccacaccaaggacctcaagaaccaggaatccgaaagtatgcgcttgtccgatatgaacaagagagacccacgacttaagaaacacttacaagataaaacggatggaaaggacgatgatgttaaagagaagagaaaaacagcggaaaagaaggataaagatgagcacatgaagagttcggaacataggctcgccggctcacggaacaagattatcaatggcattgtccaaaaacaggacaccatcaccgaagagagtgagaagcaggggacgaaacccggacggagtagcactcggaaacggtctagaagtcgatcccctaagagccgtagccctatcattcactcgcccaaacgcagggaccgccgttcccccaagcgccggcagcggtcaatgagccccacctctactcctaaggccggcaaaattcggcagtccggggctaaacagtcacacatggaagaatttacaccacctagcagagaagacaggaacgcgaaaaggtcaacaaagcaggatatcagggaccccagaaggatgaaaaaaacagaggaagagcgcccacaggagacgacaaatcaacactctacaaaatccggcacagaacccaaggaaaatgttgagaattggcagtctagcaaaagtgctaaacggtggaagtccgggtgggaagaaaacaaatccctgcagcaggtggacgagcactcaaaaccgccacatctgaggcatcgtgagagctggagctctaccaaggggatcctgtccccgcgcgcccccaaacagcagcaacataggttgtctgtggatgccaatttacagatccctaaggaactcaccctggccagcaagcgggaattgttgcaaaagacctcagaacggctggcctctggcgagatcacccaggacgattttctcgtggtcgtgcatcagatcaggcaactctttcagtaccaagagggcgtgagagaagaacagcgctctcctttcaatgaccgtttcccactgaagaggccacgttacgaggattccgacaaaccctttgtggactctcctgcctcccggttcgcaggcctggacactaatcaacggttgaccgccctggccgaggaccggccactattcgatggcccaagtagaccatccgtggcccgggatggccctaccaagatgatctttgagggccctaataaactgtcaccacggatagatggcccgcctacacccgcgtccctcaggttcgacggcagccctggtcaaatgggggggggcggcccgctccggtttgaaggcccgcagggacagctgggtggagggtgccctctgcggttcgagggaccgcccggccctgtgggcacgcccctgcggttcgaagggcctattgggcaggcgggaggaggcggctttagattcgagggtagtcccgggctgcggtttgaaggatcacctggcggactcaggtttgagggccctggaggccagccagttggcggtcttaggttcgagggccatcgcggccagcccgtgggcgggttgagattcgagggcccgcatggtcaacctgtgggtgggctaagattcgataacccacgtggccagcccgtcgggggcctacgatttgagggcggccacgggccaagcggcgctgccatacgttttgacggcccccatggccaacctggtgggggcattcgattcgagggccctctgctccagcagggcgtgggcatgaggttcgaggggcctcacggccagtccgtcgctggactgcggttcgaaggacagcataatcagcttggtggcaaccttcggtttgagggcccacacggacagcccggagtagggattcggtttgagggaccattagtccagcaaggaggcggcatgcgctttgaaggcccatctgttccgggggggggactgcggattgaaggtccactggggcaggggggcccccggttcgagggctgccatgctctgaggtttgatggtcaacctggccagccttccctgcttcctcgtttcgatggacttcatgggcaacccgggccaaggttcgagaggacaccaggccagcctggtccccaacgcttcgatggaccacctggacaacaggtgcagccacggtttgacggagttccacagcgattcgacgggcctcaacatcagcaggcctcacggtttgacatcccgcttggcctccagggaacccggttcgacaaccacccatcccagagattagaaagtgtctcatttaatcaaacgggaccttacaatgacccacccgggaacgcgttcaacgccccaagccagggcctgcagttccaaagacatgagcagattttcgattctccacagggccccaacttcaatggcccgcatggcccggggaatcagtcttttagcaacccgttgaatagggcttccggtcattacttcgatgagaagaacctccagtcttcccagttcggcaacttcgggaacattcccgcacccatgacagtcggtaacatccaagctagccagcaagtgctgtccggtgttgctcaacccgtcgcttttggacagggacagcagtttcttcccgttcatccccagaacccaggttttgtacagaacccaagcggagcgcttcccaaagcctaccccgacaatcacctgtcgcaagtggatgtgaacgaactcttctctaagctgctcaaaacgggaatcctcaagctcagccagaccgactccgccaccactcaagttagcgaggtcacagcacaaccgcctcccgaggaggaagaggatcagaacgaggatcaggatgtgcccgaccttacgaacttcaccgttgaggagctcaagcaacgctatgacagcgtgattaatagactttatacagggattcagtgctacagttgcggaatgaggttcacaaccagccagaccgatgtgtatgctgatcaccttgactggcactatcggcagaatcgtacagagaaggacgtctccagaaaggtcactcaccggcgctggtactactcgctgacggattggatcgagttcgaggaaatcgccgatctagaagaaagagcaaaatcccagtttttcgaaaaagtccacgaagaggtcgtgttgaaaacacaggaggccgccaaggagaaggagtttcaatccgtaccagctgggcctgccggcgcagtggagagttgcgaaatttgccaggaacagtttgagcaatactgggatgaagaggaggaagaatggcatctgaaaaatgccatccgtgtagacggtaagatctatcatcccagttgttatgaagactatcaaaatacatcttcgtttgattgtaccccctcaccttccaagaccccagtggaaaaccccttgaacatcatgttaaatatcgtgaagaacgagttgcaagaaccctgtgactcgccaaaagttaaggaggagcgcatcgacacccctcccgcctgtaccgaggagtctatcgccactcctagcgagatcaagaccgagaatgacacagtggagtctgtgtag

SEQ ID NO: 188257 - DNA, 2355 bp, Artificial Sequence
  derived and/or modified sequence
atgagcgagcagacccccgccgaggccggcgccgccggcgcccgggaggatgcctgtagggattatcagtccagcctcgaggatctcaccttcaactcaaagcctcacatcaacatgctcacaatactagccgaagaaaacttgccttttgccaaggagattgtatctcttatcgaagctcagaccgctaaggccccttcttcagagaagctgcccgtgatgtatctcatggactccatagtgaaaaatgtgggtcgggagtaccttaccgcctttactaagaatctggtggccacatttatatgtgtatttgagaaagtggacgaaaacacaagaaaatcactgttcaagctgcgctccacatgggacgagatcttccctctgaagaagctatatgctctggatgtacgtgtgaacagcctcgatccagcttggccaatcaaaccactgcctcctaacgtgaatacctcctcgatccacgtgaatccaaagtttcttaataagtcgcccgaggaaccttcaaccccgggtacagtcgtcagtagtccttcgatctccactccccctattgtgcctgacatacagaaaaacttaacccaggaacagctgataagacagcaactgctagcaaaacagaagcagctacttgagctgcaacagaaaaagctcgaactggagttggagcaggcaaaagcccagttggcagtgtctctgagtgtgcagcaagaaaccagcaaccttgggcccggctccgccccatctaaattgcacgtgtcccaaatccctccaatggctgtcaaggccccacatcaggtcccagttcagagcgagaaatctcgacccggcccatcattgcaaatacaggacctgaagggaaccaaccgggaccctagactaaaccgcatctcacaacacagccacggtaaagaccagagccacagaaaagaatttctcatgaacactttaaatcagtcagacactaaaacctcaaagaccattccctctgagaaactgaattcctctaaacaggagaaaagcaaaagtggcgaaaaaattaccaagaaagaactcgaccagctggacagtaagtcaaaaagcaaatcaaagtccccttcacctcttaagaataagttgagccacaccaaagatttgaagaaccaggagtccgaatctatgcgtctgagcgatatgaataaacgggacccccgactgaagaaacacttgcaggacaagaccgatggcaaggatgacgacgtgaaagagaagcgcaaaacagcagagaaaaaagacaaggatgagcatatgaaaagttcagaacataggctggccgggagtcggaacaagattattaatgggattgtccagaaacaggacaccataactgaggagtcagagaagcagggcactaaacctggacgttcctcaactaggaagcggtcgcgatctaggtccccaaagtcccggagcccgattattcactcaccaaagaggcgagaccggcgcagcccaaagaggaggcagagatccatgagtcctacctccaccccgaaggccggaaaaattagacaatccggagctaagcagtcgcatatggaggagttcaccccaccctcgcgcgaagaccgaaacgcgaagcgcagtaccaagcaggatatccgggacccaagacgcatgaaaaagacagaagaggagcggccacaagaaactacgaaccagcattccaccaaatcaggcacagagcccaaagagaacgtagaaaattggcaatcatctaagtcagcgaagagatggaaatcaggatgggaagagaacaagtccctgcagcaggtggatgaacactctaaaccaccacacctgaggcaccgcgaaagttggagctccaccaagggcattctgagtcctcgcgcgccgaaacagcagcagcatcggttatctgtagatgccaatctgcaaatcccaaaggagctcaccctggcaagcaaacgcgagctgctgcagaagacatccgagaggctggctagtggcgagatcacgcaggatgattttcttgtggtcgtacaccagatcaggcaactgtttcaataccaagagggagtgcgagaagagcaaagaagccccttcaatgacagattccccctaaagcgaccaaggtacgaggactcggacaagcccttcgtggatagcccagcttcacgattcgccggattagacaccaatcaacgactgacagctctggccgaagatcggccccttttcgatggaccctctcgtccatcagtcgcccgcgacggccccactaaaatgatcttcgagggccccaataagctgtctcctcgcatcgatggccctccttag

SEQ ID NO: 188258 - DNA, 4668 bp, Artificial Sequence
  derived and/or modified sequence
atgtctgaacagacacccgcagaggcaggagcagctggcgcacgggaggatgcatgccgcgattaccaatcctccctcgaggacctgacatttaattcaaaacctcatataaacatgctgaccatcctcgccgaagagaatctcccctttgccaaggagatcgtctctctgatcgaggcgcaaaccgctaaggccccatctagtgaaaaattgcccgtgatgtacttaatggactcaatcgtgaaaaacgtgggcagagagtacctgactgcttttactaagaatctcgtggccacctttatttgtgtgtttgagaaggttgatgagaacactcggaaaagcctttttaagctccgctccacctgggacgagatttttcccctgaagaagttgtatgcactcgacgttcgagttaattcgctcgaccctgcgtggccgatcaagccactgcctcctaatgtgaatacctcttcaattcacgtaaatccaaaattcctgaacaagagcccagaagagccatctaccccaggcaccgtagtctcaagtccctctataagcacaccaccgatcgtccctgacattcagaaaaatctaactcaagaacaactgattagacagcaactcctggccaaacaaaaacaactgctcgaattgcagcagaaaaaactggaactggagctggaacaggccaaggctcagctggctgttagtctttcagtgcagcaagagactagtaatctagggccaggcagtgcgccatccaagcttcatgtatctcagataccacccatggcggtgaaggcacctcaccaggtgccagtccagagcgaaaagtctcgccctggtcccagccttcagatacaggacctcaaagggaccaaccgcgatccacgtctgaatagaatttcacaacactctcatggaaaggatcagagtcacaggaaggaattcctcatgaacacactgaatcaatctgatacgaaaacatctaaaaccattcccagtgagaagcttaattctagcaaacaggagaagagtaaaagtggcgaaaaaattacaaagaaggaactggaccagctggactccaagtcgaagagcaaaagcaagtctccttccccccttaaaaacaagctttcgcatactaaagatctcaagaaccaggaatcagagtccatgagattgagtgatatgaacaagcgggatccaagactgaagaagcacctacaggataagaccgacgggaaagatgacgatgtgaaggaaaaacggaaaactgctgaaaaaaaagacaaggatgaacatatgaagtcaagcgagcatcgactcgcgggatccagaaacaagatcatcaatggtattgtccagaagcaggatactatcactgaagagagcgaaaagcagggcactaagcctggtcgctcctctaccagaaagagatcccgctcacggagcccaaagagcagatccccgatcatccactctcctaaacgtagagaccggcgttctcccaagaggcgccagcggagcatgagccccactagcacccccaaagctgggaagatacgccagtctggcgctaaacagtcccatatggaggagttcaccccacctagtcgggaggatcggaacgcgaaaaggtctacaaagcaggacatccgtgacccaaggcgtatgaagaaaacggaggaagagcgccctcaggagacgactaatcagcatagcacaaaaagcggtacagaaccaaaggagaatgtggaaaactggcagagcagtaagtccgccaagcgttggaaatctggctgggaggaaaacaaatcacttcaacaagtggacgagcatagcaagccccctcatctccgccaccgggaaagctggagctccactaaaggcattctgagtcctagagctcctaaacagcagcaacacagactatccgtggacgccaacttacagattcctaaagagctgacactagccagcaaacgggaattgctgcaaaaaaccagcgaaagactggcctctggcgagatcacgcaggatgatttcctcgtggttgtgcatcaaatcagacagttgtttcagtaccaagagggagtcagggaagagcagcgcagcccgttcaatgataggttccccctcaaaagacccaggtatgaggacagcgacaaaccgttcgtagactctccagcctctcggtttgccggtctagatacaaaccagagactgaccgccttggccgaggaccgccctctgtttgatgggccttctaggccgtctgtcgctagagatggccctacgaagatgatatttgaggggcctaataagttgagtcccaggattgatggacctcctactcccgctagcctgcggttcgatggctccccaggacagatgggaggaggaggccctctccggttcgagggaccccagggccagcttggcggagggtgccccctgcgcttcgagggcccaccagggcctgtgggcacaccattgaggtttgaggggccaataggacaagccggaggaggcggattccggttcgaggggagccctggtttaagattcgaggggtcccccggagggttgcggtttgaggggccaggcggtcaacccgttggcggactcaggttcgagggccatagagggcagcctgtaggtgggctgcggttcgaaggacctcatggccagcccgtcgggggtctgagattcgacaatccacgaggacagcctgttggcggtctcaggttcgaaggtgggcatggcccttccggggctgctattcgttttgatggccctcacggacagcctgggggtggcattcggttcgagggcccactgctgcagcaaggagtagggatgagatttgaaggccctcatggccagtctgtggctggcctccggttcgaaggccagcacaatcagctgggtggtaacctcaggtttgaaggtccccacggccaaccgggagtgggtataagatttgaagggccactggtgcagcaaggaggtggtatgaggtttgaaggccctagcgttccaggaggtggcctgcggatcgaaggtcccctcggccagggcggaccaaggttcgaaggatgtcatgccctgaggttcgacggccaacccggtcagcccagcctgctgccacggttcgacggcctgcatggacaaccaggccctcgcttcgagcgtactccaggacaaccaggtccgcagcgcttcgatggccctcctggacagcaggtccagccacggtttgatggcgtgccacagaggttcgatggaccacaacatcagcaggcttcaagatttgacatccctctaggtctgcagggaacacgatttgataaccacccttctcagcgactggaaagcgtgtccttcaatcaaactggcccttacaatgatccccctggaaacgccttcaatgccccttcacagggactgcagttccaaaggcacgagcagatcttcgattcacctcaagggccaaattttaacgggccacacggaccaggtaaccaaagctttagcaatccactaaatcgagcatccggccactactttgatgagaagaacctgcagtctagccagtttgggaacttcggaaatatcccagccccaatgactgtcgggaacattcaggcgtcccagcaggtgctgagcggcgtagcccagcctgtcgccttcggacaggggcagcagttcctgccagtgcaccctcaaaaccccggattcgttcagaaccctagcggagccttacctaaggcttatcccgacaaccacttgtcacaagttgacgtgaacgagcttttctcaaagttactcaaaaccggcatcctgaagctgagccagaccgatagcgcaacaactcaagtcagcgaggtaaccgcccagccgccaccagaggaagaagaggaccagaatgaagatcaggatgtgccagatctgaccaatttcacagtggaggagctcaaacagcgctatgattcggttataaatcgcttgtataccggaatccagtgttacagctgtggaatgcggttcaccacgtctcagacagacgtgtacgcagatcatctggactggcactatagacaaaacagaacagaaaaggatgtgagcaggaaggtgacgcaccggagatggtactactccctcaccgactggattgagtttgaagagatcgcagatctggaggagcgggcaaagtcccagtttttcgagaaagtccacgaagaggtggttctcaagacccaggaggctgccaaggaaaaagagttccagtcagtgccggctggccctgccggagcagtcgagagttgtgaaatctgccaggaacagtttgaacagtattgggacgaagaggaagaagaatggcatctgaagaatgcaattcgtgtggacggcaaaatttaccacccatcttgctatgaggactatcagaacacatctagtttcgattgtactccctccccctcaaagaccccagtggagaatccgctgaacatcatgctaaacatagtgaagaacgagctgcaagagccctgcgacagcccaaaagtgaaggaggaacgaatcgatacacccccagcctgcacagaagagtctatcgccacccccagtgaaattaaaaccgaaaatgatacggtggagagtgtgtag

SEQ ID NO: 188259 - DNA, 2355 bp, Artificial Sequence
  derived and/or modified sequence
atgtctgagcagaccccagcagaggcaggtgctgcaggtgcaagggaggatgcatgtcgggactaccagagctccctagaggacttgactttcaattcaaaacctcacataaacatgttaactattcttgccgaggaaaacttgccttttgcaaaggagattgtgtcactgatcgaggcacagacggccaaagctccttcctccgagaagctccctgtgatgtacttgatggacagcatcgtcaaaaacgtgggaagagagtatctaacggcctttactaaaaatctggttgccacgttcatctgcgtattcgagaaggtggacgagaacactagaaagagtcttttcaagctaaggtcgacctgggatgagatattccccctcaagaaattatatgctctcgatgtgagggtcaattccctggatcccgcatggccaattaagcccttgcctcccaatgtaaatacaagcagtattcatgtaaatcctaagttcctgaataagtctcctgaggagccgtctacccccggtacagttgtgagctctccatccattagcactcctcctattgttcctgatattcagaaaaacctcacacaggaacaacttatccggcagcaactcctggcaaagcagaagcaactgcttgaactgcaacagaagaagctcgaactggagctagagcaggctaaggcacaactggccgtgtcactgtccgtccagcaagaaacatctaaccttgggccagggagcgccccttctaagctgcacgtgtcccaaatcccccctatggcggtgaaggccccacaccaggtgcccgttcaatcagaaaagtccaggcccggaccttcactgcagattcaggatttgaagggcaccaacagagaccctcgcctcaatagaatttctcagcatagtcatggcaaggaccagtcacacagaaaggagtttctgatgaatacgctaaatcagagtgacactaaaacaagtaaaaccattccatcggaaaagctgaattcgagtaagcaagagaagagtaagtccggagagaagataactaagaaggagctggatcagcttgatagcaaatccaaaagtaaaagcaaaagcccctcacctctcaagaacaagttgagtcacactaaagaccttaagaaccaggaatctgaatctatgcggctgagcgacatgaacaagcgagatccgaggttaaaaaagcaccttcaggacaagacagacggcaaggatgacgatgtgaaagaaaaacgcaagaccgcagagaaaaaagacaaggacgaacacatgaaaagcagcgaacatagacttgcaggatcaaggaacaagatcataaatggcatcgtccaaaaacaggacacgatcacagaggagtccgagaagcagggcacaaaacccggacgcagttccacacggaagagatctagaagtaggagtcccaaatcgcggtcacccatcatccactcacctaaacgcagagacagacgctctcccaagagacgacaaaggtcaatgagcccaacttctacccccaaagcgggaaaaatccgccaatcgggcgctaaacagtctcacatggaagagttcacgcccccatcacgcgaagatcgcaacgcaaaaaggagcaccaagcaggacatccgggatcccagacggatgaaaaaaacagaagaggagagacctcaggagacaacgaatcaacatagtactaaatccgggaccgagcctaaagagaacgtggagaattggcagtcaagtaagtccgccaagcgttggaaatccggttgggaggagaataaaagtcttcagcaggtggatgaacatagtaagccgccacacctgaggcacagagagagctggagtagcaccaaggggatcctgagccccagagccccaaagcaacagcagcaccgtctaagcgtggatgctaacctgcaaatccccaaagaattgacacttgcttcgaaacgcgaactccttcagaagacttctgagaggctggcctctggtgaaataacccaagatgattttttggttgtggttcatcaaattaggcagttgttccagtaccaggagggagtccgggaagagcagaggtccccatttaacgacagattcccactcaaacggccacgctacgaagattccgataaaccgttcgtggacagtcccgcatctaggtttgctggccttgatacgaatcagcggctgactgctttagctgaggatcgcccacttttcgacgggcctagcagaccttctgtggccagggacggacccaccaagatgattttcgaaggaccaaataaactcagtcccagaatcgatgggcctccatag

SEQ ID NO: 188260 - DNA, 4668 bp, Artificial Sequence
  derived and/or modified sequence
atgagcgagcagacccccgccgaggccggcgccgccggcgccagagaggacgcctgcagagactaccagagcagcctggaggacctgaccttcaacagcaagccccacatcaacatgctgaccatcctggccgaggagaacctgcccttcgccaaggagatcgtgagcctgatcgaggcccagaccgccaaggcccccagcagcgagaagctgcccgtgatgtacctgatggacagcatcgtgaagaacgtgggcagagagtacctgaccgccttcaccaagaacctggtggccaccttcatctgcgtgttcgagaaggtggacgagaacaccagaaagagcctgttcaagctgagaagcacctgggacgagatcttccccctgaagaagctgtacgccctggacgtgagagtgaacagcctggaccccgcctggcccatcaagcccctgccccccaacgtgaacaccagcagcatccacgtgaaccccaagttcctgaacaagagccccgaggagcccagcacccccggcaccgtggtgagcagccccagcatcagcaccccccccatcgtgcccgacatccagaagaacctgacccaggagcagctgatcagacagcagctgctggccaagcagaagcagctgctggagctgcagcagaagaagctggagctggagctggagcaggccaaggcccagctggccgtgagcctgagcgtgcagcaggagaccagcaacctgggccccggcagcgcccccagcaagctgcacgtgagccagatcccccccatggccgtgaaggccccccaccaggtgcccgtgcagagcgagaagagcagacccggccccagcctgcagatccaggacctgaagggcaccaacagagaccccagactgaacagaatcagccagcacagccacggcaaggaccagagccacagaaaggagttcctgatgaacaccctgaaccagagcgacaccaagaccagcaagaccatccccagcgagaagctgaacagcagcaagcaggagaagagcaagagcggcgagaagatcaccaagaaggagctggaccagctggacagcaagagcaagagcaagagcaagagccccagccccctgaagaacaagctgagccacaccaaggacctgaagaaccaggagagcgagagcatgagactgagcgacatgaacaagagagaccccagactgaagaagcacctgcaggacaagaccgacggcaaggacgacgacgtgaaggagaagagaaagaccgccgagaagaaggacaaggacgagcacatgaagagcagcgagcacagactggccggcagcagaaacaagatcatcaacggcatcgtgcagaagcaggacaccatcaccgaggagagcgagaagcagggcaccaagcccggcagaagcagcaccagaaagagaagcagaagcagaagccccaagagcagaagccccatcatccacagccccaagagaagagacagaagaagccccaagagaagacagagaagcatgagccccaccagcacccccaaggccggcaagatcagacagagcggcgccaagcagagccacatggaggagttcaccccccccagcagagaggacagaaacgccaagagaagcaccaagcaggacatcagagaccccagaagaatgaagaagaccgaggaggagagaccccaggagaccaccaaccagcacagcaccaagagcggcaccgagcccaaggagaacgtggagaactggcagagcagcaagagcgccaagagatggaagagcggctgggaggagaacaagagcctgcagcaggtggacgagcacagcaagcccccccacctgagacacagagagagctggagcagcaccaagggcatcctgagccccagagcccccaagcagcagcagcacagactgagcgtggacgccaacctgcagatccccaaggagctgaccctggccagcaagagagagctgctgcagaagaccagcgagagactggccagcggcgagatcacccaggacgacttcctggtggtggtgcaccagatcagacagctgttccagtaccaggagggcgtgagagaggagcagagaagccccttcaacgacagattccccctgaagagacccagatacgaggacagcgacaagcccttcgtggacagccccgccagcagattcgccggcctggacaccaaccagagactgaccgccctggccgaggacagacccctgttcgacggccccagcagacccagcgtggccagagacggccccaccaagatgatcttcgagggccccaacaagctgagccccagaatcgacggcccccccacccccgccagcctgagattcgacggcagccccggccagatgggcggcggcggccccctgagattcgagggcccccagggccagctgggcggcggctgccccctgagattcgagggcccccccggccccgtgggcacccccctgagattcgagggccccatcggccaggccggcggcggcggcttcagattcgagggcagccccggcctgagattcgagggcagccccggcggcctgagattcgagggccccggcggccagcccgtgggcggcctgagattcgagggccacagaggccagcccgtgggcggcctgagattcgagggcccccacggccagcccgtgggcggcctgagattcgacaaccccagaggccagcccgtgggcggcctgagattcgagggcggccacggccccagcggcgccgccatcagattcgacggcccccacggccagcccggcggcggcatcagattcgagggccccctgctgcagcagggcgtgggcatgagattcgagggcccccacggccagagcgtggccggcctgagattcgagggccagcacaaccagctgggcggcaacctgagattcgagggcccccacggccagcccggcgtgggcatcagattcgagggccccctggtgcagcagggcggcggcatgagattcgagggccccagcgtgcccggcggcggcctgagaatcgagggccccctgggccagggcggccccagattcgagggctgccacgccctgagattcgacggccagcccggccagcccagcctgctgcccagattcgacggcctgcacggccagcccggccccagattcgagagaacccccggccagcccggcccccagagattcgacggcccccccggccagcaggtgcagcccagattcgacggcgtgccccagagattcgacggcccccagcaccagcaggccagcagattcgacatccccctgggcctgcagggcaccagattcgacaaccaccccagccagagactggagagcgtgagcttcaaccagaccggcccctacaacgacccccccggcaacgccttcaacgcccccagccagggcctgcagttccagagacacgagcagatcttcgacagcccccagggccccaacttcaacggcccccacggccccggcaaccagagcttcagcaaccccctgaacagagccagcggccactacttcgacgagaagaacctgcagagcagccagttcggcaacttcggcaacatccccgcccccatgaccgtgggcaacatccaggccagccagcaggtgctgagcggcgtggcccagcccgtggccttcggccagggccagcagttcctgcccgtgcacccccagaaccccggcttcgtgcagaaccccagcggcgccctgcccaaggcctaccccgacaaccacctgagccaggtggacgtgaacgagctgttcagcaagctgctgaagaccggcatcctgaagctgagccagaccgacagcgccaccacccaggtgagcgaggtgaccgcccagcccccccccgaggaggaggaggaccagaacgaggaccaggacgtgcccgacctgaccaacttcaccgtggaggagctgaagcagagatacgacagcgtgatcaacagactgtacaccggcatccagtgctacagctgcggcatgagattcaccaccagccagaccgacgtgtacgccgaccacctggactggcactacagacagaacagaaccgagaaggacgtgagcagaaaggtgacccacagaagatggtactacagcctgaccgactggatcgagttcgaggagatcgccgacctggaggagagagccaagagccagttcttcgagaaggtgcacgaggaggtggtgctgaagacccaggaggccgccaaggagaaggagttccagagcgtgcccgccggccccgccggcgccgtggagagctgcgagatctgccaggagcagttcgagcagtactgggacgaggaggaggaggagtggcacctgaagaacgccatcagagtggacggcaagatctaccaccccagctgctacgaggactaccagaacaccagcagcttcgactgcacccccagccccagcaagacccccgtggagaaccccctgaacatcatgctgaacatcgtgaagaacgagctgcaggagccctgcgacagccccaaggtgaaggaggagagaatcgacaccccccccgcctgcaccgaggagagcatcgccacccccagcgagatcaagaccgagaacgacaccgtggagagcgtgtag

SEQ ID NO: 188261 - DNA, 2355 bp, Artificial Sequence
  derived and/or modified sequence
atgagcgagcagacccccgccgaggccggcgccgccggcgccagagaggacgcctgcagagactaccagagcagcctggaggacctgaccttcaacagcaagccccacatcaacatgctgaccatcctggccgaggagaacctgcccttcgccaaggagatcgtgagcctgatcgaggcccagaccgccaaggcccccagcagcgagaagctgcccgtgatgtacctgatggacagcatcgtgaagaacgtgggcagagagtacctgaccgccttcaccaagaacctggtggccaccttcatctgcgtgttcgagaaggtggacgagaacaccagaaagagcctgttcaagctgagaagcacctgggacgagatcttccccctgaagaagctgtacgccctggacgtgagagtgaacagcctggaccccgcctggcccatcaagcccctgccccccaacgtgaacaccagcagcatccacgtgaaccccaagttcctgaacaagagccccgaggagcccagcacccccggcaccgtggtgagcagccccagcatcagcaccccccccatcgtgcccgacatccagaagaacctgacccaggagcagctgatcagacagcagctgctggccaagcagaagcagctgctggagctgcagcagaagaagctggagctggagctggagcaggccaaggcccagctggccgtgagcctgagcgtgcagcaggagaccagcaacctgggccccggcagcgcccccagcaagctgcacgtgagccagatcccccccatggccgtgaaggccccccaccaggtgcccgtgcagagcgagaagagcagacccggccccagcctgcagatccaggacctgaagggcaccaacagagaccccagactgaacagaatcagccagcacagccacggcaaggaccagagccacagaaaggagttcctgatgaacaccctgaaccagagcgacaccaagaccagcaagaccatccccagcgagaagctgaacagcagcaagcaggagaagagcaagagcggcgagaagatcaccaagaaggagctggaccagctggacagcaagagcaagagcaagagcaagagccccagccccctgaagaacaagctgagccacaccaaggacctgaagaaccaggagagcgagagcatgagactgagcgacatgaacaagagagaccccagactgaagaagcacctgcaggacaagaccgacggcaaggacgacgacgtgaaggagaagagaaagaccgccgagaagaaggacaaggacgagcacatgaagagcagcgagcacagactggccggcagcagaaacaagatcatcaacggcatcgtgcagaagcaggacaccatcaccgaggagagcgagaagcagggcaccaagcccggcagaagcagcaccagaaagagaagcagaagcagaagccccaagagcagaagccccatcatccacagccccaagagaagagacagaagaagccccaagagaagacagagaagcatgagccccaccagcacccccaaggccggcaagatcagacagagcggcgccaagcagagccacatggaggagttcaccccccccagcagagaggacagaaacgccaagagaagcaccaagcaggacatcagagaccccagaagaatgaagaagaccgaggaggagagaccccaggagaccaccaaccagcacagcaccaagagcggcaccgagcccaaggagaacgtggagaactggcagagcagcaagagcgccaagagatggaagagcggctgggaggagaacaagagcctgcagcaggtggacgagcacagcaagcccccccacctgagacacagagagagctggagcagcaccaagggcatcctgagccccagagcccccaagcagcagcagcacagactgagcgtggacgccaacctgcagatccccaaggagctgaccctggccagcaagagagagctgctgcagaagaccagcgagagactggccagcggcgagatcacccaggacgacttcctggtggtggtgcaccagatcagacagctgttccagtaccaggagggcgtgagagaggagcagagaagccccttcaacgacagattccccctgaagagacccagatacgaggacagcgacaagcccttcgtggacagccccgccagcagattcgccggcctggacaccaaccagagactgaccgccctggccgaggacagacccctgttcgacggccccagcagacccagcgtggccagagacggccccaccaagatgatcttcgagggccccaacaagctgagccccagaatcgacggccccccctag

SEQ ID NO: 188262 - protein, 258 aa, Artificial Sequence
  derived and/or modified sequence
MIAISAVSSALLFSLLCEASTVVLLNSTDSSPPTNNFTDIEAALKAQLDSADIPKARRKRYISQNDMIAILDYHNQVRGKVFPPAANMEYMVWDENLAKSAEAWAATCIWDHGPSYLLRFLGQNLSVRTGRYRSILQLVKPWYDEVKDYAFPYPQDCNPRCPMRCFGPMCTHYTQMVWATSNRIGCAIHTCQNMNVWGSVWRRAVYLVCNYAPKGNWIGEAPYKVGVPCSSCPPSYGGSCTDNLCFPGVTSNYLYWFK

SEQ ID NO: 188263 - DNA, 777 bp, Artificial Sequence
  derived and/or modified sequence
atgattgccatctccgccgtctcatcagccctcctcttctcactgctgtgtgaggcatctaccgttgttctcctaaacagtacagattctagccccccaacaaacaacttcaccgacatagaagcagctcttaaggctcagctggattccgctgatattccaaaggcgcgtaggaagagatacatcagccagaacgacatgattgccattttggattaccacaatcaggttaggggaaaagtgttcccacctgcggctaacatggaatatatggtgtgggacgagaacctcgctaagtccgctgaggcctgggctgcgacgtgcatctgggaccatggcccttcatacctgctccggttcttgggccagaatttaagcgtgcgcacgggtcgttaccgtagtatcctgcaactcgtcaaaccctggtacgatgaggtgaaggactacgccttcccctatccccaggactgtaacccgaggtgtcccatgcgatgtttcgggccaatgtgcacacattatacccagatggtgtgggcgactagcaataggattggttgcgccattcatacttgccagaacatgaatgtctggggtagtgtgtggcgaagagctgtctatctcgtgtgtaattacgccccaaagggcaactggattggtgaagccccatacaaagtcggtgtgccttgcagttcctgcccgcctagttacgggggtagctgtacagataatttatgttttccaggggtcacctcgaattacctgtactggttcaagtag

SEQ ID NO: 188264 - DNA, 777 bp, Artificial Sequence
  derived and/or modified sequence
atgatagccatttctgcagttagcagcgccttgttattctctctcttgtgcgaagccagtacggttgtgttattgaattcaacggattccagcccaccaaccaataatttcacagacatcgaggccgcactgaaagctcagctggacagtgctgacattccaaaagccaggcggaagcgctacatcagtcagaacgacatgattgctatacttgactaccacaaccaggtgagaggcaaggtgttccctcctgcggctaatatggaatatatggtgtgggacgagaatttagcgaaaagcgccgaggcctgggccgcaacatgcatctgggatcacggcccatcctaccttctgcgctttctcggccagaatttatccgttcggacaggcaggtatcgctccattctccaactcgtgaaaccatggtatgacgaagtgaaggactatgctttcccctatccccaggactgtaatccacgatgccctatgaggtgtttcggcccaatgtgcactcactacacccagatggtgtgggccacttccaacaggatcggatgtgccatccatacttgccagaacatgaacgtgtggggtagtgtatggcgccgtgctgtgtacctggtctgcaactacgcccctaaggggaattggatcggtgaggctccttacaaggtgggagtgccttgctccagctgcccccctagttacggtggatcttgcacagacaacttgtgtttccctggggtgacctcaaactacctctactggtttaagtag

SEQ ID NO: 188265 - DNA, 777 bp, Artificial Sequence
  derived and/or modified sequence
atgatcgccatatccgctgtaagcagcgctctcctcttctcattactgtgtgaagccagtactgttgttcttctcaattccacagactcctcaccccccaccaataatttcacagatatcgaggccgcactgaaggcacagctagactctgccgatatacctaaagctagacggaagaggtacattagtcaaaacgacatgatcgccatcctggactatcacaaccaagtgagaggaaaggtgttcccccccgctgcaaatatggaatacatggtctgggatgaaaaccttgcgaagtccgccgaggcctgggcagccacatgcatttgggatcacggcccgtcatatttattaaggttccttggccagaatctgagcgtaagaacaggacggtatcgcagcattttacaactggtaaaaccctggtacgacgaggtcaaagactacgccttcccctacccacaggattgtaatccccgctgtccaatgcgatgcttcggaccaatgtgtactcattacactcagatggtgtgggctacctccaatcggatcggctgcgctattcatacctgtcagaatatgaatgtttggggcagcgtatggcggagggctgtctatctcgtctgcaactacgcaccaaagggcaactggatcggagaggcaccatataaagtcggtgtgccatgcagttcgtgcccgccatcttacggtggtagttgtacggataacttgtgtttccctggagtcacttctaattatttgtactggttcaagtag

SEQ ID NO: 188266 - DNA, 777 bp, Artificial Sequence
  derived and/or modified sequence
atgattgctatatctgccgtgagctcagccctcctcttctccctcctttgtgaagcctcaacagtagttctgctgaactctaccgacagcagccccccaacaaataactttactgatattgaagcagcgctcaaggctcaactggactcagctgacattccaaaggccagacgaaaaagatacatctctcagaacgatatgattgctattttagattatcataaccaggtgagaggcaaggtttttccccctgccgcgaacatggaatacatggtgtgggatgaaaatttggctaaatcagccgaggcttgggccgccacttgtatttgggaccatggcccgagttatctgcttagatttctggggcagaatttgagcgtgcgcacaggcaggtatagatctatccttcaactggtcaaaccttggtacgatgaggtgaaagactatgcctttccctaccctcaggactgtaaccctcggtgccccatgagatgtttcggcccaatgtgtactcattacactcagatggtatgggctacatccaataggatcggctgcgccatccatacttgtcaaaacatgaacgtctggggaagtgtttggagacgtgctgtctatttggtttgcaactacgcaccgaaaggcaactggataggagaggctccatataaagtcggcgtcccatgttcttcatgccctcccagctatgggggctcatgtaccgataatctgtgtttccccggggtgacatccaattacttatactggttcaagtag

SEQ ID NO: 188267 - DNA, 777 bp, Artificial Sequence
  derived and/or modified sequence
atgatcgcaatttccgcagtgtcctccgcccttctattttcactcctgtgcgaagcctctacagttgttctccttaattccaccgatagctcccctccgaccaacaactttacagacatcgaagcggcattgaaagcacagctggactccgcagatatacctaaagcccgacgcaagcgctacattagccagaacgatatgattgccatcctcgactaccataatcaggtacgcgggaaggtttttcctccagctgctaacatggagtacatggtgtgggacgagaatctcgctaaaagcgcagaagcttgggcagctacctgtatttgggatcacggaccttcataccttctgcgctttctggggcaaaacctttctgtgcgaacaggccggtacagatctatcctacagctggtgaagccttggtacgatgaggtcaaagactacgccttcccatatccccaggattgtaatccacggtgcccaatgcgttgctttggaccaatgtgcacacattacacccaaatggtctgggctacttcaaatcggattggatgcgccattcacacgtgccagaacatgaatgtttgggggagcgtatggcggcgggccgtgtacctggtctgtaattatgcacccaaaggcaactggatcggtgaggctccttacaaggttggggtaccgtgcagctcttgtccacccagttatggaggcagttgcactgataatttatgttttcctggcgtaacgagcaattatctgtattggtttaaatag

SEQ ID NO: 188268 - DNA, 777 bp, Artificial Sequence
  derived and/or modified sequence
atgattgctatatctgccgtgagctcagccctcctcttctccctcctttgtgaagcctcaacagtagttctgctgaactctaccgacagcagccccccaacaaataactttactgatattgaagcagcgctcaaggctcaactggactcagctgacattccaaaggccagacgaaaaagatacatctctcagaacgatatgattgctattttagattatcataaccaggtgagaggcaaggtttttccccctgccgcgaacatggaatacatggtgtgggatgaaaatttggctaaatcagcagaagcttgggcagccacttgtatctgggatcacggtcctagttatctactgagatttctcggccagaacttatccgtaagaacaggtcgctatagaagcatcctgcagctagtgaagccctggtacgacgaagtaaaggactatgcttttccatatccccaggattgtaacccacggtgtccgatgcgatgttttggcccaatgtgcactcactacactcagatggtgtgggctacttctaaccgcattggctgcgcgattcacacctgtcaaaacatgaatgtctgggggtccgtttggaggagggctgtgtacctagtctgtaactacgctccaaaaggcaattggatcggcgaagctccttacaaggtgggagtcccatgttcaagctgccctccatcttatgggggatcctgcactgacaatctttgcttcccaggcgtgacttcaaattacctatattggttcaaatag

SEQ ID NO: 188269 - DNA, 1413 bp, Artificial Sequence
  derived and/or modified sequence
tcacttggtgtgtctatatgtctggcagacattatcagcacattctctgttgttacctgtgattcattttttcttcactctccaggtgaatttcaattgctgaaaatttcccactgaaaatatgcagtaatatattttgtggttcagacatttggggcaaatggttcacattcattttagggttagtggtcatgctgtttatttttctctgctatacaaagttcctcttaggggtctgcctcatgacactaaaaaatgaatagagattctactgtaggttatctcctaggcttgagttcaacatttgtttggatttttgaagaaagtcaaatcaagcaatgctcccaaatgatgtctttgtaaattcataccctctggccctattttttttcatagaccctaactctacctttctgctttaaagcaaagtaaactcggtggcctcttcttctccacccctcaaaatgatagcaatctctgccgtcagcagtgcactcctgttctcccttctctgtgaagcaagtaccgtcgtcctactcaattccactgactcatccccgccaaccaataatttcactgatattgaagcagctctgaaagcacaattagattcagcggatatccccaaagccaggcggaagcgctacatttcgcagaatgacatgatcgccattcttgattatcataatcaagttcggggcaaagtgttcccaccggcagcaaatatggaatatatggtttgggatgaaaatcttgcaaaatcggcagaggcttgggcggctacttgcatttgggaccatggaccttcttacttactgagatttttgggccaaaatctatctgtacgcactggaagatatcgctctattctccagttggtcaagccatggtatgatgaagtgaaagattatgcttttccatatccccaggattgcaaccccagatgtcctatgagatgttttggtcccatgtgcacacattatacgcagatggtttgggccacttccaatcggataggatgcgcaattcatacttgccaaaacatgaatgtttggggatctgtgtggcgacgtgcagtttacttggtatgcaactatgccccaaagggcaattggattggagaagcaccatataaagtaggggtaccatgttcatcttgtcctccaagttatgggggatcttgtactgacaatctgtgttttccaggagttacgtcaaactacctgtactggtttaaataagtttaccttttcctccaggaaatataatgatttctgggaacatgggcatgtatatatatatatggagagagaattttgcacatattatacatattttgtgctaatcttgttttcctcttagtattcctttgtataaattagtgtttgtctagcatgtttgtttaatcctttg

SEQ ID NO: 188270 - DNA, 6732 bp, Artificial Sequence
  derived and/or modified sequence
agcattcaaaccttgcagagctttgctctcagagagtttgtaaaaagacacactcctcttacaagagttcatgctaccacatagcaaagaaccttaaatttttggaagaacaatatattcattttggcattgtgcagagcaaagtaaactcggtggcctcttcttctccacccctcaaaatgatagcaatctctgccgtcagcagtgcactcctgttctcccttctctgtgaagcaagtaccgtcgtcctactcaattccactgactcatccccgccaaccaataatttcactgatattgaagcagctctgaaagcacaattagattcagcggatatccccaaagccaggcggaagcgctacatttcgcagaatgacatgatcgccattcttgattatcataatcaagttcggggcaaagtgttcccaccggcagcaaatatggaatatatggtttgggatgaaaatcttgcaaaatcggcagaggcttgggcggctacttgcatttgggaccatggaccttcttacttactgagatttttgggccaaaatctatctgtacgcactggaagatatcgctctattctccagttggtcaagccatggtatgatgaagtgaaagattatgcttttccatatccccaggattgcaaccccagatgtcctatgagatgttttggtcccatgtgcacacattatacgcagatggtttgggccacttccaatcggataggatgcgcaattcatacttgccaaaacatgaatgtttggggatctgtgtggcgacgtgcagtttacttggtatgcaactatgccccaaagggcaattggattggagaagcaccatataaagtaggggtaccatgttcatcttgtcctccaagttatgggggatcttgtactgacaatctgtgttttccaggagttacgtcaaactacctgtactggtttaaataagtttaccttttcctccaggaaatataatgatttctgggaacatgggcatgtatatatatatatggagagagaattttgcacatattatacatattttgtgctaatcttgttttcctcttagtattcctttgtataaattagtgtttgtctagcatgtttgtttaatcctttgaaatatttgaaacatcaatttctattttctgacctctaagcctaaattaagatattgtatatgtaatgatgacatagttgatgcatccaatcctaaaacttacattccaaaggaattatatcattatgttcctaaggagtaaatatatatttgacctgtaagtgtgtgtatgtatacatatacatatgtatgtgtatggatttatatatgcacacaaacatataatatgtgatgtaacatgtagatgataatatgattcagtagtcaacttgagggaaatttttaaaaaactattctcaattatatacgaggtgatgggacttcttaacacacatttctataatacccatgaaatgataatttgtaaaataacacttagtgatatctggaaataataattcaattaagcaaccacgaatttcaccctggagatattttttcttatttgagtccaccaaaggataatgccaacttatataagttctcaaatcatgccttccgcttagtctcattttattcattcagtcgtcatgagttgagtgcttactacatgcaaggcactctgctagttatattctaataatgcagagataattagacatggttcccgccctcaagaagctcacaaaagtattcaggaaataatgcagactagtgattttgctataaaattatttttgaaggaagcagacacagcagtatttacctgtaggtggagcaagtaataagccatgctgtgcaatatatacataaagcttctgcttctcatgggaatttagttacagtgcttggaatgagaaggggaaggaaagaattaacaaatgccaagatttctggagcagattgtacagctgtgactttggaaaacagaaagtaagaccctcagaaaaccaatgaagtctaagagaaataaaatttagtggacaggtatgaaaagtgtaattgcgcctaactaccagatggagagcttcagaatgggctatccttagagtctagtacatcttgaggcctctcagcaggagacaaaggattccaaaaagagatgtggaggtgctgagggcacctctatctctttgttgtttagtctgtcattgaatcaatctacttatcatcttgggtctttgagtattgtatgaaagatccttcgtgcacaccacacacagtcatgattttgttaaagtagccttcttcagatgcttttctaagggctagttaccaactttatttctgtgtttctgtagaagaaacattttcagttcttcattgagtttgattatggaaatccattcaaagtcactatgaaaattttactcatgtagtttggaaatgcaacattttcctatcatgaaatctctttcagagaggagaatacaacatcttagtccagacatttaacatactgcatttcaagtacatgtgtgtgtgttttattcaggttgtgtaatgctcccgtagaattatagaacaattaaatatggttagttccagagtgcaaattacagaaggaagctacttgtttaaaattccatacacgtttgcagtttcttgtacacatttggatactttgaaagatgacagattgttaaatccattcaatggtaaagaaactcaccatctggagattgagtctacttgttaatgaatgactagcccaattatccttataaattgaatatggtgaccaaatgctttgatatcatactactctgcctttgtgggcacatatgtagacactactaaaaataaatatttttggagattaaaatggagaatagaagtaattacattatttaggtcttaatccaacttttttctaatatatctaaacaattgaaagggaagcttattcatggaatattggcttgatttatctagaaagtttttccttcttcaattttactatattcattctacaggaacagcaataagtactattaaacagaagatggctacactaagttccaattttgttgctgaattgcttctgtgagttcacttttcagttctaaggaagaataatatttgctacatatttcacaggggttcttatgaaggtaaatttaccagattaataaaaatttatgaatattaaaattatcattaataatataaaacacttatttgagattaaattaaatttttcatgagcccctctttggcaggaactctgtttaattctttgtatttatcccagcttcttaaatggtggctgtaacataataaatgtttaataaatgcttatatgaatggatttttagaattaactaagaagccaaaaatggcaacaatttacagaaatcccacctttccatgcttaagacaaaaatgtcttaaatataaagctgtgattatatcaaaaatccagataaatcatcaaatatatcagattaagaccagggtttacacacttaggcaatagtcctttccaaaccatgacaaaaactacaagtttatttataatttaacaactcagctgaaaatataacgggtatatttgttattctaactctattttttaaagttaataatataaagtggccatgtaaaatattttattttccaggctaaagcaaatgaaagtttgctggtatcaacacagcctgccatatttttcacagcatgcaacaatggtgctaggatagctatttcttactgtaattgccagaggcagaaatggtctgggtataagctatttcataaaagcagctttaaattgtcagtattaaggttttcatgtggaaaggtgtcattcaaaaaaaaagtaattggcatacatattccacatcatcgatcctctctgtggtgttaatttttttatatgaccagtagaaaaattttaatattctcacaatataggttttggggcttccatatcatcaaaagactgaaaaattataattttagaattaaactgatggatttcattatagaattatctgtgagttgtgtagacacagtcttaatgtttctggttatgacagataagtttgctcaaaaaatgtggatgaagccattattgttattattgttattgcttctgttcagttgtctaagtatcatcccttctgtggcccatcacgcagcagagttgccctacaaatttcatttggcagcgccataacattcatttaaaaagtttatgaaaacattcatttgaaagttccatgcagctttagcacagagttgaccaaacactggcgtaagttcaatttacacagaatatttgaattgaaacaatagaaatttttctcataatatatacctatgtgaaaccaacttatctgcataattaaatctaatacatatttaagccagtttaagtgctttgtgttgatgccatgcttatcaaatacatgcacaagctaaacataatttgaatgggtctatgaaggaaaaataatgcttagactttggtgtaggttcttcctgtgtagccatatacccaggctctgcagtatcgaaggatgcaaatgttgacatagatggaagctcttacctaccaaagtgtttaggaaggataaagttacatttgtcttaatttctaacattatctttgcttttatgtttcataaaaatttgtcattatttatgctggtgaaacgtataatcacatccaattatttgaacacatgcaaaataattttttaaattatgttattgtttaaatttgacttatgggagatcagtcaaaaacttagaaggtttaacacttcactgattaatggtgctgaaaacacgttacaattaccacatatccttgctataagttttgaagtttcttagcaattaaagtttttttattcagtgtgaactgtcagtatctattctggtgctaaatgtatggtgctaaatgaattgttagtgttgatggctttagtaatgctccttttattcattgctaaatttagtgttatccatttgattcctgattcagaaatatcaataaaatcctatgttaaattaatctttaccaaaaacaggcaagttaactctgttgttttaattcaacagtccaacattatttaggtgttacagagtgtaaatatatttctttgggagttattttctttttaaaatctttttatagcttggcaatgtccaaagtcaaatatcacctaaactggttagattacttctacagctaataatattgcaggcactggcgccctctggtggttatgaagacaaattcttaatggctacttgacctacagcaaaagccatttctgtaccataaaaatttgttgtgcaatattagaattatcatatgtttcctacatctgacagcacctaaaatgtttgataatattaacatgtatctaagaggaaaaaagagttaatatattctggcacccactttcctagtaatgttttccatgattttccagttctgaggcacttattaaagtgcttttttttttctgaattaattaggtattggtaaaatatatttttaaatttagttagctttataaacacaattagaattacaattaattaacagaggtataattgtctcactttcagaagtgatcatttatttttatttagcacaggtcataagaaaaatatatagaaaaataatcaatttcatatataaaaggattatttctccacctttaattattggcctatcatttgttagtgttatttggtcatattattgaactaatgtattattccattcaaagtctttctagatttaaaaatgtatgcaaaagcttaggattatatcatgtgtaactattatagataacatcctaaaccttcagtttagatatataattgactgggtgtaatctcttttgtaatctgttttgacagatttcttaaattatgttagcataatcaaggaagatttaccttgaagcactttccaaattgatactttcaaacttattttaaagcagtagaaccttttctatgaactaaatcacatgcaaaactccaacctgtagtatacataaaatggacttacttattcctctcaccttctccagtgcctaggaatattcttctctgagccctaggattgattctatcacacagagcaacattaatctaaatggtttagctccctcttttttctctaaaaacaatcagctaataaaaaaaaaatttgagggcctaaattatttcaatggttgtttgaaatattcagttcagtttgtacctgttagcagtctttcagtttgggggagaattaaatactgtgctaagctggtgcttggatacatattacagcatcttgtgttttatttgacaaacagaattttggtgccataatattttgagaattagagaagattgtgatgcatatatataaacactatttttaaaaaatatctaaatatgtctcacatatttatataatcctcaaatatactgtaccattttagatattttttaaacagattaatttggagaagttttattcattacctaattctgtggcaaaaatggtgcctctgatgttgtgatatagtattgtcagtgtgtacatatataaaacctgtgtaaacctctgtccttatgaaccataacaaatgtagctttttaaagtccattgtattgttttttctttcaataaaagagtataattaa

SEQ ID NO: 188271 - DNA, 777 bp, Artificial Sequence
  derived and/or modified sequence
atgatcgccatcagcgccgtgagcagcgccctgctgttcagcctgctgtgcgaggccagcaccgtggtgctgctgaacagcaccgacagcagcccccccaccaacaacttcaccgacatcgaggccgccctgaaggcccagctggacagcgccgacatccccaaggccagaagaaagagatacatcagccagaacgacatgatcgccatcctggactaccacaaccaggtgagaggcaaggtgttcccccccgccgccaacatggagtacatggtgtgggacgagaacctggccaagagcgccgaggcctgggccgccacctgcatctgggaccacggccccagctacctgctgagattcctgggccagaacctgagcgtgagaaccggcagatacagaagcatcctgcagctggtgaagccctggtacgacgaggtgaaggactacgccttcccctacccccaggactgcaaccccagatgccccatgagatgcttcggccccatgtgcacccactacacccagatggtgtgggccaccagcaacagaatcggctgcgccatccacacctgccagaacatgaacgtgtggggcagcgtgtggagaagagccgtgtacctggtgtgcaactacgcccccaagggcaactggatcggcgaggccccctacaaggtgggcgtgccctgcagcagctgcccccccagctacggcggcagctgcaccgacaacctgtgcttccccggcgtgaccagcaactacctgtactggttcaagtag

SEQ ID NO: 188272 - DNA, 777 bp, Artificial Sequence
  derived and/or modified sequence
atgattgccatctccgctgtaagtagcgccttgctgttttctcttctctgcgaagcttccaccgtggtgctcctgaattccacagattctagcccccccacaaataatttcaccgacatagaagccgccctgaaggcacagctcgattccgccgatatcccgaaagctcgtaggaaacgatatatatcccagaacgatatgattgcaattttagactatcacaaccaggtgcggggcaaggtgttccctccagcggcgaacatggaatacatggtgtgggatgaaaacctggccaagagcgctgaggcttgggcagccacatgtatatgggaccacggacctagctacctgctgagattcctcggccagaatctcagtgtaagaacaggcaggtaccgcagtattttacaacttgttaagccatggtatgatgaagtgaaggactacgcttttccttaccctcaagattgcaaccccagatgccccatgcggtgcttcggcccgatgtgtactcattatacacagatggtgtgggcaacctctaatcggatcggctgcgctatccacacttgtcaaaatatgaatgtgtggggatctgtatggcgtcgtgctgtttatttagtttgtaattatgctcctaagggcaactggattggcgaagcaccctataaggttggagtcccatgcagtagctgtcccccttcctacggagggtcatgtactgataatctttgctttccgggagtgacatcaaactacttgtactggttcaagtag

SEQ ID NO: 188273 - DNA, 777 bp, Artificial Sequence
  derived and/or modified sequence
atgatcgccatcagcgccgtatcctcggccctgcttttctcgctgctctgtgaagcttccaccgtcgtcctcctgaactcaactgattcctccccaccaaccaacaacttcacagatatcgaagcagccctcaaagcccagctggacagcgccgacatccctaaggcgcgccggaagaggtacatttcccagaatgacatgatcgcgatattggattaccacaatcaagtgcggggtaaggtattccctcccgcagctaacatggaatacatggtgtgggatgagaacctggccaaatccgcagaggcctgggccgcgacctgcatttgggatcacggcccgagctatctgctgcggttcctgggccagaacctctctgtacgcaccggacgttacaggagcattctgcagctggtgaagccttggtatgacgaggtcaaggactacgcattcccctatccgcaggactgcaatcctcggtgtcccatgaggtgtttcggccccatgtgcactcactatacacaaatggtgtgggcgacgtcgaatcgcatagggtgcgctattcacacctgccagaatatgaacgtctgggggagtgtttggcgccgagccgtctacctggtgtgtaactacgccccaaaggggaactggataggtgaagccccatataaggttggcgtaccttgcagctcttgccctccgtcatacggcgggtcatgtaccgacaacctctgctttccaggggttacaagcaactatctgtattggtttaaatag

SEQ ID NO: 188274 - DNA, 777 bp, Artificial Sequence
  derived and/or modified sequence
atgattgccatctctgctgtgtcctctgccctgctcttcagcctgctgtgtgaggccagcacagtggtgctgctgaacagcacagacagcagcccccccaccaacaacttcacagacatcgaggccgccctgaaggcccagctggacagcgctgacatccccaaggcccggaggaagcgctacatcagccagaatgacatgattgccatcctggactaccacaaccaggtgcggggcaaggtgtttcctcctgctgccaacatggagtacatggtgtgggatgagaacctggccaagtctgctgaggcctgggccgccacctgcatctgggaccacggccccagctacctgctgcgcttcctgggccagaacctgtctgtgaggacaggccgctaccgcagcatcctgcagctggtgaagccctggtatgatgaggtgaaggactatgccttcccctacccccaggactgcaacccccgctgccccatgcgctgcttcggccccatgtgcacccactacacccagatggtgtgggccaccagcaaccgcatcggctgtgccatccacacctgccagaacatgaatgtgtggggctctgtgtggaggagagctgtgtacctggtgtgcaactatgcccccaagggcaactggattggagaggccccctacaaggtgggcgtgccctgcagcagctgccccccatcctatggaggcagctgcacagacaacctgtgcttccctggggtgaccagcaactacctgtactggttcaagtag

SEQ ID NO: 188275 - DNA, 777 bp, Artificial Sequence
  derived and/or modified sequence
atgatcgccatcagcgccgtgagcagcgccctgctgttcagcctgctgtgcgaagcctccactgtggtcttactaaacagtaccgattcgtccccccccaccaacaactttactgacattgaggcggcccttaaggcccagcttgacagcgcagatattcctaaagcccgccggaagaggtacatctcgcaaaatgatatgatcgccattctagattaccacaatcaagtgcggggaaaagtatttcctccagctgcgaatatggaatacatggtctgggatgagaatcttgcgaagagcgcagaggcctgggcagccacatgtatctgggatcacggaccctcataccttcttcgcttccttggacagaatctcagcgtgcgtactggaagatacagatccatcctgcaactggttaagccttggtatgacgaggtgaaagattacgcatttccttatcctcaggattgcaaccccagatgccctatgcgttgcttcggtcctatgtgcacccactatacccagatggtctgggctactagtaataggattggctgcgccatccacacttgtcagaatatgaatgtgtgggggtccgtctggcgcagagcggtatatctcgtgtgcaattacgctcctaaaggcaactggattggcgaggccccttacaaggtgggcgtgccttgttcctcctgcccaccttcgtatggtggtagctgtaccgacaacctgtgtttccctggcgttactagcaactatctctactggtttaagtag

SEQ ID NO: 188276 - DNA, 777 bp, Artificial Sequence
  derived and/or modified sequence
atgatcgccatcagcgccgtgagcagcgccctgctgttcagcctgctgtgcgaagcctcaactgtcgttctgctcaacagcacagattcctcgcctcccaccaataacttcactgacatcgaggccgctctgaaggctcagctggatagcgcggacattccaaaagccagacgtaagaggtatataagtcagaacgatatgattgcgattctggattaccacaatcaggtgcgcggaaaagtgttccctcccgccgcaaatatggaatatatggtgtgggatgagaacctagcgaaatctgctgaagcctgggccgctacatgcatttgggatcatggaccgagctacctgctgcggttcctcgggcagaacctatctgttcgcacaggacgataccgctccattttacagctagtcaaaccctggtacgacgaggtgaaagactacgctttcccatatcctcaggactgtaatcctaggtgtccgatgcggtgcttcggccctatgtgtacccactacacacagatggtttgggcaacttcaaacagaattggatgtgccattcatacctgccagaatatgaatgtttggggctctgtttggaggagggcagtgtatctcgtgtgcaactacgctcccaagggcaattggattggggaagctccatataaggtgggagtcccctgtagttcctgtccaccctcttacgggggcagttgtacagacaatctgtgcttccctggtgtgacaagcaattacttgtattggttcaaatag

SEQ ID NO: 188277 - RNA, 777 nt, Artificial Sequence
  derived and/or modified sequence
augaucgccauauccgcuguaagcagcgcucuccucuucucauuacugugugaagccaguacuguuguucuucucaauuccacagacuccucaccccccaccaauaauuucacagauaucgaggccgcacugaaggcacagcuagacucugccgauauaccuaaagcuagacggaagagguacauuagucaaaacgacaugaucgccauccuggacuaucacaaccaagugagaggaaagguguucccccccgcugcaaauauggaauacauggucugggaugaaaaccuugcgaaguccgccgaggccugggcagccacaugcauuugggaucacggcccgucauauuuauuaagguuccuuggccagaaucugagcguaagaacaggacgguaucgcagcauuuuacaacugguaaaacccugguacgacgaggucaaagacuacgccuuccccuacccacaggauuguaauccccgcuguccaaugcgaugcuucggaccaauguguacucauuacacucagauggugugggcuaccuccaaucggaucggcugcgcuauucauaccugucagaauaugaauguuuggggcagcguauggcggagggcugucuaucucgucugcaacuacgcaccaaagggcaacuggaucggagaggcaccauauaaagucggugugccaugcaguucgugcccgccaucuuacggugguaguuguacggauaacuuguguuucccuggagucacuucuaauuauuuguacugguucaaguag

SEQ ID NO: 188278 - RNA, 777 nt, Artificial Sequence
  derived and/or modified sequence
augauugcuauaucugccgugagcucagcccuccucuucucccuccuuugugaagccucaacaguaguucugcugaacucuaccgacagcagccccccaacaaauaacuuuacugauauugaagcagcgcucaaggcucaacuggacucagcugacauuccaaaggccagacgaaaaagauacaucucucagaacgauaugauugcuauuuuagauuaucauaaccaggugagaggcaagguuuuucccccugccgcgaacauggaauacauggugugggaugaaaauuuggcuaaaucagccgaggcuugggccgccacuuguauuugggaccauggcccgaguuaucugcuuagauuucuggggcagaauuugagcgugcgcacaggcagguauagaucuauccuucaacuggucaaaccuugguacgaugaggugaaagacuaugccuuucccuacccucaggacuguaacccucggugccccaugagauguuucggcccaauguguacucauuacacucagaugguaugggcuacauccaauaggaucggcugcgccauccauacuugucaaaacaugaacgucuggggaaguguuuggagacgugcugucuauuugguuugcaacuacgcaccgaaaggcaacuggauaggagaggcuccauauaaagucggcgucccauguucuucaugcccucccagcuaugggggcucauguaccgauaaucuguguuuccccggggugacauccaauuacuuauacugguucaaguag

SEQ ID NO: 188279 - RNA, 777 nt, Artificial Sequence
  derived and/or modified sequence
augaucgcaauuuccgcaguguccuccgcccuucuauuuucacuccugugcgaagccucuacaguuguucuccuuaauuccaccgauagcuccccuccgaccaacaacuuuacagacaucgaagcggcauugaaagcacagcuggacuccgcagauauaccuaaagcccgacgcaagcgcuacauuagccagaacgauaugauugccauccucgacuaccauaaucagguacgcgggaagguuuuuccuccagcugcuaacauggaguacauggugugggacgagaaucucgcuaaaagcgcagaagcuugggcagcuaccuguauuugggaucacggaccuucauaccuucugcgcuuucuggggcaaaaccuuucugugcgaacaggccgguacagaucuauccuacagcuggugaagccuugguacgaugaggucaaagacuacgccuucccauauccccaggauuguaauccacggugcccaaugcguugcuuuggaccaaugugcacacauuacacccaaauggucugggcuacuucaaaucggauuggaugcgccauucacacgugccagaacaugaauguuugggggagcguauggcggcgggccguguaccuggucuguaauuaugcacccaaaggcaacuggaucggugaggcuccuuacaagguugggguaccgugcagcucuuguccacccaguuauggaggcaguugcacugauaauuuauguuuuccuggcguaacgagcaauuaucuguauugguuuaaauag

SEQ ID NO: 188280 - RNA, 777 nt, Artificial Sequence
  derived and/or modified sequence
augauugcuauaucugccgugagcucagcccuccucuucucccuccuuugugaagccucaacaguaguucugcugaacucuaccgacagcagccccccaacaaauaacuuuacugauauugaagcagcgcucaaggcucaacuggacucagcugacauuccaaaggccagacgaaaaagauacaucucucagaacgauaugauugcuauuuuagauuaucauaaccaggugagaggcaagguuuuucccccugccgcgaacauggaauacauggugugggaugaaaauuuggcuaaaucagcagaagcuugggcagccacuuguaucugggaucacgguccuaguuaucuacugagauuucucggccagaacuuauccguaagaacaggucgcuauagaagcauccugcagcuagugaagcccugguacgacgaaguaaaggacuaugcuuuuccauauccccaggauuguaacccacgguguccgaugcgauguuuuggcccaaugugcacucacuacacucagauggugugggcuacuucuaaccgcauuggcugcgcgauucacaccugucaaaacaugaaugucuggggguccguuuggaggagggcuguguaccuagucuguaacuacgcuccaaaaggcaauuggaucggcgaagcuccuuacaaggugggagucccauguucaagcugcccuccaucuuaugggggauccugcacugacaaucuuugcuucccaggcgugacuucaaauuaccuauauugguucaaauag

SEQ ID NO: 188281 - protein, 748 aa, Artificial Sequence
  derived and/or modified sequence
MDVSGQETDWRSTAFRQKLVSQIEDAMRKAGVAHSKSSKDMESHVFLKAKTRDEYLSLVARLIIHFRDIHNKKSQASVSDPMNALQSLTGGPAAGAAGIGMPPRGPGQSLGGMGSLGAMGQPMSLSGQPPPGTSGMAPHSMAVVSTATPQTQLQLQQVALQQQQQQQQFQQQQQAALQQQQQQQQQQQFQAQQSAMQQQFQAVVQQQQQLQQQQQQQQHLIKLHHQNQQQIQQQQQQLQRIAQLQLQQQQQQQQQQQQQQQQALQAQPPIQQPPMQQPQPPPSQALPQQLQQMHHTQHHQPPPQPQQPPVAQNQPSQLPPQSQTQPLVSQAQALPGQMLYTQPPLKFVRAPMVVQQPPVQPQVQQQQTAVQTAQAAQMVAPGVQVSQSSLPMLSSPSPGQQVQTPQSMPPPPQPSPQPGQPSSQPNSNVSSGPAPSPSSFLPSPSPQPSQSPVTARTPQNFSVPSPGPLNTPVNPSSVMSPAGSSQAEEQQYLDKLKQLSKYIEPLRRMINKIDKNEDRKKDLSKMKSLLDILTDPSKRCPLKTLQKCEIALEKLKNDMAVPTPPPPPVPPTKQQYLCQPLLDAVLANIRSPVFNHSLYRTFVPAMTAIHGPPITAPVVCTRKRRLEDDERQSIPSVLQGEVARLDPKFLVNLDPSHCSNNGTVHLICKLDDKDLPSVPPLELSVPADYPAQSPLWIDRQWQYDANPFLQSVHRCMTSRLLQLPDKHSVTALLNTWAQSVHQACLSAA

SEQ ID NO: 188282 - protein, 722 aa, Artificial Sequence
  derived and/or modified sequence
MRKAGVAHSKSSKDMESHVFLKAKTRDEYLSLVARLIIHFRDIHNKKSQASVSDPMNALQSLTGGPAAGAAGIGMPPRGPGQSLGGMGSLGAMGQPMSLSGQPPPGTSGMAPHSMAVVSTATPQTQLQLQQVALQQQQQQQQFQQQQQAALQQQQQQQQQQQFQAQQSAMQQQFQAVVQQQQQLQQQQQQQQHLIKLHHQNQQQIQQQQQQLQRIAQLQLQQQQQQQQQQQQQQQQALQAQPPIQQPPMQQPQPPPSQALPQQLQQMHHTQHHQPPPQPQQPPVAQNQPSQLPPQSQTQPLVSQAQALPGQMLYTQPPLKFVRAPMVVQQPPVQPQVQQQQTAVQTAQAAQMVAPGVQVSQSSLPMLSSPSPGQQVQTPQSMPPPPQPSPQPGQPSSQPNSNVSSGPAPSPSSFLPSPSPQPSQSPVTARTPQNFSVPSPGPLNTPVNPSSVMSPAGSSQAEEQQYLDKLKQLSKYIEPLRRMINKIDKNEDRKKDLSKMKSLLDILTDPSKRCPLKTLQKCEIALEKLKNDMAVPTPPPPPVPPTKQQYLCQPLLDAVLANIRSPVFNHSLYRTFVPAMTAIHGPPITAPVVCTRKRRLEDDERQSIPSVLQGEVARLDPKFLVNLDPSHCSNNGTVHLICKLDDKDLPSVPPLELSVPADYPAQSPLWIDRQWQYDANPFLQSVHRCMTSRLLQLPDKHSVTALLNTWAQSVHQACLSAA

SEQ ID NO: 188283 - protein, 561 aa, Artificial Sequence
  derived and/or modified sequence
MRHCINCCIQLLPDGAHKQQVNCQGGPHHGHQACPTCKGENKILFRVDSKQMNLLAVLEVRTEGNENWGGFLRFKKGKRCSLVFGLIIMTLVMASYILSGAHQELLISSPFHYGGFPSNPSLMDSENPSDTKEHHHQSSVNNISYMKDYPSIKLIINSITTRIEFTTRQLPDLEDLKKQELHMFSVIPNKFLPNSKSPCWYEEFSGQNTTDPYLTNSYVLYSKRFRSTFDALRKAFWGHLAHAHGKHFRLRCLPHFYIIGQPKCGTTDLYDRLRLHPEVKFSAIKEPHWWTRKRFGIVRLRDGLRDRYPVEDYLDLFDLAAHQIHQGLQASSAKEQSKMNTIIIGEASASTMWDNNAWTFFYDNSTDGEPPFLTQDFIHAFQPNARLIVMLRDPVERLYSDYLYFASSNKSADDFHEKVTEALQLFENCMLDYSLRACVYNNTLNNAMPVRLQVGLYAVYLLDWLSVFDKQQFLILRLEDHASNVKYTMHKVFQFLNLGPLSEKQEALMTKSPASNARRPEDRNLGPMWPITQKILRDFYRPFNARLAQVLADEAFAWKTT

SEQ ID NO: 188284 - protein, 207 aa, Artificial Sequence
  derived and/or modified sequence
MRHCINCCIQLLPDGAHKQQVNCQGGPHHGHQACPTCKGENKILFRVDSKQMNLLAVLEVRTEGNENWGGFLRFKKGKRCSLVFGLIIMTLVMASYILSGAHQELLISSPFHYGGFPSNPSLMDSENPSDTKEHHHQSSVNNISYMKDYPSIKLIINSITTRIEFTTRQLPDLEDLKKQELHMFSVIPNKFLPKHNAQAELGLNVAC

SEQ ID NO: 188285 - DNA, 1686 bp, Artificial Sequence
  derived and/or modified sequence
atgaggcactgcattaactgctgcatccagctgctgccagacggtgcacacaagcagcaggtcaactgtcagggcggacctcaccatggccaccaggcctgtccaacgtgcaaaggcgaaaacaaaattctgttccgagtcgatagtaagcaaatgaatctgttagcagtcctggaggtgcgcaccgaagggaacgaaaattggggcgggtttctccggttcaagaagggcaaacggtgctctctcgttttcggcttgattattatgacacttgtgatggcctcctacattcttagtggcgcccaccaggagctgcttattagcagccccttccactacggcgggtttccgtccaatcctagcctgatggactctgaaaaccctagcgacaccaaagagcaccatcatcaatcctcggttaataatatctcctatatgaaagattatccgtctattaaacttatcatcaattccatcacgaccaggatcgagttcactactaggcagttgcccgaccttgaagacctgaagaagcaggagctgcatatgttcagcgtgattcccaacaagttcctacctaactctaagagcccctgctggtatgaggagttcagcggccagaataccacagatccatacttgaccaacagttacgtgctgtactccaaaagatttcggtctacctttgatgccctcagaaaagctttttggggtcacttagctcacgcccacggaaagcacttccgcctgcgttgcctgcctcatttttacattattggacagcccaagtgcggaaccactgatctgtacgaccgtctgaggcttcaccccgaggtgaaattcagcgccatcaaagaacctcactggtggacaagaaagcgctttggaatagtacgtttgcgggatggcctaagggacaggtatcccgtggaagattacctggatctgttcgacctcgccgcccatcagattcatcagggactgcaggcaagcagcgccaaagaacagtcaaagatgaacaccatcattatcggtgaagcatccgcttcaactatgtgggacaataatgcttggacctttttttacgacaacagcaccgatggcgaaccgccattcctaacccaagatttcatccacgcgtttcaacccaatgcacgcctgatcgtcatgctgagagatcctgtcgaaaggttatactccgattatctatactttgcttcctcaaacaaaagcgctgatgacttccacgaaaaggtcactgaggcacttcagctgtttgaaaattgtatgctcgattattctcttagggcctgcgtttacaacaacacactgaacaacgctatgcctgttcgactgcaggttggtctgtatgcagtctatctcctggactggctttctgtttttgataaacagcagttcctgattctgagactcgaggaccacgccagcaatgtcaaatatacgatgcataaagtgtttcagttcctgaatttaggacccctttcagagaaacaagaagcacttatgactaagtctccagcaagcaatgccaggagacccgaagatagaaacctgggacctatgtggcccatcacacagaaaattttgcgggacttctatcgtccgttcaatgcccgcctggctcaggtgctcgcggatgaggcatttgcttggaaaactacatag

SEQ ID NO: 188286 - DNA, 1686 bp, Artificial Sequence
  derived and/or modified sequence
atgcggcactgcataaactgttgtattcagttacttcccgatggagctcacaagcagcaggtcaattgccagggtgggcctcatcatggtcatcaggcctgcccaacctgcaaaggggagaataagattctctttagggtcgacagcaaacagatgaaccttttggcagtgctggaggtcagaaccgaagggaacgagaactggggtggttttttaaggtttaaaaaagggaagagatgttcattagtgttcggccttattataatgaccctggtcatggcctcctacattctaagcggagcccaccaggaattgcttattagctcccccttccactacggtgggtttccgtcgaaccccagccttatggactcagagaatcctagcgacacaaaggaacatcatcatcagagctcagtaaacaacatttcgtacatgaaggattatccctccataaaactgattatcaacagcatcactacacggatcgagttcaccactagacagctaccagacctcgaggatctcaagaagcaggagttgcatatgtttagcgttattccaaacaaatttctccctaactccaagtcaccttgctggtacgaagagttctctggacagaatactaccgatccatacctgactaactcgtacgttctttacagtaaaagatttcgatctacctttgatgcgctaaggaaagccttctggggacacttggctcacgctcacggaaagcattttcgtctgaggtgcttgcctcatttctatatcattggccagccgaaatgtggcaccaccgatttgtacgataggctccgcctgcatcctgaggtaaaattcagcgcaatcaaagaaccccattggtggacaaggaagaggttcggtattgttaggttacgagatggcctcagggacaggtatcctgttgaagattatttggatctcttcgatctcgcggctcatcagatccatcaagggctacaggccagtagtgcaaaggagcagagtaagatgaatacaattataattggtgaggctagcgctagcaccatgtgggataacaatgcgtggaccttcttctatgacaactctaccgatggagaacccccctttctaacgcaggattttatacatgctttccagcctaatgcccgtctaatagtaatgctaagagatcccgtggagcggctgtactccgattacctctactttgcctccagtaacaagagtgctgacgacttccatgagaaagtaacagaggcactacaattgttcgaaaactgtatgctggattactcactgcgggcctgcgtttacaataataccctgaacaacgctatgccagtgaggctgcaggtggggttgtacgccgtgtatctgctggactggttaagcgttttcgacaaacaacagtttctgattctgcgcctggaggatcatgcctccaacgttaagtacacgatgcacaaagttttccaatttttgaaccttggcccgttgtcagaaaagcaggaggccttgatgactaagtcacccgcctcaaacgcgcgccgtccagaggaccgcaatttgggaccaatgtggcccattacacagaaaattctgcgcgacttttaccgtccattcaatgcacgcttggcccaagttctggcggacgaagcattcgcatggaagaccacctag

SEQ ID NO: 188287 - DNA, 1449 bp, Artificial Sequence
  derived and/or modified sequence
atgaggcactgcatcaactgttgcatacaactgctgcccgatggagcccataaacagcaggtcaattgccagggtggaccccatcatggtcatcaggcatgccccacctgcaagggagaaaacaagattctgttccgcgtggactcgaaacagatgaacttgctggctgtgctggaagtccgcacagaggggaatgaaaactggggtggattcttgcgcttcaagaaaggtaagcggtgcagcctcgtgtttggcctgatcattatgactttagttatggcttcttatatcttgagcggagctcatcaggaattgcttatcagctctcctttccattacggaggctttcccagcaacccttctctgatggactcggagaacccttccgacaccaaagaacatcaccatcagagctctgttaataacatttcctatatgaaagactatccatctatcaaactgattataaacagtataacaacccggattgaatttacaaccaggcagctaccggaccttgaggatctaaagaagcaagagctgcacatgttcagcgttattccaaataaatttttgcccaacagcaaaagcccttgctggtacgaagaattttcaggccagaacaccacagatccctatctcactaatagttacgtgctgtactccaaacggttcaggagtacatttgatgccctcaggaaagctttctgggggcacctggcccacgcccatggtaagcactttaggctgagatgccttccacacttttacatcatcggacagcccaaatgcggcaccacagatctttatgaccgcctgcggttgcaccccgaagtgaaatttagtgccattaaggaaccccattggtggactcgcaagcgctttggtattgtcagactccgggacggccttcgtgacaggtaccccgtcgaggattatctcgacttgttcgacctggccgcgcaccagattcatcaaggtttacaggcaagtagtgcgaaggagcagtccaaaatgaacaccatcatcattggggaggcgtccgccagtaccatgtgggataacaacgcgtggacattcttttacgacaactccacagacggcgaaccaccattcctgacccaggactttattcatgcatttcagccgaatgctagacttatcgttatgctgcgcgatcccgtggaacgcctgtacagcgactacctgtatttcgccagtagcaacaagtccgcagacgattttcatgaaaaagtgacagaggcgttgcagctgttcgagaactgtatgctagactattctctccgggcttgtgtgtataacaatacccttaacaacgcaatgccagtgtgcacgcctcccccagtaccacccgaattggcgcctgggaggcggagctggttcgttgtgatcatgcaggctgcgctttgggtttgcgtcagcgcctag

SEQ ID NO: 188288 - DNA, 1686 bp, Artificial Sequence
  derived and/or modified sequence
atgaggcactgcatcaactgctgcatccagctgctgcctgatggagcccacaagcagcaggtgaactgccagggcggcccccaccacggccaccaggcctgccccacctgcaagggggagaacaagatcctcttccgggtggacagcaagcagatgaacctgctggccgtgctggaggtgaggacagagggcaatgaaaactggggcggcttcctgcgcttcaagaagggcaagcgctgcagcctggtgtttggcctcatcatcatgaccctggtgatggccagctacatcctgagcggggcccaccaggagctgctgatcagcagccccttccactatggaggcttccccagcaaccccagcctgatggattctgagaaccccagcgacaccaaggagcaccaccaccagagctctgtgaacaacatctcctacatgaaggactaccccagcatcaagctgatcatcaacagcatcaccaccagaattgagttcaccacccggcagctgcctgacctggaggacctgaagaagcaggagctgcacatgttttctgtcatccccaacaagttcctgcccaacagcaagagcccctgctggtatgaggagttcagcggccagaacaccacagacccctacctgaccaacagctatgtgctgtacagcaagcgcttccgcagcacctttgatgccctgaggaaggccttctggggccacctggcccacgcccacggcaagcacttccggctgcgctgcctgccccacttctacatcatcggccagcccaagtgtggcaccacagacctgtatgaccggctgcggctgcaccctgaggtgaagttcagcgccatcaaggagccccactggtggaccaggaagagatttggaattgtgcggctgagagatggcctgcgggaccgctaccctgtggaggactacctggacctgtttgacctggccgcccaccagatccaccagggcctgcaggccagcagcgccaaggagcagagcaagatgaacaccatcatcatcggggaggccagcgccagcaccatgtgggacaacaatgcctggaccttcttctatgacaacagcacagatggagagccccccttcctgacccaggacttcatccacgccttccagcccaatgcccggctcatcgtgatgctgcgggaccctgtggagcggctgtacagcgactacctgtactttgccagcagcaacaagtctgcagatgacttccacgagaaggtgacagaggccctgcagctgtttgagaactgcatgctggactacagcctgcgggcctgtgtgtacaacaacaccctgaacaatgccatgcctgtgcggctgcaggtgggcctgtatgctgtgtacctgctggactggctgtctgtgtttgacaagcagcagttcctgatcctgcggctggaggaccacgccagcaatgtgaagtacaccatgcacaaggtgttccagttcctgaacctgggccccctgtctgagaagcaggaggccctgatgaccaagagccctgccagcaatgcccggcggccagaagatagaaacctgggccccatgtggcccatcacccagaagatcctgcgggacttctaccggcccttcaatgcccggctggcccaggtgctggctgatgaggcctttgcctggaagaccacctag

SEQ ID NO: 188289 - DNA, 1449 bp, Artificial Sequence
  derived and/or modified sequence
atgaggcactgcatcaactgctgcatccagctgctgcctgatggagcccacaagcagcaggtgaactgccagggcggcccccaccacggccaccaggcctgccccacctgcaagggggagaacaagatcctcttccgggtggacagcaagcagatgaacctgctggccgtgctggaggtgaggacagagggcaatgaaaactggggcggcttcctgcgcttcaagaagggcaagcgctgcagcctggtgtttggcctcatcatcatgaccctggtgatggccagctacatcctgagcggggcccaccaggagctgctgatcagcagccccttccactatggaggcttccccagcaaccccagcctgatggattctgagaaccccagcgacaccaaggagcaccaccaccagagctctgtgaacaacatctcctacatgaaggactaccccagcatcaagctgatcatcaacagcatcaccaccagaattgagttcaccacccggcagctgcctgacctggaggacctgaagaagcaggagctgcacatgttttctgtcatccccaacaagttcctgcccaacagcaagagcccctgctggtatgaggagttcagcggccagaacaccacagacccctacctgaccaacagctatgtgctgtacagcaagcgcttccgcagcacctttgatgccctgaggaaggccttctggggccacctggcccacgcccacggcaagcacttccggctgcgctgcctgccccacttctacatcatcggccagcccaagtgtggcaccacagacctgtatgaccggctgcggctgcaccctgaggtgaagttcagcgccatcaaggagccccactggtggaccaggaagagatttggaattgtgcggctgagagatggcctgcgggaccgctaccctgtggaggactacctggacctgtttgacctggccgcccaccagatccaccagggcctgcaggccagcagcgccaaggagcagagcaagatgaacaccatcatcatcggggaggccagcgccagcaccatgtgggacaacaatgcctggaccttcttctatgacaacagcacagatggagagccccccttcctgacccaggacttcatccacgccttccagcccaatgcccggctcatcgtgatgctgcgggaccctgtggagcggctgtacagcgactacctgtactttgccagcagcaacaagtctgcagatgacttccacgagaaggtgacagaggccctgcagctgtttgagaactgcatgctggactacagcctgcgggcctgtgtgtacaacaacaccctgaacaatgccatgcctgtgtgcaccccacctcctgtgcccccagagctggcccctggccgccgctcctggtttgtggtgatcatgcaggccgccctgtgggtgtgtgtgtctgcctag

SEQ ID NO: 188290 - DNA, 1686 bp, Artificial Sequence
  derived and/or modified sequence
atgcggcactgcatcaactgctgcatccagctgctgcccgacggcgcccacaagcagcaggtgaattgccagggtggaccacaccatggacaccaggcctgtcccacctgtaagggggagaacaaaattctgtttagggtcgatagtaagcagatgaaccttcttgcagtactggaagtgcgtaccgaaggaaatgagaactgggggggcttcttgcggttcaagaaggggaagcggtgctcactggtcttcggtcttatcatcatgaccctcgtaatggcatcttatattctgagcggcgctcaccaagaactgctgatttcatcccctttccattacggaggctttccatctaatcccagccttatggactcggagaatccttcggacacgaaggaacaccaccaccagtccagtgtaaacaatatttcttacatgaaggattacccctccatcaaactaataattaattccatcacgacaaggatcgaatttaccacacgccagctgcccgatctggaagatctgaaaaaacaggaactgcacatgttcagtgtgatacccaacaagtttttgcccaattccaaaagcccgtgctggtatgaagagttcagtggacagaacaccacagatccatacctgacaaacagttatgtgctctactctaagcgatttcgttccacctttgacgccctgaggaaagcgttctggggccacttggctcacgcacacggaaagcacttccgtctgcgatgcctaccacacttctacataattggccagcccaagtgtgggactaccgatctgtatgatcgccttcggctgcatcctgaggttaaattcagtgccattaaagagcctcactggtggacgcggaagcggtttggcatcgtaaggttacgggatgggcttagagacagatatcccgtcgaagattacctggacctttttgacctcgcggcccatcagattcatcaggggctccaggcctccagtgccaaagagcaaagtaagatgaataccatcattattggcgaagcaagtgccagcacgatgtgggataataatgcctggaccttcttttatgacaactcaacggatggcgagccacctttccttacacaggactttatccacgcgtttcagccgaatgcacggttaatcgtcatgctgcgtgatccagtggagcggttgtattccgactacctgtatttcgcttctagcaataagagtgctgatgacttccacgaaaaggtcaccgaagcactgcagctatttgaaaattgcatgctagattacagcctgagagcttgcgtttataataacaccctaaacaatgctatgccagtgaggctccaggtgggcctctatgctgtctatcttctggactggctctcagtcttcgacaagcagcagttcctgatcctacggctggaggaccacgcatctaatgtgaaatacacaatgcacaaagtattccagtttctgaacctcggccccttatctgaaaagcaggaggccctgatgacaaagtcccccgcttccaatgcacgcagaccagaggaccgaaacctgggccccatgtggccaattacacaaaagattttgagagatttctatcgaccctttaatgcccgcttggcgcaagtcctggcagacgaggcttttgcctggaagactacatag

SEQ ID NO: 188291 - DNA, 1686 bp, Artificial Sequence
  derived and/or modified sequence
atgcggcactgcatcaactgctgcatccagctgctgcccgacggcgcccacaagcaacaggttaactgccagggcggcccacatcatgggcaccaggcctgcccaacctgtaaaggagaaaacaaaatcttgtttcgggtcgatagtaaacagatgaatttgttggctgtgttggaggtgaggaccgagggtaatgaaaattggggagggttcttacgattcaagaaaggaaaaagatgcagcttggtcttcggattgataattatgacactggtgatggccagctatattctcagcggggctcatcaggaattattgatttcatctccttttcactatggcggattcccctcaaatccttctctgatggatagcgagaatccatctgacaccaaggagcatcaccaccagagttcagtgaacaacatctcatacatgaaggactacccctccatcaagctgattattaactccattaccaccagaatagaattcactacaagacagttacctgacttagaagatcttaaaaagcaggagctgcacatgttttccgtaattccgaataaattcctgccaaattccaaatcaccctgttggtacgaggagttttcaggccagaacacaaccgatccgtatttgactaatagttacgtgttatactccaagaggtttcgatccacgttcgatgctctgagaaaggcattttggggtcatttggcccacgcgcatggcaagcacttcagactgcgctgcttaccgcacttttacatcatcggacagcccaaatgcgggaccaccgatctgtacgatagactgcgcttgcacccagaggtgaagttcagtgcgataaaagagccccactggtggacaaggaaacggttcggcatcgtgcgccttagggatgggctgagggacagataccccgtggaagattacttggacctgtttgacttagcagcccatcagattcaccaggggcttcaagcttcctccgccaaagaacagtctaagatgaatactatcatcatcggggaggctagcgcctctactatgtgggacaacaatgcctggacgttcttctacgacaacagcaccgacggggagccccctttcctgacccaagacttcatccacgcctttcagccaaatgctaggctgatcgtcatgctgagagatccagtcgaacgtctctacagcgattacctgtacttcgccagctcaaacaaaagcgccgacgacttccacgaaaaagtaaccgaagcactccagcttttcgaaaactgtatgttggattactctctgagggcctgcgtgtataataacaccctgaacaacgctatgcccgtgagactgcaggttgggttgtatgccgtgtatctccttgattggttgtcagtctttgacaaacagcagtttctgatcctgaggctcgaagatcatgcctcaaacgtgaagtatacaatgcacaaagtctttcaatttctgaacctggggcccctttctgagaagcaggaggctttgatgactaagtcacccgctagcaacgcccgccgccccgaagatagaaaccttggcccaatgtggccaattactcagaagattctgcgggacttctacagaccattcaatgcccgccttgctcaggtacttgccgacgaggctttcgcttggaaaacaacatag

SEQ ID NO: 188292 - DNA, 1449 bp, Artificial Sequence
  derived and/or modified sequence
atgcggcactgcatcaactgctgcatccagctgctgcccgacggcgcccataaacagcaagttaattgccaaggcggcccgcatcacggtcaccaggcttgccccacatgtaaaggtgaaaataaaattctgtttcgtgtggatagcaagcagatgaatctgttggctgtgcttgaagtaagaactgagggcaacgagaattggggagggtttcttcggtttaagaagggcaaacggtgttccctggtgtttggacttatcattatgacactcgtcatggcctcgtacatactctcaggagcccaccaggagttgctcattagtagtcccttccactatggcggattccccagcaacccatcccttatggacagcgaaaatcccagcgacacaaaagagcatcatcaccagagctctgtcaataacatctcatatatgaaggactatcccagcattaaactcatcattaactccataacaacaaggatagaatttactacaaggcagctaccagacctagaggacttgaagaagcaagagctgcatatgttcagcgtgataccgaacaaatttctgcctaattcgaaatcaccttgttggtacgaagagtttagcggacagaatacaacagacccttacctcacaaatagctacgtactctactctaaaaggttccgaagtacgtttgacgccttgaggaaagctttttggggacacctcgcacatgcgcatgggaaacacttccgactccgatgcctcccacatttctatattatcggccagcctaagtgtggcaccaccgatttgtacgaccgcttaagacttcaccccgaggtgaaattcagcgcaatcaaagaacctcattggtggactcgcaaacgctttggcattgttaggctgcgagacggactcagagatagatatcccgttgaggactatctcgacttgtttgacctggctgctcatcagattcatcaggggcttcaggcatcgtccgctaaagagcagtcgaaaatgaatactatcataattggggaagcatctgcctcaaccatgtgggacaataatgcttggactttcttctatgataacagcaccgatggggaacccccatttctgacgcaggacttcattcacgcctttcaaccgaatgccaggctcattgtgatgctgagagatcccgtggagagactctatagcgattatctgtatttcgcctcatccaataaatctgctgatgatttccacgagaaagtgactgaggcactgcaactcttcgagaactgcatgctcgattactccctgagggcttgtgtctacaataatacattgaataatgcaatgccggtctgtactcccccccctgttcccccagagctggcacccggccggcgttcctggtttgtcgtgatcatgcaggccgccctgtgggtgtgtgtaagcgcatag

SEQ ID NO: 188293 - DNA, 1686 bp, Artificial Sequence
  derived and/or modified sequence
atgcgacactgtatcaattgttgtatacagctactaccggacggggctcacaaacagcaggtgaactgccagggcggtcctcaccatggtcatcaggcatgccctacctgcaaaggggaaaataagattctcttccgggtcgatagcaagcaaatgaacctcctggctgtacttgaggtgcgcacagaagggaacgagaactggggcggtttcctacgtttcaagaaaggtaagagatgttctctggtgttcggactcatcatcatgaccctggtgatggcctcctacatcttgtccggcgcacaccaggagctgctgatcagtagcccttttcattatggcggatttcccagcaatcctagtctaatggactctgaaaatcccagtgacacaaaagagcatcaccaccagtcatcagttaacaatataagctacatgaaggactacccatcaatcaagcttattatcaactccattaccaccagaattgaatttaccaccaggcagctgcccgatcttgaagaccttaagaaacaggagcttcatatgttctctgttattcctaataagttcctcccaaattctaaaagcccatgttggtacgaagagttttccggccagaacacaaccgacccttacttaactaattcttacgtgctttatagcaagcggttccgtagtaccttcgatgcgctgagaaaggccttctggggtcacctagcgcacgcacatggtaaacacttccggctgagatgtctaccccacttctatatcataggccagcctaagtgcggcactactgatctgtacgaccgcctgagattgcatcccgaggttaagttttcagccattaaggaaccgcactggtggacgcgaaagcggttcgggatcgtgagactacgcgacggcctgagagaccgttatccagtcgaagattacctcgatctcttcgacctcgcggcacaccagatccaccaaggtctgcaggcctccagcgctaaggaacagtcaaagatgaacaccataatcattggcgaggcgtccgcttccacaatgtgggataacaatgcctggacattcttttatgacaactctaccgacggcgagcctccctttctcacacaggatttcatccatgcttttcaacccaacgctcggctcattgttatgctgcgagatccagtcgaaagactgtattctgattatctgtactttgcttcgtccaataaatcggctgacgatttccatgaaaaagtaactgaagctttacagctgtttgaaaattgtatgctggattactctttgcgtgcctgtgtgtataacaacaccctgaacaacgcaatgcctgtgagacttcaggtggggctgtacgccgtttaccttctggactggctgagcgtgttcgataagcaacaattcctgatcttacggctcgaggatcatgcctcaaatgtcaaatatacaatgcataaggtttttcaattcctgaacctggggcctttatcagaaaaacaggaggctcttatgactaaatctcccgctagtaacgctagaaggccggaggatcggaatttgggcccaatgtggccgatcactcagaagatactcagagatttttaccgcccttttaacgctaggctggcccaggtgctcgctgacgaagccttcgcctggaagaccacttag

SEQ ID NO: 188294 - DNA, 1686 bp, Artificial Sequence
  derived and/or modified sequence
atgaggcactgtatcaattgctgcatacagttgcttccagatggcgctcacaagcagcaagttaattgtcagggcggtccgcatcacggacaccaagcttgtcccacgtgcaaaggcgagaataagatcctgtttcgggtcgacagcaaacagatgaacctgcttgctgtcttagaggtcaggactgaggggaatgaaaattggggcggattccttcggttcaagaagggcaagcgctgcagcctggtgtttgggctgatcattatgactctggtgatggcatcctatatcctctccggggctcatcaggagcttctcattagctctccattccactacgggggatttccttcaaatccaagtctgatggacagcgagaacccctctgatacaaaagaacaccaccatcagtcctctgtgaacaatatcagttatatgaaggattaccccagcataaagttaattatcaacagcatcacgactaggattgaattcaccactaggcagctgccagaccttgaggatttgaagaagcaagagttgcacatgtttagtgtgattcctaacaagtttcttcctaactcaaagtccccctgttggtacgaggagtttagtggccagaatactactgatccgtatctaacaaacagctacgttctgtatagtaaaagatttaggtcaaccttcgacgcactcaggaaggcgttttgggggcacctcgcccacgcacacggaaagcactttaggctgcggtgtctgccccacttttacatcattggccaacccaaatgtgggacgaccgacctttatgataggctaaggctgcatcctgaagtgaaattttctgccatcaaagaaccacactggtggacccgcaaacgtttcggaatcgtgagactgagagatggtctgcgggacagataccctgtcgaagactatcttgatctgtttgacctcgcagctcaccaaatacatcagggacttcaagcatcttccgccaaggaacagagtaagatgaataccattataatcggcgaggcatctgcaagcactatgtgggacaacaacgcatggaccttcttctacgacaattctaccgacggggaacctccttttctaactcaagactttatccacgcatttcagccaaatgctcggctaatcgttatgttgcgggaccccgttgagcgcttgtattctgactatctctacttcgccagttctaacaagagtgcagatgatttccatgaaaaagttacggaagctcttcagttgtttgagaattgtatgctggattatagcctccgcgcttgcgtttataacaatacccttaataacgccatgccggtccgactgcaggtcggcctgtatgccgtttatctgctagattggctgtcagtctttgacaaacagcagttcttgatccttagactggaagaccatgcgtctaacgtaaagtataccatgcacaaggtgttccagttcctaaatctaggtcctcttagcgagaagcaggaagcgctgatgacaaagagtcctgcgtctaacgcccgtcgccctgaggatcgcaatttgggaccaatgtggcctattacacagaagatcttgagggatttttacaggccctttaatgccagactcgctcaggtgctggctgatgaagcgttcgcttggaagacaacctag

SEQ ID NO: 188295 - DNA, 1449 bp, Artificial Sequence
  derived and/or modified sequence
atgcgacactgcatcaactgttgcatccagcttttgcccgatggcgcacataaacagcaggtgaactgccaagggggtccacatcacggccaccaggcgtgtcctacttgtaagggcgagaataagatcctattcagggtggactccaagcaaatgaatctgctcgcagtgctggaggtgaggactgaaggcaacgagaattggggcggtttccttaggtttaagaagggtaagagatgctcacttgtgtttggtctgataattatgaccctggtcatggcctcctatatcctttctggggcacatcaggagctgttgatttcttcaccattccactatgggggtttcccatccaatccaagcctcatggattccgaaaatccttctgacacaaaagagcatcaccatcagagctccgtgaacaatatctcgtacatgaaagattatccaagcatcaagttaattattaattcgattacgacgcggatagagttcaccaccagacagctccccgatttagaggacttgaagaaacaggagcttcacatgtttagcgtcattcccaacaaattcctcccaaattctaaatccccctgttggtacgaggagttctcgggccagaacaccactgacccttatctcacaaacagctacgttctatactccaagagatttcggagcacttttgatgcccttcgcaaggcattctggggacacctggcacacgcccatggaaagcacttcagactgcgttgtctaccacacttttacattattgggcagcccaaatgtggcacaacagacctgtacgataggctaagacttcatcccgaagtaaagttttcagccattaaagaaccccactggtggaccaggaaaaggttcggcattgtgagattaagggacgggcttcgagaccggtaccccgttgaggattatctcgacttatttgacctggcagctcaccaaatccaccagggattacaggcatcttccgcaaaagaacagagtaaaatgaataccataatcatcggggaggcctccgcctcgaccatgtgggacaacaacgcctggaccttcttctacgataactccactgacggagagcctccgttcctcacacaggacttcatacatgcctttcagccgaatgcacgcttgatcgtgatgctgagagatccagttgagcgcttatatagtgactacctatactttgcttcttctaataagtccgccgacgattttcatgagaaggtcactgaggccctccagctgttcgagaattgcatgctggactacagccttcgagcctgcgtctataacaatacattgaacaacgccatgcccgtttgcacgcctcctccggtgccccctgagctggctcccggacgacgtagctggttcgtggtgatcatgcaggccgctctgtgggtgtgtgtgagcgcatag

SEQ ID NO: 188296 - DNA, 4810 bp, Artificial Sequence
  derived and/or modified sequence
gtcccctccctgcgccccgccgcgtctcgggaggcggcgtgactcgggagttgccggcgcttcccggcggtggcggcgtctctggccggccttggtgcggcgagccgagcgaggcagctctgagccgcgcggaaatctggcattttttaaagtttgcgccccacaaagaggaaatattccaaaggtactcaggatgtaaaaggggagatcttcacagatgcctccgtggatggcatggcaatccatccatcaatgagaagaccatgatttcttttaattttctgtgtgtttccacattccccagtgagaattcttccacctttttttgtgccatgggaaaaacctgaagggcaggcagagctgctcccgaacttgtgaccttctctgaggttgcagcggctcttgtagaacatgactctgggacatcacttccttttgttttctttcggagctgaaccaaagaatgtgcaccctctttctctagtgctgtggtgtctgcttatttttgtatttgtgctttccatccatcttctgtgatcacaaggcattcttaaggttttctagcacgacttgcggacatccagactcgtggggggcccacccatggctcggtaagccagcagcccagggcactggcactaccatgaggcactgcattaattgctgcatacagctgttacccgacggcgcacacaagcagcaggtcaactgccaagggggcccccatcacggtcaccaggcgtgccccacgtgcaaaggagaaaacaaaattctgtttcgtgtggacagtaagcagatgaacttgcttgctgttctcgaagtgaggactgaagggaacgaaaactggggtgggtttttgcgcttcaaaaaggggaagcgatgtagcctcgtttttggactgataataatgaccttggtaatggcttcttacatcctttctggggcccaccaagagcttctgatctcatcacctttccattacggaggcttccccagcaaccccagcttgatggacagcgaaaacccaagtgacacaaaggagcatcaccaccaatcctctgtaaataatatttcatacatgaaggactatccaagcattaaattaattatcaacagcatcacaactaggattgagttcacgaccagacagctcccagacttagaagaccttaagaagcaggagttgcatatgttttcagtcatccccaacaaattccttccaaacagtaagagcccctgttggtacgaggagttctcggggcagaacaccaccgacccctacctcaccaactcctacgtgctctactccaagcgcttccgctccaccttcgacgccctgcgcaaggccttctggggccacctggcgcacgcgcacgggaagcacttccgcctgcgctgcctgccgcacttctacatcatagggcagcccaagtgcgggaccacagacctctatgaccgcctgcggctgcaccctgaggtcaagttctccgccatcaaggagccacactggtggacccggaagcgctttggaatcgtccgcctaagagatgggctgcgagaccgctatcccgtggaagattatctggacctctttgacctggccgcacaccagatccatcaaggactgcaggccagctctgcaaaggagcagagcaagatgaatacaatcattatcggggaggccagtgcctccacgatgtgggataataatgcctggacgttcttctacgacaacagcacggatggcgagccaccgtttctgacgcaggacttcatccacgcctttcagccaaatgccagactgattgtcatgctcagggaccctgtggagaggttgtactcagactatctctactttgcaagttcgaataaatccgcggacgacttccatgagaaagtgacagaagcactgcagctgtttgaaaattgcatgcttgattattcactgcgcgcctgcgtctacaacaacaccctcaacaacgccatgcctgtgaggctccaggttgggctctatgctgtgtaccttctggactggctcagcgtttttgacaagcaacagtttctcattcttcgcctggaagatcatgcatccaacgtcaagtacaccatgcacaaggtcttccagtttctgaacctagggcccttaagtgagaagcaggaggctttgatgaccaagagccccgcatccaatgcacggcgtcccgaggaccggaacctggggcccatgtggcccatcacacagaagattctgcgggatttctacaggcccttcaacgctaggctggcgcaggtcctcgcggatgaggcgtttgcgtggaagacgacgtgagagctgaattgttgctgcacgtgctgggcccgccaatgccgtcatcatcaggattttacaaatctctttgcggggaactgtttcactcatggtatggaaaaccccaggactctgccactctaggcacacatgaattataaccattttggaatttccttcgtgatgttcgagagctcagcaatggacccctcacagagctcctctatccgaggccattggagaccccagtttctcaagaattcagctctgctctgagcgtcctggagcttggggatgcagccagctggcctgcactgggtgtggagagaacacctagggaaggcagcctggccctgcccgcctccgccttctggagagcctctgggttctgagtcagcaagccagaggtcatgccacaggcctggctggaacttacacttcacgttccctttttttccccctagagatggggtctcgccgtgttgcacagactgtctgtattcaatggctatcttcacaggtgtgatcataccacattcacttctgaaacactcttgttgcgatcgctaacctcactgggacagagaaccgcagtctttcgagaatggaggctcttcattttttttttctcctttactccaaactcagccctccagtttcttcagatgtaaaccctgttaacgtcactgtttccaaaaggaaaaaaataagtcagtttttggcagcaccttcatctttctgacctcctcctattctgtccttgtggacttatgtttaacatagaaaatgaatgcgtttaaaacaaaaccactttctgcatttaaccagtcctggctctctctctgctgcctcttcatacgttttctcaagaacttcagtttataattggaagagaaatttttgctgttaatgccagaatgagcaacctcaaggaattgaacacttcttggaaaatctaggtaattcaagccctcatcaggtttacaagatcatcagagaaacagaggattttaatttttagttctggccggctacaggctccatttctctgccttcccattggaaatagtttatttccacattctccactgcgtgtggtcaaagttcctcacccagcaagggactatagatactcgtgtcccaattccaaaacacaatgcacaagctgaacttgggctgaacgtggcgtgttgagatttggaatgaggtttctaagagccgtgttcttcatggaattttccaggccacttggcagcttggtttaccgatggatgggctagagatcttgtcgtttcttggaagtcacagggaagattgaagagaacgcttgagcatccttggcaacagcccaggtgggacctggatgaagctttgcactcaagtattgtcaagggaagcttcctgtgaaccaaagttctcaggccaaggtctcgcccaccaaagccagaaagtgcaagcacccgtctacccagctctaacttgtatgtgtgagacagaccaggcttcgggggtaggaggatctgcagttgttcagccgtctttctgctggtgttgtctttctgccatcagagaagggacacacagcccgttcgaaggtgtgcagagggctctgagcgccaggatggccagggctgtttttgctactgaaggagcgtgtgtcctgaactcccacttgcagggacagtccccaccttctctatagccggcactgggagcagccgccagcagggaaatctggcctgagcacaaggatgctttagggagagatcacttcagtgtgtgtgtatatttatttgcagtacagtgcgcgcgtgtgtgtgtgtgtacgcgcacgtgtgggtgagtgcgtcttctgagtgggttctgttcagttgctaatgaggctcctccgctctggacacaacccttttatagattaatttctctgccaattaacttgtcattttcagtacatattttactattccacaccaaccataattacaacaagggatttttcttatgcactcctatgcatgtgaataacatgtggtgtaattctgcttcttacagaagtattactgaaggtattatttccaatattatttggtttattatgcggatcttttttatatatgcagtcccatcccttctgtgccactcaatgccatccagacatggtttttccctccaggggcctttctctccagagggcacttcggctgcctctgcttcctctcattcgaggcccggctcttgctgacagaataggttccgttctgggcggtggttctcgagcctgccattcaaaaccaaagcaaattggagcatttctcacaacatggtattgaagttcctttttgttctcaaaagttgtgaccgtgttaaattgtactcccttagtcctgtaaggtatgttaagtgaatcgcagttacgctgtacttttattaatatttaacataattaaagatggacccataagagtgacgcctgtggagcgcgtgctcttcctctgcagccaa

SEQ ID NO: 188297 - DNA, 4678 bp, Artificial Sequence
  derived and/or modified sequence
ggaaatctggcattttttaaagtttgcgccccacaaagaggaaatattccaaaggtactcaggatgtaaaaggggagatcttcacagatgcctccgtggatggcatggcaatccatccatcaatgagaagaccatgatttcttttaattttctgtgtgtttccacattccccagtgagaattcttccacctttttttgtgccatgggaaaaacctgaagggcaggcagagctgctcccgaacttgtgaccttctctgaggttgcagcggctcttgtagaacatgactctgggacatcacttccttttgttttctttcggagctgaaccaaagaatgtgcaccctctttctctagtgctgtggtgtctgcttatttttgtatttgtgctttccatccatcttctgtgatcacaaggcattcttaaggttttctagcacgacttgcggacatccagactcgtggggggcccacccatggctcggtaagccagcagcccagggcactggcactaccatgaggcactgcattaattgctgcatacagctgttacccgacggcgcacacaagcagcaggtcaactgccaagggggcccccatcacggtcaccaggcgtgccccacgtgcaaaggagaaaacaaaattctgtttcgtgtggacagtaagcagatgaacttgcttgctgttctcgaagtgaggactgaagggaacgaaaactggggtgggtttttgcgcttcaaaaaggggaagcgatgtagcctcgtttttggactgataataatgaccttggtaatggcttcttacatcctttctggggcccaccaagagcttctgatctcatcacctttccattacggaggcttccccagcaaccccagcttgatggacagcgaaaacccaagtgacacaaaggagcatcaccaccaatcctctgtaaataatatttcatacatgaaggactatccaagcattaaattaattatcaacagcatcacaactaggattgagttcacgaccagacagctcccagacttagaagaccttaagaagcaggagttgcatatgttttcagtcatccccaacaaattccttccaaacagtaagagcccctgttggtacgaggagttctcggggcagaacaccaccgacccctacctcaccaactcctacgtgctctactccaagcgcttccgctccaccttcgacgccctgcgcaaggccttctggggccacctggcgcacgcgcacgggaagcacttccgcctgcgctgcctgccgcacttctacatcatagggcagcccaagtgcgggaccacagacctctatgaccgcctgcggctgcaccctgaggtcaagttctccgccatcaaggagccacactggtggacccggaagcgctttggaatcgtccgcctaagagatgggctgcgagaccgctatcccgtggaagattatctggacctctttgacctggccgcacaccagatccatcaaggactgcaggccagctctgcaaaggagcagagcaagatgaatacaatcattatcggggaggccagtgcctccacgatgtgggataataatgcctggacgttcttctacgacaacagcacggatggcgagccaccgtttctgacgcaggacttcatccacgcctttcagccaaatgccagactgattgtcatgctcagggaccctgtggagaggttgtactcagactatctctactttgcaagttcgaataaatccgcggacgacttccatgagaaagtgacagaagcactgcagctgtttgaaaattgcatgcttgattattcactgcgcgcctgcgtctacaacaacaccctcaacaacgccatgcctgtgaggctccaggttgggctctatgctgtgtaccttctggactggctcagcgtttttgacaagcaacagtttctcattcttcgcctggaagatcatgcatccaacgtcaagtacaccatgcacaaggtcttccagtttctgaacctagggcccttaagtgagaagcaggaggctttgatgaccaagagccccgcatccaatgcacggcgtcccgaggaccggaacctggggcccatgtggcccatcacacagaagattctgcgggatttctacaggcccttcaacgctaggctggcgcaggtcctcgcggatgaggcgtttgcgtggaagacgacgtgagagctgaattgttgctgcacgtgctgggcccgccaatgccgtcatcatcaggattttacaaatctctttgcggggaactgtttcactcatggtatggaaaaccccaggactctgccactctaggcacacatgaattataaccattttggaatttccttcgtgatgttcgagagctcagcaatggacccctcacagagctcctctatccgaggccattggagaccccagtttctcaagaattcagctctgctctgagcgtcctggagcttggggatgcagccagctggcctgcactgggtgtggagagaacacctagggaaggcagcctggccctgcccgcctccgccttctggagagcctctgggttctgagtcagcaagccagaggtcatgccacaggcctggctggaacttacacttcacgttccctttttttccccctagagatggggtctcgccgtgttgcacagactgtctgtattcaatggctatcttcacaggtgtgatcataccacattcacttctgaaacactcttgttgcgatcgctaacctcactgggacagagaaccgcagtctttcgagaatggaggctcttcattttttttttctcctttactccaaactcagccctccagtttcttcagatgtaaaccctgttaacgtcactgtttccaaaaggaaaaaaataagtcagtttttggcagcaccttcatctttctgacctcctcctattctgtccttgtggacttatgtttaacatagaaaatgaatgcgtttaaaacaaaaccactttctgcatttaaccagtcctggctctctctctgctgcctcttcatacgttttctcaagaacttcagtttataattggaagagaaatttttgctgttaatgccagaatgagcaacctcaaggaattgaacacttcttggaaaatctaggtaattcaagccctcatcaggtttacaagatcatcagagaaacagaggattttaatttttagttctggccggctacaggctccatttctctgccttcccattggaaatagtttatttccacattctccactgcgtgtggtcaaagttcctcacccagcaagggactatagatactcgtgtcccaattccaaaacacaatgcacaagctgaacttgggctgaacgtggcgtgttgagatttggaatgaggtttctaagagccgtgttcttcatggaattttccaggccacttggcagcttggtttaccgatggatgggctagagatcttgtcgtttcttggaagtcacagggaagattgaagagaacgcttgagcatccttggcaacagcccaggtgggacctggatgaagctttgcactcaagtattgtcaagggaagcttcctgtgaaccaaagttctcaggccaaggtctcgcccaccaaagccagaaagtgcaagcacccgtctacccagctctaacttgtatgtgtgagacagaccaggcttcgggggtaggaggatctgcagttgttcagccgtctttctgctggtgttgtctttctgccatcagagaagggacacacagcccgttcgaaggtgtgcagagggctctgagcgccaggatggccagggctgtttttgctactgaaggagcgtgtgtcctgaactcccacttgcagggacagtccccaccttctctatagccggcactgggagcagccgccagcagggaaatctggcctgagcacaaggatgctttagggagagatcacttcagtgtgtgtgtatatttatttgcagtacagtgcgcgcgtgtgtgtgtgtgtacgcgcacgtgtgggtgagtgcgtcttctgagtgggttctgttcagttgctaatgaggctcctccgctctggacacaacccttttatagattaatttctctgccaattaacttgtcattttcagtacatattttactattccacaccaaccataattacaacaagggatttttcttatgcactcctatgcatgtgaataacatgtggtgtaattctgcttcttacagaagtattactgaaggtattatttccaatattatttggtttattatgcggatcttttttatatatgcagtcccatcccttctgtgccactcaatgccatccagacatggtttttccctccaggggcctttctctccagagggcacttcggctgcctctgcttcctctcattcgaggcccggctcttgctgacagaataggttccgttctgggcggtggttctcgagcctgccattcaaaaccaaagcaaattggagcatttctcacaacatggtattgaagttcctttttgttctcaaaagttgtgaccgtgttaaattgtactcccttagtcctgtaaggtatgttaagtgaatcgcagttacgctgtacttttattaatatttaacataattaaagatggacccataagagtgacgcctgtggagcgcgtgctcttcctctgcagcc

SEQ ID NO: 188298 - DNA, 2289 bp, Artificial Sequence
  derived and/or modified sequence
gactcgggagttgccggcgcttcccggcggtggcggcgtctctggccggccttggtgcggcgagccgagcgaggcagctctgagccgcgcggaaatctggcattttttaaagtttgcgccccacaaagaggaaatattccaaaggtactcaggatgtaaaaggggagatcttcacagatgcctccgtggatggcatggcaatccatccatcaatgagaagaccatgatttcttttaattttctgtgtgtttccacattccccagtgagaattcttccacctttttttgtgccatgggaaaaacctgaagggcaggcagagctgctcccgaacttgtgaccttctctgaggttgcagcggctcttgtagaacatgactctgggacatcacttccttttgttttctttcggagctgaaccaaagaatgtgcaccctctttctctagtgctgtggtgtctgcttatttttgtatttgtgctttccatccatcttctgtgatcacaaggcattcttaaggttttctagcacgacttgcggacatccagactcgtggggggcccacccatggctcggtaagccagcagcccagggcactggcactaccatgaggcactgcattaattgctgcatacagctgttacccgacggcgcacacaagcagcaggtcaactgccaagggggcccccatcacggtcaccaggcgtgccccacgtgcaaaggagaaaacaaaattctgtttcgtgtggacagtaagcagatgaacttgcttgctgttctcgaagtgaggactgaagggaacgaaaactggggtgggtttttgcgcttcaaaaaggggaagcgatgtagcctcgtttttggactgataataatgaccttggtaatggcttcttacatcctttctggggcccaccaagagcttctgatctcatcacctttccattacggaggcttccccagcaaccccagcttgatggacagcgaaaacccaagtgacacaaaggagcatcaccaccaatcctctgtaaataatatttcatacatgaaggactatccaagcattaaattaattatcaacagcatcacaactaggattgagttcacgaccagacagctcccagacttagaagaccttaagaagcaggagttgcatatgttttcagtcatccccaacaaattccttccaaacagtaagagcccctgttggtacgaggagttctcggggcagaacaccaccgacccctacctcaccaactcctacgtgctctactccaagcgcttccgctccaccttcgacgccctgcgcaaggccttctggggccacctggcgcacgcgcacgggaagcacttccgcctgcgctgcctgccgcacttctacatcatagggcagcccaagtgcgggaccacagacctctatgaccgcctgcggctgcaccctgaggtcaagttctccgccatcaaggagccacactggtggacccggaagcgctttggaatcgtccgcctaagagatgggctgcgagaccgctatcccgtggaagattatctggacctctttgacctggccgcacaccagatccatcaaggactgcaggccagctctgcaaaggagcagagcaagatgaatacaatcattatcggggaggccagtgcctccacgatgtgggataataatgcctggacgttcttctacgacaacagcacggatggcgagccaccgtttctgacgcaggacttcatccacgcctttcagccaaatgccagactgattgtcatgctcagggaccctgtggagaggttgtactcagactatctctactttgcaagttcgaataaatccgcggacgacttccatgagaaagtgacagaagcactgcagctgtttgaaaattgcatgcttgattattcactgcgcgcctgcgtctacaacaacaccctcaacaacgccatgcctgtgtgtacccccccccccgtaccccccgagctggcccctggcagaaggagctggtttgttgttattatgcaagcggcattgtgggtttgcgtttcagcataggaacagagagaagcgttttaatgtgcaaatgctgttccccattattcatggatgtaaaagctgaaaactgatgggctcttggtctggctcctgccttcctccctgctggtcacctgccacctccccctcctccctcagcaggaggatgagggtgcctttaggaagattaccatttagcaagacacccagcaattagaatcggcagacatgaggacacccaactctcaaattgtctta

SEQ ID NO: 188299 - DNA, 1686 bp, Artificial Sequence
  derived and/or modified sequence
atgagacactgcatcaactgctgcatccagctgctgcccgacggcgcccacaagcagcaggtgaactgccagggcggcccccaccacggccaccaggcctgccccacctgcaagggcgagaacaagatcctgttcagagtggacagcaagcagatgaacctgctggccgtgctggaggtgagaaccgagggcaacgagaactggggcggcttcctgagattcaagaagggcaagagatgcagcctggtgttcggcctgatcatcatgaccctggtgatggccagctacatcctgagcggcgcccaccaggagctgctgatcagcagccccttccactacggcggcttccccagcaaccccagcctgatggacagcgagaaccccagcgacaccaaggagcaccaccaccagagcagcgtgaacaacatcagctacatgaaggactaccccagcatcaagctgatcatcaacagcatcaccaccagaatcgagttcaccaccagacagctgcccgacctggaggacctgaagaagcaggagctgcacatgttcagcgtgatccccaacaagttcctgcccaacagcaagagcccctgctggtacgaggagttcagcggccagaacaccaccgacccctacctgaccaacagctacgtgctgtacagcaagagattcagaagcaccttcgacgccctgagaaaggccttctggggccacctggcccacgcccacggcaagcacttcagactgagatgcctgccccacttctacatcatcggccagcccaagtgcggcaccaccgacctgtacgacagactgagactgcaccccgaggtgaagttcagcgccatcaaggagccccactggtggaccagaaagagattcggcatcgtgagactgagagacggcctgagagacagataccccgtggaggactacctggacctgttcgacctggccgcccaccagatccaccagggcctgcaggccagcagcgccaaggagcagagcaagatgaacaccatcatcatcggcgaggccagcgccagcaccatgtgggacaacaacgcctggaccttcttctacgacaacagcaccgacggcgagccccccttcctgacccaggacttcatccacgccttccagcccaacgccagactgatcgtgatgctgagagaccccgtggagagactgtacagcgactacctgtacttcgccagcagcaacaagagcgccgacgacttccacgagaaggtgaccgaggccctgcagctgttcgagaactgcatgctggactacagcctgagagcctgcgtgtacaacaacaccctgaacaacgccatgcccgtgagactgcaggtgggcctgtacgccgtgtacctgctggactggctgagcgtgttcgacaagcagcagttcctgatcctgagactggaggaccacgccagcaacgtgaagtacaccatgcacaaggtgttccagttcctgaacctgggccccctgagcgagaagcaggaggccctgatgaccaagagccccgccagcaacgccagaagacccgaggacagaaacctgggccccatgtggcccatcacccagaagatcctgagagacttctacagacccttcaacgccagactggcccaggtgctggccgacgaggccttcgcctggaagaccacctag

SEQ ID NO: 188300 - DNA, 1449 bp, Artificial Sequence
  derived and/or modified sequence
atgagacactgcatcaactgctgcatccagctgctgcccgacggcgcccacaagcagcaggtgaactgccagggcggcccccaccacggccaccaggcctgccccacctgcaagggcgagaacaagatcctgttcagagtggacagcaagcagatgaacctgctggccgtgctggaggtgagaaccgagggcaacgagaactggggcggcttcctgagattcaagaagggcaagagatgcagcctggtgttcggcctgatcatcatgaccctggtgatggccagctacatcctgagcggcgcccaccaggagctgctgatcagcagccccttccactacggcggcttccccagcaaccccagcctgatggacagcgagaaccccagcgacaccaaggagcaccaccaccagagcagcgtgaacaacatcagctacatgaaggactaccccagcatcaagctgatcatcaacagcatcaccaccagaatcgagttcaccaccagacagctgcccgacctggaggacctgaagaagcaggagctgcacatgttcagcgtgatccccaacaagttcctgcccaacagcaagagcccctgctggtacgaggagttcagcggccagaacaccaccgacccctacctgaccaacagctacgtgctgtacagcaagagattcagaagcaccttcgacgccctgagaaaggccttctggggccacctggcccacgcccacggcaagcacttcagactgagatgcctgccccacttctacatcatcggccagcccaagtgcggcaccaccgacctgtacgacagactgagactgcaccccgaggtgaagttcagcgccatcaaggagccccactggtggaccagaaagagattcggcatcgtgagactgagagacggcctgagagacagataccccgtggaggactacctggacctgttcgacctggccgcccaccagatccaccagggcctgcaggccagcagcgccaaggagcagagcaagatgaacaccatcatcatcggcgaggccagcgccagcaccatgtgggacaacaacgcctggaccttcttctacgacaacagcaccgacggcgagccccccttcctgacccaggacttcatccacgccttccagcccaacgccagactgatcgtgatgctgagagaccccgtggagagactgtacagcgactacctgtacttcgccagcagcaacaagagcgccgacgacttccacgagaaggtgaccgaggccctgcagctgttcgagaactgcatgctggactacagcctgagagcctgcgtgtacaacaacaccctgaacaacgccatgcccgtgtgcacccccccccccgtgccccccgagctggcccccggcagaagaagctggttcgtggtgatcatgcaggccgccctgtgggtgtgcgtgagcgcctag

SEQ ID NO: 188301 - protein, 87 aa, Artificial Sequence
  derived and/or modified sequence
MKVLRAWLLCLLMLGLALRGAASRTHRHSMEIRTPDINPAWYASRGIRPVGRFGRRRATLGDVPKPGLRPRLTCFPLEGGAMSSQDG

SEQ ID NO: 188302 - DNA, 264 bp, Artificial Sequence
  derived and/or modified sequence
atgaaggtgttgcgagcttggctgctgtgcttgctcatgctgggcctcgctctgagaggagccgcttcgcgaacgcaccgccacagcatggaaattcgtaccccagacatcaatccagcatggtatgcttctcgtggaattcgccctgtcggtaggttcgggcgaagacgagcaacactgggcgatgtacccaaaccagggttaaggcccagactcacgtgtttccccctcgagggaggcgcaatgagcagccaagacgggtag

SEQ ID NO: 188303 - DNA, 264 bp, Artificial Sequence
  derived and/or modified sequence
atgaaagtgttgcgagcttggctcttatgcctgctgatgctggggctggctcttcgcggggctgcttcccgcacacaccggcactctatggagatccgaacccctgatatcaaccccgcatggtacgcttctcggggaatccgacctgtaggaagattcggtcgcagaagggctacgctgggtgacgtgcctaagccaggcctccgccctaggctaacgtgctttccattggaaggaggtgctatgtcatcccaggatggctag

SEQ ID NO: 188304 - DNA, 264 bp, Artificial Sequence
  derived and/or modified sequence
atgaaggtgctgagggcctggctcctgtgcctgctgatgctgggcctggccctgcggggagctgcaagtcgtacccatcggcactccatggagatccgcacccctgacatcaatcctgcctggtacgccagtcgcgggatcaggcctgtgggccgcttcggtcggaggagggcaaccctgggggacgtccccaagcctggcctgcgaccccggctgacctgcttccccctggaaggcggtgctatgtcgtcccaggatggctga

SEQ ID NO: 188305 - DNA, 264 bp, Artificial Sequence
  derived and/or modified sequence
atgaaggtgctgagagcctggctgctgtgcctgctgatgctgggcctggccctgagaggcgccgccagcagaacccacagacacagcatggagatcagaacccccgacatcaaccccgcctggtacgccagcagaggcatcagacccgtgggcagattcggcagaagaagagccaccctgggcgacgtgcccaagcccggcctgagacccagactgacctgcttccccctggagggcggcgccatgagcagccaggacggctag

SEQ ID NO: 188306 - DNA, 264 bp, Artificial Sequence
  derived and/or modified sequence
atgaaagtcctgcgcgcatggctgttgtgcctgctcatgctgggtctggcgcttaggggggctgcatccaggacccatcgccactcgatggaaatcaggactcccgacatcaatcccgcgtggtatgcctccagaggaatccgaccagtgggccgctttggcagacgccgtgcaaccctaggcgatgtcccaaagcctggtctcagaccccgcctaacctgttttccactggagggaggtgctatgtctagtcaggacggatag

SEQ ID NO: 188307 - DNA, 264 bp, Artificial Sequence
  derived and/or modified sequence
atgaaggtgctgcgggcctggctgctgtgcctgctgatgctgggcctggccctgcggggagctgccagcaggacccaccgccacagcatggagatccgcaccccagacatcaacccagcctggtacgccagccggggcatccggcctgtgggccgctttggaagaagaagagccaccctgggagatgtgcccaagccaggcctgcggccccggctgacctgcttccccctggagggcggggccatgagcagccaggacggctag

SEQ ID NO: 188308 - DNA, 264 bp, Artificial Sequence
  derived and/or modified sequence
atgaaggtgctgcgggcctggctgctgtgcctgctgatgctgggcctggcactgcgaggggcagcttcacgcactcacagacattcgatggaaattcgaacaccggatatcaatcctgcatggtacgcctctcgaggaatccggcccgtcggcagattcggacgccgcagagcaacactcggagatgtgcctaaacctggactccgcccccgattgacatgttttcccctcgagggcggtgcaatgtcatcccaggacggctag

SEQ ID NO: 188309 - RNA, 264 nt, Artificial Sequence
  derived and/or modified sequence
augaaaguguugcgagcuuggcucuuaugccugcugaugcuggggcuggcucuucgcggggcugcuucccgcacacaccggcacucuauggagauccgaaccccugauaucaaccccgcaugguacgcuucucggggaauccgaccuguaggaagauucggucgcagaagggcuacgcugggugacgugccuaagccaggccuccgcccuaggcuaacgugcuuuccauuggaaggaggugcuaugucaucccaggauggcuag

SEQ ID NO: 188310 - protein, 180 aa, Artificial Sequence
  derived and/or modified sequence
MASTISAYKEKMKELSVLSLICSCFYTQPHPNTVYQYGDMEVKQLDKRASGQSFEVILKSPSDLSPESPMLSSPPKKKDTSLEELQKRLEAAEERRKTQEAQVLKQLAERREHEREVLHKALEENNNFSRQAEEKLNYKMELSKEIREAHLAALRERLREKELHAAEVRRNKEQREEMSG

SEQ ID NO: 188311 - protein, 169 aa, Artificial Sequence
  derived and/or modified sequence
MKELSVLSLICSCFYTQPHPNTVYQYGDMEVKQLDKRASGQSFEVILKSPSDLSPESPMLSSPPKKKDTSLEELQKRLEAAEERRKTQEAQVLKQLAERREHEREVLHKALEENNNFSRQAEEKLNYKMELSKEIREAHLAALRERLREKELHAAEVRRNKEQREEMSG

SEQ ID NO: 188312 - DNA, 543 bp, Artificial Sequence
  derived and/or modified sequence
atggccagcaccatcagcgcctacaaggagaagatgaaggagctgagcgtgctgagcctgatctgcagctgcttctacacccagccccaccccaacaccgtgtaccagtacggcgacatggaggtgaagcagctggacaagagagccagcggccagagcttcgaggtgatcctgaagagccccagcgacctgagccccgagagccccatgctgagcagcccccccaagaagaaggacaccagcctggaggagctgcagaagagactggaggccgccgaggagagaagaaagacccaggaggcccaggtgctgaagcagctggccgagagaagagagcacgagagagaggtgctgcacaaggccctggaggagaacaacaacttcagcagacaggccgaggagaagctgaactacaagatggagctgagcaaggagatcagagaggcccacctggccgccctgagagagagactgagagagaaggagctgcacgccgccgaggtgagaagaaacaaggagcagagagaggagatgagcggctag

SEQ ID NO: 188313 - DNA, 543 bp, Artificial Sequence
  derived and/or modified sequence
atggcatctaccatatcggcctataaggaaaagatgaaggagctgtcagtcctgtccctgatctgttcttgcttctacacccaacctcatccaaacaccgtgtaccaatacggagatatggaggtgaagcagctcgataagcgcgctagtggccagtccttcgaagtgattctgaagtccccatctgacttgtctcccgagtcacctatgctgtctagccctcctaagaaaaaggacaccagcttagaggagttgcagaagagactagaggcagccgaggagcggaggaagactcaggaggcccaggtgctcaaacagctcgctgaacggcgcgagcatgaaagagaggtgctccacaaagctctagaagaaaataataatttctcaaggcaggcagaggagaaacttaactataaaatggaattgtcaaaagaaataagagaggctcacttggccgccctgcgcgagaggttacgagaaaaagagctccacgcagccgaggtacggaggaacaaggagcaaagagaggagatgtcaggctag

SEQ ID NO: 188314 - DNA, 543 bp, Artificial Sequence
  derived and/or modified sequence
atggccagcaccatcagcgcctacaaggagaagatgaaggagctgtctgtgctgagcctcatctgcagctgcttctacacccagccccaccccaacacagtgtaccagtatggagacatggaggtgaagcagctggacaagagggccagcggccagagctttgaggtgatcctgaagagccccagcgacctgagccctgagagccccatgctgagcagcccccccaagaagaaggacaccagcctggaggagctgcagaagaggctggaggccgctgaggagaggaggaagacccaggaggcccaggtgctgaagcagctggccgagcggcgggagcacgagcgggaggtgctgcacaaggccctggaggagaacaacaacttcagccggcaggccgaggagaagctgaactacaagatggagctgagcaaggagatccgggaggcccacctggccgccctgcgggagcggctgcgggagaaggagctgcatgctgctgaggtgagaagaaacaaggagcagcgggaggagatgtctggatag

SEQ ID NO: 188315 - DNA, 543 bp, Artificial Sequence
  derived and/or modified sequence
atggccagcaccatcagcgcctacaaggagaagatgaaggagctgagcgtgctgagtctcatatgcagttgcttttacactcagccccatccaaacactgtttaccaatatggtgacatggaggtgaagcagttggacaagcgcgcctccggccagtcctttgaggttatcctgaagagcccttccgacctgtctcccgaatcgcccatgctgtcttccccacccaaaaaaaaagacactagcctggaggagctccagaaaagacttgaggccgcggaagagcgccgcaaaacacaggaagctcaagtgctcaagcagttggccgagcggcgagaacacgagagagaggtgttgcacaaagctctagaggagaacaacaacttttcacgccaggcagaggaaaagttaaattacaaaatggagctgtctaaagaaatccgggaagcccaccttgcggccctgcgtgagcgcttgcgggagaaggagctgcacgctgccgaggtcaggaggaataaggaacaaagagaagaaatgagtggatag

SEQ ID NO: 188316 - DNA, 543 bp, Artificial Sequence
  derived and/or modified sequence
atggcgtcaacgattagcgcttataaagagaagatgaaggagctctccgtcctctcactgatttgcagctgcttttacacacaaccacatcccaacacagtctaccagtatggggacatggaggtaaagcagcttgacaagagggcttccggtcagagctttgaagttatcctgaaaagccctagtgacctgtcacccgagtcaccaatgctatcaagccctccaaagaaaaaggacacaagcttggaggaacttcagaagcgacttgaggctgctgaagaacgaagaaagacacaggaggcccaagtcctgaagcagctcgccgagaggagggaacacgagcgtgaggtgctacacaaagccctggaggagaataacaatttctcacgacaggctgaagaaaagctgaactacaagatggagctaagcaaggagatccgcgaagctcatctggctgccctcagagaacggctgagagagaaggaattgcatgcggcagaggtcaggcgcaacaaggaacaacgggaagagatgagcgggtag

SEQ ID NO: 188317 - DNA, 2255 bp, Artificial Sequence
  derived and/or modified sequence
ggcactgcagcaccagccgtctgcagctccggccgccacttgcgcctctccagcctccgcaggcccaaccgccgccagcaccatggccagcaccatttccgcctacaaggagaagatgaaggagctgtcggtgctgtcgctcatctgctcctgcttctacacacagccgcaccccaataccgtctaccagtacggggacatggaggtgaagcagctggacaagcgggcctcaggccagagcttcgaggtcatcctcaagtccccttctgacctgtccccagagagccctatgctctcctccccacccaagaagaaggacacctccctggaggagctgcaaaagcggctggaggcagccgaggagcggaggaagacgcaggaggcgcaggtgctgaagcagctggcggagcggcgcgagcacgagcgcgaggtgctgcacaaggcgctggaggagaataacaacttcagccgccaggcggaggagaagctcaactacaagatggagctcagcaaggagatccgcgaggcacacctggccgcactgcgcgagcggctgcgcgagaaggagctgcacgcggccgaggtgcgcaggaacaaggagcagcgagaagagatgtcgggctaagggcccgggacgggcggcgcccatcctgcgacagaacacgttcgggttttggttttgtttcgttcacctctgtctagatgcaacttttgttcctcctcccccacccccgcccccagcttcatgcttctcttccgcactcagccgccctgccctgtcctcgtggtgagtcgctgaccacggcttcccctgcaggagccgccgggcgtgagacgcggtccctcggtgcagacaccaggccgggcgcggctgggtcccccgggggccctgtgagagaggtggcggtgaccgtggtaaacccagggcggtggcgtgggatcacgggtccttacgctgggctgtctggtcagcacgtgcaggtcagggcaggtcctctgagccggcgcccctggccagcaggcgaggctacagtacctgctgtctttccagggggaaggggctccccatgagggaggggcgacgggggaggggggtgatggtgcctgggagcctgcgtgtgcagccggtgcttgttgaactggcaggcgggtgggtgggggctgcagctttccttaatgtggttgcacaggggtcctctgagaccacctggcgtgaggtggacaccctgggccttcctggaagcctgcagttgggggcctgccctgagtctgctggggagtgggcattctctgccagggacccatgagcaggctgcatggtctagaggttgtgggcagcatggacagtcccccactcagaagtgcaagagttccaaagagcctctggcccaggcccctccccaccagggctttgcagatgtccttgaaagacccaccctagagccctttggagtgctggcccctcctgtgccctctgccctggtggaagcggcagccacaagtcctcctcagggagccccaagggggattttgtgggaccgctgcccacagatccaggtgttggaagggcagcgggtaaggttcccaagccagccccaacacccttcccacttggcacccagagggggctgtgggtggaggcctgactccaggcctctcctgcccacaccctctgggctgagttccttctttcccttggacgcccagtgctggccttggaggacggtcagctggaggatggcggtgggggaggctgtctttgtaccactgcagcatcccccacttctccacggaagccccatcccaaagctgctgcctggccccttgctgtaaagtgtgaagggggcggctgagttctcttaggacccagagccagggccctcaacttccatcctgcgggaggccttggccgggcactgccagtgtcttccagagtcacacccagggaccacgggaggatcctgacccctgcagggctcaggggtcagcagggacccactgccccatctccctctccccaccaagacagccccagaaggagcagccagctgggatgggaacccaaggctgtccacatctggcttttgtgggactcagaaagggaagcagaactgagggctgggatattcctcatggtggcagcgctcatagcgaaagcctactgtaatatgcacccatctcatccacgtagtaaagtgaacttaaaaattcaatcaaatgaacaattaaataaacacctgtgtgtttaagacatg

SEQ ID NO: 188318 - DNA, 970 bp, Artificial Sequence
  derived and/or modified sequence
acaccgctgcggcctcggggaccaccctttgcgacgcccgcgccacctgctctggccagaaaagccactgccctttgcgccgcggggtctggatgggggaggggcgactgcgatccccaaaccctccggagaccagagggctccgcccctcccgcccctccacctcccgcggggcggacccaccgccttcgaagcctacaaggagaagatgaaggagctgtcggtgctgtcgctcatctgctcctgcttctacacacagccgcaccccaataccgtctaccagtacggggacatggaggtgaagcagctggacaagcgggcctcaggccagagcttcgaggtcatcctcaagtccccttctgacctgtccccagagagccctatgctctcctccccacccaagaagaaggacacctccctggaggagctgcaaaagcggctggaggcagccgaggagcggaggaagacgcaggaggcgcaggtgctgaagcagctggcggagcggcgcgagcacgagcgcgaggtgctgcacaaggcgctggaggagaataacaacttcagccgccaggcggaggagaagctcaactacaagatggagctcagcaaggagatccgcgaggcacacctggccgcactgcgcgagcggctgcgcgagaaggagctgcacgcggccgaggtgcgcaggaacaaggagcagcgagaagagatgtcgggctaagggcccgggacgggcggcgcccatcctgcgacagaacacgttcgggttttggttttgtttcgttcacctctgtctagatgcaacttttgttcctcctcccccacccccgcccccagcttcatgcttctcttccgcactcagccgccctgccctgtcctcgtggtgagtcgctgaccacggcttcccctgcaggagccgccgggcgtgagacgcggtccctcggtgcagacaccaggccgggcgcggctgggt

SEQ ID NO: 188319 - protein, 440 aa, Artificial Sequence
  derived and/or modified sequence
MGDLELLLPGEAEVLVRGLRSFPLREMGSEGWNQQHENLEKLNMQAILDATVSQGEPIQELLVTHGKVPTLVEELIAVEMWKQKVFPVFCRVEDFKPQNTFPIYMVVHHEASIINLLETVFFHKEVCESAEDTVLDLVDYCHRKLTLLVAQSGCGGPPEGEGSQDSNPMQELQKQAELMEFEIALKALSVLRYITDCVDSLSLSTLSRMLSTHNLPCLLVELLEHSPWSRREGGKLQQFEGSRWHTVAPSEQQKLSKLDGQVWIALYNLLLSPEAQARYCLTSFAKGRLLKLRAFLTDTLLDQLPNLAHLQSFLAHLTLTETQPPKKDLVLEQIPEIWERLERENRGKWQAIAKHQLQHVFSPSEQDLRLQARRWAETYRLDVLEAVAPERPRCAYCSAEASKRCSRCQNEWYCCRECQVKHWEKHGKTCVLAAQGDRAK

SEQ ID NO: 188320 - DNA, 2896 bp, Artificial Sequence
  derived and/or modified sequence
aaaaagatgtgatcaagagtgagttgggttggaggcagggactgctctggattaaatggccaagaaaggccatgctgaggtgtaaactgagccctgaaggaaaagtattccaggcaaagtgcaaaactctgaggcaaaaacctctttggaatgtatgagggaggttcagggaagcaaggaggagaggaaagaatccaagtcccgaggtacaggagaggacaagaagtagatcttgcagagctgctagtaagcggcatcccacctaacattttgagggccagaagtagccacagagcccctctcacgcaagggagtaatgtctatatgctttttttttttttttgagacggtctccctttgttgtccaggctggagtgcggtggtgcaatcttgcctcactgcaaactccacctcctgtgctcaagcgattctcctgcctcagtctcccatgtagctgggactacaggtgtgtgctaccacacctgtctaatttttgtacttttagtagagacagggtttcaccatgttgcccaggctggtctcaaactcctgacctcaagtgatccgcctgcctcggcctcccaaagtgctgagattacaggtgtcagccaccgcgcccggcctgatatacacttttaaggctccgggctgtccatgaggatcaagcgtggaagtaggtctacagaaaaggctgccgcagttcacccatgacaggtgatgacagtctggacatagggaggatggagagaagtcgtgcgccctggcagtatttcaggagccaactagtggagccgggacgcgagaaatagaggaaccaagaagccataaggaggaggaagagcagcgggtaggtcaagatgccacagccgcaggaggggctgttggggtcggggttacccccatccctgtgcaggcggacttggcgtctgaggacagagtccagaccacaaggatctggagctcaggagagactcgtgggccacagcccgagaaagcgctgggaatccaaatactatggcgattggcagtcgcgtaggcgaggcgggctagagacccgcccggatttaggcgcgagccacctccaggggcggggcccaggccgcactgcgcaggcgcggctaacccgtttccatggctgcgagaactgacgctccccaaccgtcccgcaactgtcctgtcccagactttggcaccgtcggggtccgtcgtccccgaatgtgacagcatccccaccccggctgctgcccaggatccgccggaccccggcctcgatatgggagacctggaactgctgctgcccggggaagctgaagtgctggtgcggggtctgcgcagcttcccgctacgcgagatgggctccgaagggtggaaccagcagcatgagaacctggagaagctgaacatgcaagccatcctcgatgccacagtcagccagggcgagcccattcaggagctgctggtcacccatgggaaggtcccaacactggtggaggagctgatcgcagtggagatgtggaagcagaaggtgttccctgtgttctgcagggtggaggacttcaagccccagaacaccttccccatctacatggtggtgcaccacgaggcctccatcatcaacctcttggagacagtgttcttccacaaggaggtgtgtgagtcagcagaagacactgtcttggacttggtagactattgccaccgcaaactgaccctgctggtggcccagagtggctgtggtggcccccctgagggggagggatcccaggacagcaaccccatgcaggagctgcagaagcaggcagagctgatggaatttgagattgcactgaaggccctctcagtactacgctacatcacagactgtgtggacagcctctctctcagcaccttgagccgtatgcttagcacacacaacctgccctgcctcctggtggaactgctggagcatagtccctggagccggcgggaaggaggcaagctgcagcagttcgagggcagccgttggcatactgtggccccctcagagcagcaaaagctgagcaagttggacgggcaagtgtggatcgccctgtacaacctgctgctaagccctgaggctcaggcgcgctactgcctcacaagttttgccaagggacggctactcaagcttcgggccttcctcacagacacactgctggaccagctgcccaacctggcccacttgcagagtttcctggcccatctgaccctaactgaaacccagcctcctaagaaggacctggtgttggaacagatcccagaaatctgggagcggctggagcgagaaaacagaggcaagtggcaggcaattgccaagcaccagctccagcatgtgttcagcccctcagagcaggacctgcggctgcaggcgcgaaggtgggctgagacctacaggctggatgtgctagaggcagtggctccagagcggccccgctgtgcttactgcagtgcagaggcttctaagcgctgctcacgatgccagaatgagtggtattgctgcagggagtgccaagtcaagcactgggaaaagcatggaaagacttgtgtcctggcagcccagggtgacagagccaaatgagggctgcagttgctgagggccgaccacccatgccaagggaatccacccagaatgcacccctgaacctcaagatcacggtccagcctctgccggagccccagtctccgcagtggagagcagagcgggcggtaaagctgctgaccgatctccctcctcctcaccccaagtgaaggctcgagacttcctgccccacccagtgggtaggccaagtgtgttgcttcagcaaaccggaccaggagggccagggccggatgtggggaccctcttcctctagcacagtaaagctggcctccagaaaca

SEQ ID NO: 188321 - DNA, 1323 bp, Artificial Sequence
  derived and/or modified sequence
atgggagatctagaactgctgctcccgggggaagccgaagtcctcgtccgcgggttgcgctccttccctctgcgggaaatgggcagtgaagggtggaatcagcagcatgaaaacctcgagaagcttaacatgcaggctatactagatgccaccgtctcccagggcgagccaattcaggaactgctcgtaacccacggaaaggtgcctaccctggtggaggagcttattgctgtagaaatgtggaagcaaaaggttttcccagtcttttgtcgtgtggaagattttaaaccacagaacacatttcccatatatatggtcgtgcatcatgaggcaagtattatcaatctcctggagacagtcttcttccataaagaggtgtgcgagtcggctgaagacaccgtactcgatctggtggactactgccacagaaagctgacactgctcgtggcccagtctggctgtggcggtccacccgagggtgagggctcacaggattctaaccccatgcaggagctgcaaaagcaggccgagctaatggaatttgagatcgcactcaaggcattgagcgttctacgctacataactgattgtgtggacagcttatctctctccaccttgtctaggatgttgagcacccataatctcccctgtttattggtagagttgctggagcatagcccgtggagtcgccgggaaggagggaaattgcagcagtttgaaggatctaggtggcatacggtggcgcctagtgagcaacaaaagttatcaaaactcgacggacaagtttggatcgctttgtataacctgctcctgtccccagaagcccaggcgagatattgtttaacttcctttgcaaagggtaggctgttaaagctgcgcgcgttcctcaccgataccctgttggaccagctccccaatctggctcacctacagtcttttctggcacacctaacattgaccgaaactcagcctccaaaaaaagatcttgtgcttgagcagatccctgagatctgggagaggctggagcgtgaaaatagaggaaaatggcaggccatagcgaagcatcagctacaacatgtcttttctccgtccgaacaggaccttaggctacaggccagaaggtgggccgaaacctaccgcctggacgtcttagaggccgtcgcacccgaacgccctcggtgtgcgtactgctcagctgaagcctcaaaacgttgtagccgttgtcaaaatgagtggtactgctgtagagagtgccaagtgaagcactgggagaagcacggaaagacgtgtgtgctagccgcccagggagaccgggcgaaatag

SEQ ID NO: 188322 - DNA, 1323 bp, Artificial Sequence
  derived and/or modified sequence
atgggagacctggagctgctgctgcctggagaggccgaggtgctggtgcggggcctgcgctccttccccctgcgggagatgggcagcgagggctggaaccagcagcacgagaacctggagaagctgaacatgcaggccatcctggatgccaccgtgtcccagggcgagcccatccaggagctgctggtgacccacggcaaggtgcccaccctggtggaggagctgattgctgtggagatgtggaagcagaaggtgtttcctgtgttctgccgggtggaggacttcaagccccagaacaccttccccatctacatggtggtgcaccacgaggccagcatcatcaacctgctggagaccgtcttcttccacaaggaggtgtgtgagagcgcagaagatactgtgctggacctggtggactactgccacaggaagctgaccctgctggtggcccagagcggctgcggcggccccccagagggggagggcagccaggacagcaaccccatgcaggagctgcagaagcaggccgagctgatggagtttgaaattgccctgaaggccctgtctgtgctgcgctacatcacagactgtgtggacagcctgagcctgagcaccctgagcaggatgctgagcacccacaacctgccctgcctgctggtggagctgctggagcacagcccctggagccggcgggagggcggcaagctgcagcagtttgagggcagccgctggcacacagtggcccccagcgagcagcagaagctgagcaagctggatggccaggtgtggatcgccctgtacaacctgctgctgagccctgaggcccaggcccgctactgcctgaccagctttgccaagggccgcctgctgaagctgcgggccttcctgacagacaccctgctggaccagctgcccaacctggcccacctgcagagcttcctggcccacctgaccctgacagagacccagccccccaagaaggacctggtgctggagcagatccctgagatctgggagcggctggagcgggagaacagaggcaagtggcaggccatcgccaagcaccagctgcagcacgtgttcagccccagcgagcaggacctgcggctgcaggcccggcgctgggccgagacctaccgcctggatgtgctggaggccgtggcccctgagcggccccgctgtgcctactgcagcgctgaggccagcaagcgctgcagccgctgccagaatgagtggtactgctgccgggagtgccaggtgaagcactgggagaagcacggcaagacctgtgtgctggccgcccagggcgaccgggccaagtag

SEQ ID NO: 188323 - DNA, 1323 bp, Artificial Sequence
  derived and/or modified sequence
atgggcgacctggagctgctgctgcccggcgaggccgaggtgctggtgcgggggcttagaagcttcccattaagggagatgggatctgaaggctggaatcaacagcacgagaatctcgagaaactcaacatgcaggcaatcctagacgccacagtctctcagggggagcccatacaggagcttctggttacacatggcaaggtgccgaccctggtggaggagttaatcgcagtggaaatgtggaaacagaaggtctttccagtcttctgtagggtggaggatttcaagcctcaaaatacatttcccatctatatggtcgtacatcacgaagcgagcatcatcaacctgctggagaccgtgttcttccataaagaagtgtgcgaatctgcggaagataccgtactggacctcgttgattactgtcacagaaaattaactttgctagtcgcgcaaagcggttgcggggggcccccagagggcgagggcagtcaggactctaatccaatgcaggagctgcagaagcaggctgagctgatggagtttgaaatagcgctgaaggcactgagcgtactgcggtacatcactgattgcgtcgacagcctgagtttatcgactctttctcggatgctttcgacccacaatctgccttgtctgttggtggagctacttgagcactcaccttggtcaagacgggaaggcgggaagctgcaacagttcgaagggtctcggtggcacaccgtggctcctagcgagcagcagaaactctcgaagctcgatggtcaggtctggatcgccttatacaatttactgctgagtcccgaggcacaagcacggtactgcctgacctcatttgctaagggccggttgctaaagttaagagcatttctcacggacaccctcttagatcagcttcccaatttggctcacctgcaatccttcttggcgcacctgacccttaccgagacccagcccccaaaaaaggatcttgtcttggagcagattccagaaatctgggaaagacttgaacgcgagaatagaggcaaatggcaagcaatagctaagcaccagttacagcacgtcttcagcccttccgagcaggatctccggttacaggctcgcagatgggctgaaacctatcgtctcgacgttctcgaggcggtggcaccggagcggcctaggtgcgcttactgctccgcagaagccagcaaacgatgttccaggtgccagaatgagtggtactgttgcagagaatgtcaagtgaagcattgggaaaaacatggcaaaacctgcgtgctggccgctcaaggtgacagggcaaaatag

SEQ ID NO: 188324 - DNA, 1323 bp, Artificial Sequence
  derived and/or modified sequence
atgggagatctggaacttcttctgccaggtgaagctgaagttctcgtcaggggcttgcgctcttttcccttgcgcgaaatgggctccgaaggctggaaccagcagcacgagaatctggagaagctcaacatgcaggctatcctggacgccaccgtgtctcagggcgagcccatacaagaactgttagtaacccatggcaaggtacctaccctggtggaggagctgatcgctgtagagatgtggaaacagaaggtcttccccgtgttctgccgcgtcgaggacttcaagccacagaatacctttcctatctatatggtggtccatcacgaagcgtccatcatcaacctgctggagaccgttttcttccataaggaagtatgcgaaagcgccgaggacacagttcttgatttggtagactactgtcataggaaactgaccttactggtagcccaatctggatgtggtggtcctcccgaaggcgaaggttctcaagacagcaacccaatgcaggaactccagaagcaagcggagttaatggagtttgaaatcgcccttaaagctctttccgttcttaggtacattacagactgcgtggactcacttagcctgtcgacattaagcaggatgctctcgacacataacttgccttgcctgctggtagaacttcttgaacacagcccctggtcccgcagggagggagggaagctgcagcagtttgaaggcagtcgctggcatacagtggccccttccgagcaacaaaagctctcgaaattggatggtcaggtatggatcgctttatacaacctgctgttaagccctgaagcccaggcaaggtactgtctcacatcgtttgcaaagggccgactccttaagttgcgcgcatttctcaccgacactcttttggaccagctgcccaatctagcacacctccagtcatttctcgcccatcttacgctgaccgagacgcagcccccaaaaaaggatctcgttctcgaacagattcctgaaatttgggagaggcttgagagagagaatagaggaaaatggcaagcgatcgccaaacaccaactgcagcatgtcttttcaccaagcgagcaggatctacgtctgcaggccagacggtgggcagagacgtaccgcctcgacgtgctggaagccgtggcccctgagcgcccacggtgcgcctactgtagcgccgaggccagcaaaagatgcagccgatgtcagaacgaatggtattgctgcagagagtgtcaggtcaagcattgggagaaacacggtaagacatgcgtccttgcagcacaaggtgatcgagctaagtag

SEQ ID NO: 188325 - DNA, 1323 bp, Artificial Sequence
  derived and/or modified sequence
atgggcgacctggagctgctgctgcccggcgaggccgaggtgctggtgagaggcctgagaagcttccccctgagagagatgggcagcgagggctggaaccagcagcacgagaacctggagaagctgaacatgcaggccatcctggacgccaccgtgagccagggcgagcccatccaggagctgctggtgacccacggcaaggtgcccaccctggtggaggagctgatcgccgtggagatgtggaagcagaaggtgttccccgtgttctgcagagtggaggacttcaagccccagaacaccttccccatctacatggtggtgcaccacgaggccagcatcatcaacctgctggagaccgtgttcttccacaaggaggtgtgcgagagcgccgaggacaccgtgctggacctggtggactactgccacagaaagctgaccctgctggtggcccagagcggctgcggcggcccccccgagggcgagggcagccaggacagcaaccccatgcaggagctgcagaagcaggccgagctgatggagttcgagatcgccctgaaggccctgagcgtgctgagatacatcaccgactgcgtggacagcctgagcctgagcaccctgagcagaatgctgagcacccacaacctgccctgcctgctggtggagctgctggagcacagcccctggagcagaagagagggcggcaagctgcagcagttcgagggcagcagatggcacaccgtggcccccagcgagcagcagaagctgagcaagctggacggccaggtgtggatcgccctgtacaacctgctgctgagccccgaggcccaggccagatactgcctgaccagcttcgccaagggcagactgctgaagctgagagccttcctgaccgacaccctgctggaccagctgcccaacctggcccacctgcagagcttcctggcccacctgaccctgaccgagacccagccccccaagaaggacctggtgctggagcagatccccgagatctgggagagactggagagagagaacagaggcaagtggcaggccatcgccaagcaccagctgcagcacgtgttcagccccagcgagcaggacctgagactgcaggccagaagatgggccgagacctacagactggacgtgctggaggccgtggcccccgagagacccagatgcgcctactgcagcgccgaggccagcaagagatgcagcagatgccagaacgagtggtactgctgcagagagtgccaggtgaagcactgggagaagcacggcaagacctgcgtgctggccgcccagggcgacagagccaagtag

SEQ ID NO: 188326 - protein, 510 aa, Artificial Sequence
  derived and/or modified sequence
MAAELVEAKNMVMSFRVSDLQMLLGFVGRSKSGLKHELVTRALQLVQFDCSPELFKKIKELYETRYAKKNSEPAPQPHRPLDPLTMHSTYDRAGAVPRTPLAGPNIDYPVLYGKYLNGLGRLPAKTLKPEVRLVKLPFFNMLDELLKPTELVPQNNEKLQESPCIFALTPRQVELIRNSRELQPGVKAVQVVLRICYSDTSCPQEDQYPPNIAVKVNHSYCSVPGYYPSNKPGVEPKRPCRPINLTHLMYLSSATNRITVTWGNYGKSYSVALYLVRQLTSSELLQRLKTIGVKHPELCKALVKEKLRLDPDSEIATTGVRVSLICPLVKMRLSVPCRAETCAHLQCFDAVFYLQMNEKKPTWMCPVCDKPAPYDQLIIDGLLSKILSECEDADEIEYLVDGSWCPIRAEKERSCSPQGAILVLGPSDANGLLPAPSVNGSGALGSTGGGGPVGSMENGKPGADVVDLTLDSSSSSEDEEEEEEEEEDEDEEGPRPKRRCPFQKGLVPAC

SEQ ID NO: 188327 - DNA, 1835 bp, Artificial Sequence
  derived and/or modified sequence
ggtgaccaagatggcggcggagctggtggaggccaaaaacatggtgatgagttttcgagtctccgaccttcagatgctcctgggtttcgtgggccggagtaagagtggactgaagcacgagctcgtcaccagggccctccagctggtgcagtttgactgtagccctgagctgttcaagaagatcaaggagctgtacgagacccgctacgccaagaagaactcggagcctgccccacagccgcaccggcccctggaccccctgaccatgcactccacctacgaccgggccggcgctgtgcccaggactccgctggcaggccccaatattgactaccccgtgctctacggaaagtacttaaacggactgggacggttgcccgccaagaccctcaagccagaagtccgcctggtgaagctgccgttctttaatatgctggatgagctgctgaagcccaccgaattagtcccacagaacaacgagaagcttcaggagagcccgtgcatcttcgcattgacgccaagacaggtggagttgatccggaactccagggaactgcagcccggagttaaagccgtgcaggtcgtcctgagaatctgttactcagacaccagctgccctcaggaggaccagtacccgcccaacatcgctgtgaaggtcaaccacagctactgctccgtcccgggctactacccctccaataagcccggggtggagcccaagaggccgtgccgccccatcaacctcactcacctcatgtacctgtcctcggccaccaaccgcatcactgtcacctgggggaactacggcaagagctactcggtggccctgtacctggtgcggcagctgacctcatcggagctgctgcagaggctgaagaccattggggtaaagcacccggagctgtgcaaggcactggtcaaggagaagctgcgccttgatcctgacagcgagatcgccaccaccggtgtgcgggtgtccctcatctgtccgctggtgaagatgcggctctccgtgccctgccgggcagagacctgcgcccacctgcagtgcttcgacgccgtcttctacctgcagatgaacgagaagaagcccacctggatgtgccccgtgtgcgacaagccagccccctacgaccagctcatcatcgacgggctcctctcgaagatcctgagcgagtgtgaggacgccgacgagatcgagtacctggtggacggctcgtggtgcccgatccgcgccgaaaaggagcgcagctgcagcccgcagggcgccatcctcgtgctgggcccctcggacgccaatgggctcctgcccgcccccagcgtcaacgggagcggtgccctgggcagcacgggtggcggcggcccggtgggcagcatggagaatgggaagccgggcgccgatgtggtggacctcacgctggacagctcatcgtcctcggaggatgaggaggaggaggaagaggaggaggaagacgaggacgaagaggggccccggcccaagcgccgctgccccttccagaagggcctggtgccggcctgctgaccccggccgcacactcgactttcctggtgctcaccacgcagaggggcacgggccagcctcgggcgcagagggaggagtgacctttctttttctttttattgtcgttcgttttgtttttccacccttttgcctggctcctggcacctgtacctctggactctcctatcgggggattaaaaaaaaaagtaaaatgaaaaaaaaaaaaaaaaaaaaaaaaaaaaaaaaaaaaaaaaaaaaaaaaaaaaaaaaaaaaaaaaaaaaaaaaaaaaaaaaaaaaaaaaaaaaaaaaaaa

SEQ ID NO: 188328 - DNA, 1533 bp, Artificial Sequence
  derived and/or modified sequence
atggccgctgaattagtcgaggctaaaaatatggtgatgtcctttcgtgtgtcagacctgcagatgctgttgggattcgtcggccggtctaaatcaggactcaaacacgaactcgtgacaagggctctacaattggttcagttcgactgttccccagaactgtttaaaaagatcaaggagctttacgagacccgatatgcaaaaaagaactccgagccagcacctcagccacacagaccactggaccccctcacaatgcactccacttacgacagggcaggcgccgtgcctaggacgcctctggcaggccctaatatagactatcctgtcctgtatggcaaatatcttaatggactgggacggcttcccgccaagacattgaaaccggaagtcagattggtgaagctaccgttcttcaatatgcttgacgagctgctgaagccaaccgaactggtgccccagaacaatgaaaagttacaagaatccccatgtatatttgcgttgacccctcggcaagtcgagctcatccggaatagcagggaattgcagcctggcgtgaaagccgtgcaggtagtgttacggatctgctattctgatacatcatgtccacaagaggaccagtatcctcctaatatcgcagttaaggtcaaccacagctactgttccgtgcccggctactatccttctaataaaccaggcgtagaacccaagcgtccttgtaggccgatcaatctcacccacctgatgtacctttcaagcgccaccaatcggattaccgtcacttgggggaactatggcaagtcatacagtgtcgccctctacctggtgagacagctgacctcctccgaactgctgcaaagactgaagactataggagtgaagcatcccgagctgtgcaaagcgctggtgaaggagaagctgagactagacccagatagtgaaattgctactacgggggtacgtgtcagcctcatctgccccctagttaagatgcggctctccgtcccatgtagggctgagacttgtgcccacctccaatgtttcgatgccgtgttttacttgcagatgaatgagaagaaacccacctggatgtgtcctgtctgtgataagcctgccccctatgatcagctgattatcgacggcctgctgagcaagatcttatcggagtgtgaggatgcggatgagatcgaatatctagtggatggcagctggtgcccaattcgggctgagaaggaacgctcgtgcagcccgcagggggctatcttagtgctcgggcctagcgacgccaatgggcttctcccggccccttctgtcaatggctccggcgcactgggcagcactggaggaggcggccccgtaggtagcatggaaaatggaaagcctggagccgacgttgtggatctcacactcgacagctcctccagctcagaagacgaggaagaggaggaagaggaggaggaagacgaggacgaggagggaccgaggcccaagcggagatgcccttttcagaagggcctcgtaccagcatgctag

SEQ ID NO: 188329 - DNA, 1533 bp, Artificial Sequence
  derived and/or modified sequence
atggctgctgagctggtggaggccaagaacatggtgatgtccttccgggtgtctgacctgcagatgctgctgggctttgtgggccgcagcaagagcggcctgaagcatgagctggtgacccgggccctgcagctggtgcagtttgactgcagccctgagctgttcaagaagatcaaggagctgtatgagaccaggtatgccaagaagaacagcgagcccgccccccagccccaccggcccctggaccccctgaccatgcacagcacctatgacagagctggagctgtgcccaggacccccctggccggccccaacatcgactaccctgtgctgtatggcaagtacctgaatggcctgggccgcctgcctgccaagaccctgaagccagaggtgcggctggtgaagctgcccttcttcaacatgctggatgagctgctgaagcccacagagctggtgccccagaacaatgagaagctgcaggagagcccctgcatctttgccctgaccccccggcaggtggagctgatccggaacagccgggagctgcagcccggggtgaaggctgtgcaggtggtgctgcgcatctgctacagcgacaccagctgcccccaggaggaccagtacccacccaacattgctgtgaaggtgaaccacagctactgcagcgtgcccggctactaccccagcaacaagccaggagtggagcccaagaggccctgccggcccatcaacctgacccacctgatgtacctgagcagcgccaccaaccgcatcaccgtgacctggggcaactacggcaagagctacagcgtggccctgtacctggtgcggcagctgaccagcagcgagctgctgcagaggctgaagaccatcggcgtgaagcaccctgagctgtgcaaggccctggtgaaggagaagctgcggctggaccctgattctgaaattgccaccaccggggtgcgggtgtccctcatctgccccctggtgaagatgaggctgtctgtgccctgcagagctgagacctgtgcccacctgcagtgctttgatgctgtgttctacctgcagatgaatgagaagaagcccacctggatgtgccctgtgtgtgacaagccagccccctatgaccagctgatcattgatggcctgctgagcaagatcctgtctgaatgtgaagatgctgatgaaattgagtacctggtggatggctcctggtgccccatccgggcagagaaggagaggagctgcagcccccagggcgccatcctggtgctgggccccagtgatgccaacggcctgctgcctgcccccagcgtgaatggaagtggggccctgggcagcactggaggcggcggccctgtgggctccatggagaatggcaagccaggagcagatgtggtggacctgaccctggacagcagcagcagcagtgaagatgaggaggaggaggaggaggaggaggaggatgaagatgaggagggcccccggcccaagaggcgctgccccttccagaagggcctggtgcctgcctgctag

SEQ ID NO: 188330 - DNA, 1533 bp, Artificial Sequence
  derived and/or modified sequence
atggccgccgagctggtggaggccaagaacatggtgatgagcttccgagtgtcagacctgcaaatgctccttggctttgtcgggaggagcaagtcaggtcttaaacacgaactggtgacccgtgccctgcagctggtgcagtttgattgctctcctgaactctttaaaaagataaaagaattgtacgaaaccaggtacgctaaaaaaaacagcgagcccgccccacagcctcatcgtccactggaccctctgaccatgcacagcacatatgatagggccggagccgtgcccagaaccccactggcaggtccaaacattgactatcctgttttatatggcaagtacctaaacggccttggcagactccccgcgaaaaccttgaagcccgaggtaagactggtgaagttgccgtttttcaatatgctcgacgagctactaaagcctaccgaactggtgccacaaaacaacgagaagctgcaggagtcaccatgtatttttgcgttgacaccacggcaggtcgagctcatacgtaactctcgggagctccaaccaggagtgaaggcggtccaggtggtgctgcggatctgttattcagatacttcctgcccccaggaagatcagtatcccccaaacattgccgtcaaagtgaaccattcgtactgttccgtgcccggatattatccatccaataaacccggggtagagccgaagcggccctgcagacccattaacttaactcatctgatgtatctgagttccgcaaccaacagaatcaccgtgacgtggggaaattatggtaaatcctacagcgttgccctgtatctcgtccgccagctgacgtcttccgagctgcttcaacgactgaagactattggggtcaaacatccagagctgtgcaaggctcttgtgaaagaaaagcttcgccttgaccccgactccgaaatcgccacaacgggggtgcgagtgagtctgatttgccccttggtgaagatgcggttatccgtcccatgtagagccgaaacctgtgcccaccttcagtgctttgatgcagtcttctatctacaaatgaatgagaagaaacccacttggatgtgcccagtttgcgacaagcccgcaccctacgaccaacttattatagatggactcctgtcgaaaatcctgagcgagtgcgaggatgctgacgagatcgaatatctggtcgatggttcctggtgcccaatccgtgcagaaaaggagcggagttgctcccctcagggggcaatcctcgtgctgggcccgtccgatgctaatggcctcctcccggcacctagtgttaacggctctggtgccctcggttctacaggcggcgggggcccagtcggttcaatggaaaacggcaaacccggcgcggacgttgttgatctcaccctcgatagctccagctcaagtgaggatgaagaagaggaggaagaggaggaggaggatgaggacgaggagggacctcgccctaaacgcaggtgtccattccagaagggcttggtccccgcttgctag

SEQ ID NO: 188331 - DNA, 1533 bp, Artificial Sequence
  derived and/or modified sequence
atggctgccgaactggtagaggccaaaaacatggtcatgagctttcgggtgtcggacctgcaaatgctactcgggtttgtcgggcgatcaaagagcggcctgaagcacgaactggttactagggcccttcagctcgttcagttcgactgttctcccgaacttttcaagaaaatcaaggaattatacgagacccgttacgctaagaaaaattccgaacctgctccccagccccacagacccctggatcctctgaccatgcattccacctacgatcgcgcaggggctgtgccacgaacgccgctcgctggccctaatattgattaccccgtgctgtacggtaagtacctcaacggactgggacggcttcctgctaagaccctgaagcccgaagtccgcctcgtcaaactgccgttcttcaatatgctggacgaactcctgaagccgacagagctagttcctcaaaacaacgagaaacttcaagaaagcccatgtatattcgcactaacacccaggcaggtggaacttatcaggaatagccgagagctgcaaccgggtgttaaggcggtgcaggtggtgcttcgaatatgttacagtgacaccagttgcccacaagaggaccagtatccaccaaacattgctgtgaaagtgaaccactcctattgctccgttccaggctattacccatctaacaagcctggtgtggagcccaaacgcccatgtaggcccattaacctgacacacttgatgtacctctctagtgccacaaacagaatcacagtcacatggggtaactacggaaagagctacagtgtggcattgtatttggttcggcaactgacgagctccgagctcctgcagaggctaaaaaccatcggagtgaaacaccctgagctgtgtaaggcccttgtaaaggagaagctgagactagaccctgactcagaaatagcaacaacaggagttagagtgagcttgatatgtcccctggtgaagatgcgcctgtcagtcccctgccgggcagaaacttgcgcccaccttcagtgctttgatgctgttttctacctgcaaatgaacgaaaagaagcccacctggatgtgccctgtatgtgacaagcctgccccttacgaccaactgataattgatggtctgctttccaagattctgtctgagtgcgaagacgcagatgagattgagtatttggtggacggcagctggtgtcctattcgtgcagaaaaggaaaggtcatgttctccccagggggctattctggtgctgggcccatctgatgcaaatgggctgttgcccgctccttcagtaaatgggtctggagccctgggatcaactggaggaggaggccctgtgggcagcatggaaaatggcaagccaggcgctgatgttgtggacctcactctggactcttcaagttccagcgaagatgaggaggaagaggaagaggaggaggaagacgaggacgaggaggggcctcgacctaaaaggaggtgcccatttcagaagggcctggtgcccgcttgttag

SEQ ID NO: 188332 - DNA, 3054 bp, Artificial Sequence
  derived and/or modified sequence
tggtgaccaagatggcggcggagctggtggaggccaaaaacatggtgatgagttttcgagtctccgaccttcagatgctcctgggtttcgtgggccggagtaagagtggactgaagcacgagctcgtcaccagggccctccagctggtgcagtttgactgtagccctgagctgttcaagaagatcaaggagctgtacgagacccgctacgccaagaagaactcggagcctgccccacagccgcaccggcccctggaccccctgaccatgcactccacctacgaccgggccggcgctgtgcccaggactccgctggcaggccccaatattgactaccccgtgctctacggaaagtacttaaacggactgggacggttgcccgccaagaccctcaagccagaagtccgcctggtgaagctgccgttctttaatatgctggatgagctgctgaagcccaccgaattagtcccacagaacaacgagaagcttcaggagagcccgtgcatcttcgcattgacgccaagacaggtggagttgatccggaactccagggaactgcagcccggagttaaagccgtgcaggtcgtcctgagaatctgttactcagacaccagctgccctcaggaggaccagtacccgcccaacatcgctgtgaaggtcaaccacagctactgctccgtcccgggctactacccctccaataagcccggggtggagcccaagaggccgtgccgccccatcaacctcacccacctcatgtacctgtcctcggccaccaaccgcatcactgtcacctgggggaactacggcaagagctactcggtggccctgtacctggtgcggcagctgacctcatcggagctgctgcagaggctgaagaccattggggtaaagcacccggagctgtgcaaggcactggtcaaggagaagctgcgccttgatcctgacagcgagatcgccaccaccggtgtgcgggtgtccctcatctgtccgctggtgaagatgcggctctccgtgccctgccgggcagagacctgtgcccacctgcagtgcttcgacgccgtcttctacctgcagatgaacgagaagaagcccacctggatgtgccccgtgtgcgacaagccagccccctacgaccagctcatcatcgacgggctcctctcgaagatcctgagcgagtgtgaggacgccgacgagatcgagtacctggtggacggctcgtggtgcccgatccgcgccgaaaaggagcgcagctgcagcccgcagggcgccatcctcgtgctgggcccctcggacgccaatgggctcctgcccgcccccagcgtcaacgggagcggtgccctgggcagcacgggtggcggcggcccggtgggcagcatggagaatgggaagccgggcgccgatgtggtggacctcacgctggacagctcatcgtcctcggaggatgaggaggaggaggaagaggaggaggaagacgaggacgaagaggggccccggcccaagcgccgctgccccttccagaagggcctggtgccggcctgctgaccccggccgcacactcgactttcctggtgctcaccacgcagaggggcacgggccagcctcgggcgcagagggaggagtgacctttctttttctttttattgtcgttcgttttgtttttccacccttttgcctggctcctggcacctgtacctctggactctcctatcgggggattaaaaaaaaaagtaaaatgacaaaaaaagatacaaaaaagaaaaatgaaacaaaaaagtcaaactcttaaaaacaaggccggccacccacacagccgcctccccggctggagtccgagccgggaaggggtagtgggcgggagggaccaggacgccgccccgcgccctcccctccggatgccccgccgcccgccgccctctgcccacgaccattccagccagtgcgcggggacccgggcggcgggcggtggggcgcagcccctctctggcgaccactttgacgtttgtctcttcctttgctttttctctgcaaatgcatcctcgcccagagaccctcacgcgccgagcagcgagcgttttagccgagaagccatggagtgggttggggcggggaggggcagtagggtggggggatgggtgggcaggatgggggtacagtgggcggctggggagggtttagccacagatgtgttgtattttttgaaagtgcaataatttggtattttgaagacccggcgtgtggtcaggaacccccggggaaggcgggggcccagggtgcggcaccgtgtggcgtgggggggtctcagttttctagccagctacctcggtaattccaattcaggttaacttccctacggaacagcacagatgtccacagatgtccacagctgccgccgccgccgccgccaccataccccggtccttggggcatgggttgcggtcgcttcccaaggggcagcagggaccccggccaccccggctctcggtttgggttgattcctctcctttttgctcttggttttccgacgggtacgaggctggcccggcaccctgtcccccgggagcctcactcttccagcaggaccagaccaggggcctccttcctgtccccaggcgttcccggcccctcgcaggccccacccatgcccttggcctcagggtccaacaactgggggagctaccagggctctgccttcaggagcccacagctgggcaccccccttgccccgcaggagaccggggcgcaggcggggcaccggcctcacctggttctccaacaccgctgcctgcggtctgttttgcttttgtcctccccagcccagaattttcctttgtataaacagaactcctagtcaggaagcaatatcatttcaggtctaaagaaagggacgtgcatctggccgagggcagttcagtctcactgcagagcccgcagcccgctgcgcagctcggcccctcccgcccgcacgggcagctgaaggccgctgttttctaatatttgtattctaatttaattgtttttaaaaaatgcaaataaaaaaggtcgaggtgaagcc

SEQ ID NO: 188333 - DNA, 1533 bp, Artificial Sequence
  derived and/or modified sequence
atggccgccgagctggtggaggccaagaacatggtgatgagcttcagagtgagcgacctgcagatgctgctgggcttcgtgggcagaagcaagagcggcctgaagcacgagctggtgaccagagccctgcagctggtgcagttcgactgcagccccgagctgttcaagaagatcaaggagctgtacgagaccagatacgccaagaagaacagcgagcccgccccccagccccacagacccctggaccccctgaccatgcacagcacctacgacagagccggcgccgtgcccagaacccccctggccggccccaacatcgactaccccgtgctgtacggcaagtacctgaacggcctgggcagactgcccgccaagaccctgaagcccgaggtgagactggtgaagctgcccttcttcaacatgctggacgagctgctgaagcccaccgagctggtgccccagaacaacgagaagctgcaggagagcccctgcatcttcgccctgacccccagacaggtggagctgatcagaaacagcagagagctgcagcccggcgtgaaggccgtgcaggtggtgctgagaatctgctacagcgacaccagctgcccccaggaggaccagtacccccccaacatcgccgtgaaggtgaaccacagctactgcagcgtgcccggctactaccccagcaacaagcccggcgtggagcccaagagaccctgcagacccatcaacctgacccacctgatgtacctgagcagcgccaccaacagaatcaccgtgacctggggcaactacggcaagagctacagcgtggccctgtacctggtgagacagctgaccagcagcgagctgctgcagagactgaagaccatcggcgtgaagcaccccgagctgtgcaaggccctggtgaaggagaagctgagactggaccccgacagcgagatcgccaccaccggcgtgagagtgagcctgatctgccccctggtgaagatgagactgagcgtgccctgcagagccgagacctgcgcccacctgcagtgcttcgacgccgtgttctacctgcagatgaacgagaagaagcccacctggatgtgccccgtgtgcgacaagcccgccccctacgaccagctgatcatcgacggcctgctgagcaagatcctgagcgagtgcgaggacgccgacgagatcgagtacctggtggacggcagctggtgccccatcagagccgagaaggagagaagctgcagcccccagggcgccatcctggtgctgggccccagcgacgccaacggcctgctgcccgcccccagcgtgaacggcagcggcgccctgggcagcaccggcggcggcggccccgtgggcagcatggagaacggcaagcccggcgccgacgtggtggacctgaccctggacagcagcagcagcagcgaggacgaggaggaggaggaggaggaggaggaggacgaggacgaggagggccccagacccaagagaagatgccccttccagaagggcctggtgcccgcctgctag

SEQ ID NO: 188334 - protein, 456 aa, Artificial Sequence
  derived and/or modified sequence
MPPGPWESCFWVGGLILWLSVGSSGDAPPTPQPKCADFQSANLFEGTDLKVQFLLFVPSNPSCGQLVEGSSDLQNSGFNATLGTKLIIHGFRVLGTKPSWIDTFIRTLLRATNANVIAVDWIYGSTGVYFSAVKNVIKLSLEISLFLNKLLVLGVSESSIHIIGVSLGAHVGGMVGQLFGGQLGQITGLDPAGPEYTRASVEERLDAGDALFVEAIHTDTDNLGIRIPVGHVDYFVNGGQDQPGCPTFFYAGYSYLICDHMRAVHLYISALENSCPLMAFPCASYKAFLAGRCLDCFNPFLLSCPRIGLVEQGGVKIEPLPKEVKVYLLTTSSAPYCMHHSLVEFHLKELRNKDTNIEVTFLSSNITSSSKITIPKQQRYGKGIIAHATPQCQINQVKFKFQSSNRVWKKDRTTIIGKFCTALLPVNDREKMVCLPEPVNLQASVTVSCDLKIACV

SEQ ID NO: 188335 - DNA, 1371 bp, Artificial Sequence
  derived and/or modified sequence
atgccacccggtccctgggagtcctgcttttgggtgggtgggctaatcctgtggttgtccgtgggctcctctggagacgctccaccaacaccgcaacccaaatgtgcagactttcaatctgcaaatttattcgagggaacggatctcaaggtccagtttctgttattcgtgcccagtaaccctagctgcggtcagctggtcgagggaagctccgatctccagaatagcggattcaacgctacacttggtacaaaacttatcatccacggctttcgagttctggggactaaaccttcatggatcgacacttttatcagaacattgctgagagcaacaaatgctaatgtcattgcggtcgactggatttacggctccactggagtttacttcagcgccgtcaagaatgtgataaagctctctttagaaatatcgctctttctgaacaaattgttggtcctgggggtctctgagagcagcatccacatcattggcgtgtccttgggagcacatgtgggaggtatggtaggccagctatttggcggtcagctggggcagattactggcctggaccctgccggccccgaatacacacgggcctccgttgaggagagattagacgccggcgacgcattgttcgtggaagctatacataccgatacagataacctgggaatccggatccccgtcggccacgtggattactttgtgaatggcgggcaggaccagcctggttgccctacatttttctacgctggttattcttacttaatctgcgatcacatgagagccgttcatctctacattagcgccctggagaacagttgccctttgatggccttcccttgtgccagttacaaagccttcctcgcaggccgatgcctggactgcttcaacccttttctgttgtcttgtccgcggatcggtcttgtagaacagggaggagtaaaaatcgaacccctgcccaaggaggtgaaggtgtacctcctaactactagctctgctccttattgcatgcatcatagcttggtggaattccatctcaaggaactgcgcaacaaggatacgaacattgaggttacattcttgagctctaatattacctcctcgagcaaaatcactatcccaaagcagcagagatatggcaagggcattatcgcccatgctaccccacagtgtcagattaaccaggtgaagttcaagtttcagtcttccaatcgtgtttggaaaaaggatcgaacgacaattatcggaaagttctgcaccgccttactcccggtgaacgaccgcgaaaagatggtgtgcttacccgagcccgttaacctgcaagcgtccgtaacagtgagttgtgacctaaagatagcctgcgtctag

SEQ ID NO: 188336 - DNA, 1371 bp, Artificial Sequence
  derived and/or modified sequence
atgcctcctggcccctgggagagctgcttctgggtgggcggcctcatcctgtggctgtctgtgggcagcagtggagatgccccacccaccccccagcccaagtgtgccgacttccagagcgccaacctgtttgagggcacagacctgaaggtgcagttcctgctgtttgtgcccagcaaccccagctgtggccagctggtggagggcagcagtgacctgcagaacagcggcttcaatgccaccctgggcaccaagctgatcatccacggcttccgggtgctgggcaccaagcccagctggattgacaccttcatccgcaccctgctgcgggccaccaatgccaacgtgattgctgtggactggatctacggcagcactggagtgtacttctctgctgtgaagaatgtcatcaagctgagcctggagatcagcctcttcctgaacaagctgctggtgctgggcgtgtctgagagcagcatccacatcattggagtgtccctgggcgcccacgtgggcggcatggtgggccagctgtttggaggccagctgggccagatcaccggcctggaccctgctggccctgagtacacccgggcctctgtggaggagcggctggatgctggagatgccctgtttgtggaggccatccacacagacacagacaacctgggcatccgcatccctgtgggccacgtggactactttgtgaatggaggccaggaccagcccggctgccccaccttcttctacgccggctacagctacctgatctgtgaccacatgagagctgtgcacctgtacatcagcgccctggagaacagctgccccctgatggccttcccctgtgccagctacaaggccttcctggccggccgctgcctggactgcttcaaccccttcctgctgagctgccccagaattggcctggtggagcagggcggcgtgaagattgagcccctgcccaaggaggtgaaggtgtacctgctgaccaccagcagcgccccctactgcatgcaccacagcctggtggagttccacctgaaggagctgaggaacaaggacaccaacatcgaggtgaccttcctgagcagcaacatcaccagcagcagcaagatcaccatccccaagcagcagagatatggcaagggcatcatcgcccacgccaccccccagtgccagatcaaccaggtgaagttcaagttccagagcagcaacagagtgtggaagaaggacaggaccaccatcatcggcaagttctgcacagccctgctgcctgtgaatgaccgggagaagatggtgtgcctgcctgagcctgtgaacctgcaggcctctgtgacagtgtcctgtgacctgaagatcgcctgtgtgtag

SEQ ID NO: 188337 - DNA, 1371 bp, Artificial Sequence
  derived and/or modified sequence
atgccccccggcccctgggagagctgcttctgggtgggcggcctgatcttatggctgtccgtggggagttcaggagacgctccacctactcctcaaccaaagtgcgcagatttccaaagtgctaacttgttcgaaggaacagacctgaaagtccagttccttctgttcgtgccttctaatccatcgtgcggtcagctcgtagagggcagttcagacttgcagaacagcggcttcaatgctaccttggggacaaaactaataattcatggctttcgagtgctggggaccaagccttcttggattgacacatttatcaggactctgctgagagcaacaaacgccaacgtcattgccgttgattggatctatggttccacgggcgtctatttttctgccgtaaagaatgttattaaactttctctggaaataagcctcttcctgaataagcttctcgttctcggggtgtcagagtccagcatccacataattggcgtgtcactgggggctcacgtgggagggatggtgggccagttgttcggcggccagctgggacagattaccgggcttgaccccgcggggccagagtacacaagggcctctgtggaggagcggcttgacgcgggggacgctcttttcgtcgaggcaatccataccgatacagataacttggggatacggatccctgtcggccacgtcgattatttcgtgaatggcggtcaggatcaacccggttgcccgactttcttttacgcaggttattcatacctcatctgtgatcacatgcgcgcagtccacttgtacatttcagctctggagaacagctgtcctctaatggctttcccttgtgcatcgtacaaagcctttcttgccgggcgctgtcttgattgctttaaccctttcctgctgtcgtgtcctcggataggactggtggagcaggggggagtgaagattgaaccactaccaaaagaggtgaaggtgtacttgctcactacatcttctgcgccatactgtatgcaccattcattggtcgagtttcacctgaaagagctgcggaataaagatacgaacatagaggtaacctttctctccagcaatatcacgtcttcctctaagataactatcccaaaacagcagcggtatggcaagggaatcatcgcccacgcaactccccagtgccagatcaaccaggtgaagttcaagttccaatcctccaatcgggtgtggaaaaaggaccgtaccacgatcattgggaagttctgtaccgcccttttgcccgtgaatgatcgggagaagatggtctgcctgccagagccagtgaatctccaggccagcgtcaccgtcagctgcgatctaaagattgcctgcgtgtag

SEQ ID NO: 188338 - DNA, 1786 bp, Artificial Sequence
  derived and/or modified sequence
gaggctgggttatatgatctctttggctttagggaattactccataccagctctgagatttccagctcagcgatgcccccaggtccctgggagagctgcttctgggtggggggcctcattttgtggctcagcgttggaagttcaggggatgcacctcctaccccacagccaaagtgcgctgacttccagagcgccaacctttttgaaggcaccgatctcaaagtccagtttctcctctttgtcccttcgaatcctagctgtgggcagctagtagaaggaagcagtgacctccaaaactctgggttcaatgccactctgggaaccaaactaattatccatggattcagggttttaggaacaaagccttcctggattgacacatttattagaacccttctgcgtgcaacgaatgctaatgtgattgccgtggactggatttatgggtctacaggagtctacttctcagctgtgaaaaatgtgattaagttgagcctcgagatctcccttttcctcaataaactcctggtgctgggtgtgtcggaatcctcaatccacatcattggtgttagcctgggggcccacgttgggggcatggtgggacagctcttcggaggccagctgggacagatcacaggcctggaccccgctggacctgagtacaccagggccagtgtggaagagcgcttggatgctggagatgccctcttcgtggaagccatccacacagacaccgacaatttgggtattcggattcccgttggacatgtggactacttcgtcaacggaggccaagaccaacctggctgccccaccttcttttacgcaggttatagttatctgatctgtgatcacatgagggctgtgcacctctacatcagcgccctggagaattcctgtccactgatggcctttccctgtgccagctacaaggccttccttgctggacgctgtctggattgctttaacccttttctgctttcctgcccaaggataggactggtggaacaaggtggtgtcaagatagagccgctccccaaggaagtgaaagtctacctcctgactacttccagtgctccgtactgcatgcatcacagcctcgtggagtttcacttgaaggaactgagaaacaaggacaccaacatcgaggttaccttccttagcagtaacatcacctcttcatctaagatcaccatacctaagcagcaacgctatgggaaaggaatcatagcccatgccaccccacaatgccagataaaccaagtgaaattcaagtttcagtcttccaaccgagtttggaaaaaagaccggactaccattattgggaagttctgcactgcccttttgcctgtcaatgacagagaaaagatggtctgcttacctgaaccagtgaacttacaagcaagtgtgactgtttcctgtgacctgaagatagcctgtgtgtagtttaacctgggcaggacacatctccctgcattttttttttttttttgagagagaggtgtgatgagggatgtgtgtgtgcagcttattgtagaccattactactaaggagaaaagcaaagctctttcttattttcctcataatcagctaccctggaggggagggagaactcattttacagaacttggtttcctttgccgatcttatgtacatacccattttagctttcccatgcatacttaactgcacttgctttatctccttgggcattcgtacttaggattcaatagaaacatgtacagggtaaacaattttttaaaaataaaacttcatggagtatctgaa

SEQ ID NO: 188339 - DNA, 1371 bp, Artificial Sequence
  derived and/or modified sequence
atgcccccaggaccctgggaatcctgcttctgggtgggtggtcttatactatggttgtctgtcgggtcatcaggcgacgcgcctcccacaccccaaccgaagtgtgccgatttccagagcgcaaacttattcgaggggactgatctcaaagtccagtttctccttttcgtaccatctaatccgtcatgtggtcagctggttgaggggagtagtgacctgcagaacagcggttttaatgccacattgggaaccaagttgattattcacggttttcgtgtgctgggcacaaaaccaagctggattgacacgtttataaggactctactgcgggctactaatgcaaacgtgatagcagtcgactggatttacgggagcaccggagtgtattttagcgcagtcaagaacgtaatcaaattgtctttggaaatctctcttttcctcaacaaactgctggttctcggtgtctctgagtccagcatacatataatcggtgtatccctcggggctcacgtgggcggaatggtgggccagctgttcggaggccaactgggccaaattacagggctcgaccctgctggccctgagtatacccgcgctagtgtggaggagcggttagatgcaggagatgcactgttcgtcgaagcaatccacacagatacagataatctgggtatcagaattccagtagggcatgtggactacttcgtaaatgggggacaagaccaacccggatgccccacttttttctacgccggatatagctacttgatttgcgaccatatgagagcagtgcatctctacattagcgccctcgagaactcgtgtcctctgatggctttcccatgcgcttcttacaaggcgttcctcgccggtagatgtctggattgttttaacccatttttactttcctgcccccgtatcgggctggtggaacagggaggagttaagatcgagccactcccaaaagaggtaaaggtgtacctgctcaccacttcaagcgctccgtattgtatgcaccactctctggtagagtttcatcttaaagagcttcgaaataaggacactaacattgaagtgacctttctgtcctctaacattacctccagttctaaaatcacaatacctaaacagcaacggtacggtaagggtatcatcgcacacgctacgccccagtgccagatcaaccaggtaaaattcaaatttcagtccagcaatcgagtgtggaagaaggatagaacaaccatcatagggaaattttgtaccgctcttctcccagtcaacgaccgcgagaagatggtttgtcttcccgagcccgtaaaccttcaggcttcagtcacggtgtcatgcgacttgaagattgcctgcgtgtag

SEQ ID NO: 188340 - DNA, 1371 bp, Artificial Sequence
  derived and/or modified sequence
atgccccccggcccctgggagagctgcttctgggtgggcggcctgatcctgtggctgagcgtgggcagcagcggcgacgccccccccaccccccagcccaagtgcgccgacttccagagcgccaacctgttcgagggcaccgacctgaaggtgcagttcctgctgttcgtgcccagcaaccccagctgcggccagctggtggagggcagcagcgacctgcagaacagcggcttcaacgccaccctgggcaccaagctgatcatccacggcttcagagtgctgggcaccaagcccagctggatcgacaccttcatcagaaccctgctgagagccaccaacgccaacgtgatcgccgtggactggatctacggcagcaccggcgtgtacttcagcgccgtgaagaacgtgatcaagctgagcctggagatcagcctgttcctgaacaagctgctggtgctgggcgtgagcgagagcagcatccacatcatcggcgtgagcctgggcgcccacgtgggcggcatggtgggccagctgttcggcggccagctgggccagatcaccggcctggaccccgccggccccgagtacaccagagccagcgtggaggagagactggacgccggcgacgccctgttcgtggaggccatccacaccgacaccgacaacctgggcatcagaatccccgtgggccacgtggactacttcgtgaacggcggccaggaccagcccggctgccccaccttcttctacgccggctacagctacctgatctgcgaccacatgagagccgtgcacctgtacatcagcgccctggagaacagctgccccctgatggccttcccctgcgccagctacaaggccttcctggccggcagatgcctggactgcttcaaccccttcctgctgagctgccccagaatcggcctggtggagcagggcggcgtgaagatcgagcccctgcccaaggaggtgaaggtgtacctgctgaccaccagcagcgccccctactgcatgcaccacagcctggtggagttccacctgaaggagctgagaaacaaggacaccaacatcgaggtgaccttcctgagcagcaacatcaccagcagcagcaagatcaccatccccaagcagcagagatacggcaagggcatcatcgcccacgccaccccccagtgccagatcaaccaggtgaagttcaagttccagagcagcaacagagtgtggaagaaggacagaaccaccatcatcggcaagttctgcaccgccctgctgcccgtgaacgacagagagaagatggtgtgcctgcccgagcccgtgaacctgcaggccagcgtgaccgtgagctgcgacctgaagatcgcctgcgtgtag

SEQ ID NO: 188341 - protein, 2799 aa, Artificial Sequence
  derived and/or modified sequence
MTSIHFVVHPLPGTEDQLNDRLREVSEKLNKYNLNSHPPLNVLEQATIKQCVVGPNHAAFLLEDGRVCRIGFSVQPDRLELGKPDNNDGSKLNSNSGAGRTSRPGRTSDSPWFLSGSETLGRLAGNTLGSRWSSGVGGSGGGSSGRSSAGARDSRRQTRVIRTGRDRGSGLLGSQPQPVIPASVIPEELISQAQVVLQGKSRSVIIRELQRTNLDVNLAVNNLLSRDDEDGDDGDDTASESYLPGEDLMSLLDADIHSAHPSVIIDADAMFSEDISYFGYPSFRRSSLSRLGSSRVLLLPLERDSELLRERESVLRLRERRWLDGASFDNERGSTSKEGEPNLDKKNTPVQSPVSLGEDLQWWPDKDGTKFICIGALYSELLAVSSKGELYQWKWSESEPYRNAQNPSLHHPRATFLGLTNEKIVLLSANSIRATVATENNKVATWVDETLSSVASKLEHTAQTYSELQGERIVSLHCCALYTCAQLENSLYWWGVVPFSQRKKMLEKARAKNKKPKSSAGISSMPNITVGTQVCLRNNPLYHAGAVAFSISAGIPKVGVLMESVWNMNDSCRFQLRSPESLKNMEKASKTTEAKPESKQEPVKTEMGPPPSPASTCSDASSIASSASMPYKRRRSTPAPKEEEKVNEEQWSLREVVFVEDVKNVPVGKVLKVDGAYVAVKFPGTSSNTNCQNSSGPDADPSSLLQDCRLLRIDELQVVKTGGTPKVPDCFQRTPKKLCIPEKTEILAVNVDSKGVHAVLKTGNWVRYCIFDLATGKAEQENNFPTSSIAFLGQNERNVAIFTAGQESPIILRDGNGTIYPMAKDCMGGIRDPDWLDLPPISSLGMGVHSLINLPANSTIKKKAAVIIMAVEKQTLMQHILRCDYEACRQYLMNLEQAVVLEQNLQMLQTFISHRCDGNRNILHACVSVCFPTSNKETKEEEEAERSERNTFAERLSAVEAIANAISVVSSNGPGNRAGSSSSRSLRLREMMRRSLRAAGLGRHEAGASSSDHQDPVSPPIAPPSWVPDPPAMDPDGDIDFILAPAVGSLTTAATGTGQGPSTSTIPGPSTEPSVVESKDRKANAHFILKLLCDSVVLQPYLRELLSAKDARGMTPFMSAVSGRAYPAAITILETAQKIAKAEISSSEKEEDVFMGMVCPSGTNPDDSPLYVLCCNDTCSFTWTGAEHINQDIFECRTCGLLESLCCCTECARVCHKGHDCKLKRTSPTAYCDCWEKCKCKTLIAGQKSARLDLLYRLLTATNLVTLPNSRGEHLLLFLVQTVARQTVEHCQYRPPRIREDRNRKTASPEDSDMPDHDLEPPRFAQLALERVLQDWNALKSMIMFGSQENKDPLSASSRIGHLLPEEQVYLNQQSGTIRLDCFTHCLIVKCTADILLLDTLLGTLVKELQNKYTPGRREEAIAVTMRFLRSVARVFVILSVEMASSKKKNNFIPQPIGKCKRVFQALLPYAVEELCNVAESLIVPVRMGIARPTAPFTLASTSIDAMQGSEELFSVEPLPPRPSSDQSSSSSQSQSSYIIRNPQQRRISQSQPVRGRDEEQDDIVSADVEEVEVVEGVAGEEDHHDEQEEHGEENAEAEGQHDEHDEDGSDMELDLLAAAETESDSESNHSNQDNASGRRSVVTAATAGSEAGASSVPAFFSEDDSQSNDSSDSDSSSSQSDDIEQETFMLDEPLERTTNSSHANGAAQAPRSMQWAVRNTQHQRAASTAPSSTSTPAASSAGLIYIDPSNLRRSGTISTSAAAAAAALEASNASSYLTSASSLARAYSIVIRQISDLMGLIPKYNHLVYSQIPAAVKLTYQDAVNLQNYVEEKLIPTWNWMVSIMDSTEAQLRYGSALASAGDPGHPNHPLHASQNSARRERMTAREEASLRTLEGRRRATLLSARQGMMSARGDFLNYALSLMRSHNDEHSDVLPVLDVCSLKHVAYVFQALIYWIKAMNQQTTLDTPQLERKRTRELLELGIDNEDSEHENDDDTNQSATLNDKDDDSLPAETGQNHPFFRRSDSMTFLGCIPPNPFEVPLAEAIPLADQPHLLQPNARKEDLFGRPSQGLYSSSASSGKCLMEVTVDRNCLEVLPTKMSYAANLKNVMNMQNRQKKEGEEQPVLPEETESSKPGPSAHDLAAQLKSSLLAEIGLTESEGPPLTSFRPQCSFMGMVISHDMLLGRWRLSLELFGRVFMEDVGAEPGSILTELGGFEVKESKFRREMEKLRNQQSRDLSLEVDRDRDLLIQQTMRQLNNHFGRRCATTPMAVHRVKVTFKDEPGEGSGVARSFYTAIAQAFLSNEKLPNLECIQNANKGTHTSLMQRLRNRGERDREREREREMRRSSGLRAGSRRDRDRDFRRQLSIDTRPFRPASEGNPSDDPEPLPAHRQALGERLYPRVQAMQPAFASKITGMLLELSPAQLLLLLASEDSLRARVDEAMELIIAHGRENGADSILDLGLVDSSEKVQQENRKRHGSSRSVVDMDLDDTDDGDDNAPLFYQPGKRGFYTPRPGKNTEARLNCFRNIGRILGLCLLQNELCPITLNRHVIKVLLGRKVNWHDFAFFDPVMYESLRQLILASQSSDADAVFSAMDLAFAIDLCKEEGGGQVELIPNGVNIPVTPQNVYEYVRKYAEHRMLVVAEQPLHAMRKGLLDVLPKNSLEDLTAEDFRLLVNGCGEVNVQMLISFTSFNDESGENAEKLLQFKRWFWSIVEKMSMTERQDLVYFWTSSPSLPASEEGFQPMPSITIRPPDDQHLPTANTCISRLYVPLYSSKQILKQKLLLAIKTKNFGFV

SEQ ID NO: 188342 - DNA, 8400 bp, Artificial Sequence
  derived and/or modified sequence
atgacaagcatccactttgtggttcacccgctacccggaactgaggatcaactcaatgatcgtctgcgcgaagtgtccgagaagttaaacaaatataatctgaattcccacccccccctgaacgtactggaacaggccacaataaaacagtgtgtggttggaccaaaccacgccgccttcctcctcgaagatgggcgcgtgtgtagaatcgggttttcagtgcagcccgatcggctcgagctggggaagcccgataacaatgatggctccaaacttaactccaatagtggtgcaggtcggactagtcgacccgggcggacatctgatagcccttggtttctgtcaggatcagagactttaggacgtctggccggtaatactcttggtagtcgctggtcctccggcgtcggtggatccggaggggggagttctggtaggtccagcgcaggggctagagatagcaggcgccagacaagggtcattaggacagggcgagaccgaggctccggactcctgggtagtcagcctcaacccgttatcccggcctcagttattccagaagagcttatcagtcaggctcaggtggtgttgcagggcaaaagcaggagcgttatcatccgggagttgcagcgaacaaatctagacgttaacctcgccgttaacaacctgctgtccagagacgatgaagatggagatgacggcgacgacaccgcctcagaatcttatctgccaggcgaagatcttatgtccctactcgacgctgacatccatagcgctcacccatcggtgatcatcgatgccgacgcgatgttcagcgaggacattagttacttcggctacccttccttccgcagaagcagtttatcccggctcggtagttcccgggttctgctcctgcccctggaacgcgactccgaactgttacgcgagagggagtccgtcctacgactgagagagcgccggtggttagacggcgcctcgttcgataacgaacgagggtcaacatccaaagagggagagccaaacctggataagaagaatacccccgttcagtcacccgtttcactcggggaggatttacaatggtggcccgacaaggacggcacaaaattcatttgtatcggtgccctgtactcagaactgctagccgtgagctccaagggcgagttgtatcagtggaaatggtctgagtccgagccctatcggaatgcgcagaacccgtctctccaccacccccgcgccacatttctgggcttgacaaatgaaaagattgtgctgctctctgcgaactcgattagagctacggttgctacagagaacaacaaggttgcgacgtgggtggacgaaacactgtccagtgtggcctctaaactcgagcataccgcccagacctacagcgaactgcaaggagagcggatcgtgtcgctgcattgctgcgccctgtatacttgcgctcagctggaaaactccttgtattggtggggcgtggttccattcagtcagcgtaagaaaatgcttgagaaggccagagctaaaaacaaaaagcctaagtcttccgccggaatatcgagcatgccaaatatcaccgtggggactcaggtttgcctgagaaacaatcccctctaccatgcaggtgctgtggccttctctatctccgccggtatccctaaagtgggcgtcttgatggagagcgtctggaacatgaacgattcctgcaggtttcagctgcggagccccgagagtttaaagaacatggaaaaggcatctaaaacaaccgaagctaaaccagagtccaaacaggagcccgtgaaaacagagatgggaccaccacctagcccagcttctacttgttcagatgcatcaagtatagccagttccgcatccatgccctataagaggcggagatctacgcccgcccccaaggaagaggagaaagtgaatgaagagcagtggtctcttagagaggtagtctttgttgaggatgtcaagaatgtgccagttgggaaggttctcaaagtggacggagcctatgttgccgttaagtttcctggtactagcagtaacactaattgccagaactcttctggtccagatgcagacccttcctctctgctacaggactgtaggctcctcaggatcgatgagctgcaggtagtgaagactggcggtacccccaaagtgccagactgcttccaacgaactcccaagaagttgtgcatccccgagaagactgagatcctggctgtaaacgttgactcaaagggcgtccacgcagtgctgaagaccggcaactgggtgcgctattgcatcttcgatctcgcgaccggtaaagcagagcaggaaaacaatttccccaccagctctattgcctttctgggacagaatgagcgaaatgtagcaatcttcaccgccggccaggaatctcccatcatcctgagggacggtaatggtacgatctaccccatggctaaagattgcatgggaggcatcagagatccagattggctggacctccctcccatttcatcccttgggatgggtgtgcacagcctgattaacctccccgcaaatagcaccattaagaagaaggcggccgtgattattatggcagtggaaaagcagacccttatgcagcacatcctccggtgtgactacgaggcgtgccggcagtacttgatgaatctcgagcaggccgttgtgcttgagcagaatctccagatgttgcaaacctttataagccatcggtgcgatggtaataggaatatcttgcacgcctgcgtgtcagtctgttttcctacaagcaacaaagagactaaggaagaggaggaggccgaacgttccgagagaaatacattcgccgaaaggctgtctgccgttgaggcgattgctaatgcgatatcggtggtctcgtcaaacggaccgggtaaccgggcaggctcttctagctccagaagtttgcgactgcgcgagatgatgaggcgaagcttgcgggccgcaggccttggccggcatgaggcaggagcctcctccagtgatcatcaggatccagtgtctccgcctattgctccccctagttgggtgcctgacccacccgcaatggacccggacggcgacattgattttatcctggctcccgccgtgggctcactcacaaccgcagctacaggtacaggccaaggcccaagcacgtcaacaatacccgggccttctacagagccttcagtggtggagagtaaagataggaaggcgaacgctcactttatccttaagctgctgtgcgacagcgtggttctccaaccatacctgagggagctccttagcgcgaaagacgctcggggcatgactccatttatgtctgccgtgtccggccgagcatatccggctgctatcaccattttggagacagcccaaaagatcgccaaggctgagatcagcagctccgagaaggaggaggacgttttcatggggatggtctgtccgtcaggaactaatccagatgactctcctttgtacgttctgtgttgcaacgatacatgtagttttacctggactggagccgagcacattaatcaggatatctttgaatgccgcacctgcgggctgctcgaatccttgtgctgttgcacggagtgtgccagagtgtgtcataagggccatgactgcaagttgaaaaggacttcccctacggcctactgcgactgttgggagaagtgtaagtgcaagactctcattgcaggccagaagagtgcacgattagatctgctgtacaggttgctcaccgccaccaaccttgttacactccctaacagtcgcggggaacacttgctcctgtttttggtacagaccgtggcccggcaaaccgtggagcactgtcagtaccggccaccgagaatccgggaagaccgcaatcggaagactgcctccccggaagactccgacatgccagaccatgatcttgagcctcctagatttgcgcagctcgctctggagagggtgctccaggactggaatgcccttaaatcaatgatcatgttcggatcccaggaaaacaaggacccactgtctgcaagcagtagaattggccatcttttaccagaggagcaggtgtatctgaaccaacagtctggcaccatccgcctggattgcttcacacattgcttaatagtgaaatgcacagcagacatcctcctgttggatacactgctggggactctcgttaaggagcttcaaaacaagtatacccccggccgtagggaagaagccatcgcagtgactatgagattcctcaggtctgtggcacgagtttttgtgatccttagtgtcgagatggctagctccaagaagaagaacaatttcatcccccagcctatcgggaaatgcaagagggtgtttcaggctctgctgccttacgctgtggaggagttatgcaacgtcgccgagagcctaatcgtgcccgtaagaatggggatcgctcgcccaacagctccattcacactggcatcaacttccattgatgctatgcaagggtctgaggaactgttttcggtggaaccgctgcctccccgcccctctagtgaccagtcctcctcttccagccagtctcagtccagttatataattcgaaatccacaacagagacgaatcagccagtcccagccagtcagagggagagacgaagagcaggacgacatcgttagcgccgacgtcgaagaagtcgaagtcgttgagggcgttgccggcgaagaggaccaccacgacgagcaggaggaacacggcgaggagaatgcagaggcggaaggtcagcacgacgaacatgatgaagacgggagcgacatggagctggatctgctggctgccgcggagacagaatctgattctgagtctaatcatagcaaccaggacaacgcctcagggaggcgctccgtggttaccgccgcgactgcaggctccgaagcgggggccagttccgtgccagccttcttctccgaagatgactcccagtccaacgattcatcagactcagatagctcctcatcccaatctgacgatatagaacaggagacattcatgcttgatgaacctctggagcgcactacaaattcgtctcacgcgaatggagctgctcaggcaccgcgaagcatgcaatgggctgtgcgaaatacgcagcaccagagggcagcatccactgcgccgtcttccacaagtacccccgccgcatcctcagcggggcttatatacatagatccatctaaccttagaaggtctggaactatttctacttcagctgctgctgccgcagcggccttggaggcaagtaatgccagtagctacctgacaagtgcctcgtctctggcgagggcctactcaattgtgattaggcagatcagcgacctgatgggccttattccgaaatataaccacctggtgtattcccaaataccagccgctgtaaagctcacctatcaggacgcagtcaacctgcaaaattacgtcgaagagaaactaattccgacgtggaattggatggtttccatcatggatagcaccgaagcccagcttagatacggcagcgccctggctagcgccggggaccctgggcaccctaaccatccgcttcacgcctcccaaaattccgcacgtagagaaaggatgacagctagagaggaggcaagtctacggacactggagggaaggcggagggcaactctcctttccgccagacagggcatgatgtctgccagaggagactttctcaactacgccttgtccctgatgcggtcacacaatgacgaacacagcgatgtcctccccgtgttggacgtgtgctccctcaaacatgtggcatatgtcttccaggctctgatctattggattaaggccatgaaccaacagactacactggatactccccagttggaaagaaagcgtactagggagctgttggagctgggcatcgataatgaggatagtgagcacgaaaacgacgacgacaccaaccaatcagccactctcaacgataaagatgacgacagcctccccgccgaaacaggacaaaatcatcccttcttcaggcgcagcgactcgatgacgttcctcgggtgtatccccccgaacccattcgaagtgcctctggctgaagccattcccctcgctgaccagccacatctgctgcaaccaaatgcgcgcaaggaggacctgttcggacgtccaagtcagggactgtatagcagttctgcatcatccgggaaatgtctcatggaagtaacagtggacaggaattgtttggaggtcctgccaaccaagatgtcctatgcagctaacctaaagaatgtgatgaatatgcaaaaccggcagaaaaaggagggggaggagcagcctgtgctgccagaggagaccgagtccagcaaacccggacccagtgcccatgatcttgcggcccagctaaaatcatccctgctggcggagatcggcctcactgagtctgaagggccgccattgacttcattcagaccccagtgttcctttatgggtatggtcatctcacacgatatgctgctggggaggtggcgcctgagcttagaactcttcggtcgcgtgttcatggaggacgtgggggccgagcctggatccatcctgacagaactgggcggctttgaagtgaaggagtccaaattccgcagggagatggagaagctcaggaaccagcagagccgcgacttatccctagaagtagaccgggaccgggaccttttgattcaacagactatgcgccagttgaacaatcatttcggcaggcggtgcgcgaccacccctatggccgtccacagagtaaaggttacattcaaggatgagcccggcgagggctctggagtagcccgaagtttttacaccgccattgcccaggctttcctgtccaacgaaaagttgcctaacttggaatgcattcagaatgctaacaagggaacccacactagcctgatgcagaggctgaggaatcgcggcgagcgtgacagggaaagagaaagagagcgggagatgcgaaggagctctggactgagagcaggcagtcgcagggacagagatcgtgatttccggcgccaactgtccatcgacacaaggcccttcaggccagcttcagaaggcaatcccagcgatgaccctgaaccgctacccgcccataggcaagccctgggcgaacggctgtacccgagagtccaggctatgcagccggcgttcgccagtaaaattacaggtatgctcttagaactctcacccgcacagctgctcctcctcctggcaagcgaggactctctgagggcccgggttgacgaggcaatggagcttattatcgcacacggcagagaaaatggtgcagactctatccttgacctggggctggtggactcatccgagaaagtacaacaggaaaaccgtaaaagacacggcagcagccgctcagtggtggacatggatctggacgatactgacgatggcgatgataacgccccgctgttctatcaaccagggaagaggggtttctacactccccgaccgggcaagaacaccgaagctaggctaaattgctttcgcaacattgggcggattctgggactgtgtctgctgcagaacgagctgtgccccatcacattgaatagacatgtgatcaaagtcttgctgggtagaaaagtaaattggcatgacttcgcgtttttcgatcccgtgatgtatgaatctctgaggcagctcatcctggcgtctcaaagcagtgacgcggacgctgtgttctcagccatggatcttgccttcgcaatcgacctgtgcaaagaggagggtgggggccaggttgaattgattcccaacggcgtgaacatacctgtcactcctcaaaatgtctatgaatatgtccgcaagtatgccgaacaccggatgttggtggtggctgagcagccgctccacgctatgaggaaaggcctccttgatgttttgcccaagaactccctggaggacctgaccgcagaagatttcaggttacttgtcaatggctgcggagaagtaaacgtgcaaatgcttatctcattcacttccttcaatgacgaatctggcgaaaatgcagaaaaactcctgcaatttaaaaggtggttttggagcatcgttgagaagatgtctatgaccgaaaggcaagaccttgtgtacttctggacctcttcaccctccctacccgcctccgaagagggcttccaacctatgccaagtataacaatcagaccccccgacgaccagcaccttcctacagccaatacgtgtatttcaagactgtacgtccccttgtacagcagcaaacaaattctgaagcagaaactgctgttagcgatcaagaccaagaactttgggttcgtttag

SEQ ID NO: 188343 - DNA, 8400 bp, Artificial Sequence
  derived and/or modified sequence
atgaccagcatccactttgtggtgcaccccctgcccggcacagaggaccagctgaatgaccggctgcgggaggtgtctgagaagctgaacaagtacaacctgaacagccacccccccctgaatgtgctggagcaggccaccatcaagcagtgtgtggtgggccccaaccacgccgccttcctgctggaggatggccgggtgtgccgcatcggcttctctgtgcagcctgaccggctggagctgggcaagccagacaacaatgatggcagcaagctgaacagcaacagcggggccggccgcaccagccggcccggccgcaccagtgacagcccctggttcctgagcggcagcgagaccctgggccgcctggccggcaacaccctgggcagccgctggagcagcggcgtgggcggcagcggcggcggcagcagcggccgcagcagcgctggggcccgggacagccggcggcagaccagggtcatcagaacaggccgggaccggggcagcggcctgctgggcagccagccccagcccgtcatcccagccagcgtcatccctgaggagctgatcagccaggcccaggtggtgctgcagggcaagagccgcagcgtcatcatccgggagctgcagaggaccaacctggatgtgaacctggccgtgaacaacctgctgagcagagatgatgaagatggagatgatggagatgacacagccagcgagagctacctgcccggggaggacctgatgagcctgctggatgctgacatccacagcgcccaccccagcgtcatcattgatgctgatgccatgttttctgaggacatctcctacttcggctaccccagcttccgccgcagcagcctgagccggctgggcagcagccgggtgctgctgctgcccctggagcgggacagcgagctgctgcgggagcgggagagcgtgctgcggctgcgggagcggcgctggctggatggagccagctttgacaatgaaagaggcagcaccagcaaggagggggagcccaacctggacaagaagaacacccctgtgcagagccctgtgtccctgggggaggacctgcagtggtggccagacaaggatggcaccaagttcatctgcatcggggccctgtacagcgagctgctggccgtgagcagcaaaggagagctgtaccagtggaagtggagcgagagcgagccctacagaaatgcccagaaccccagcctgcaccacccccgggccaccttcctgggcctgaccaatgagaagatcgtgctgctgagcgccaacagcatccgggccaccgtggccacagagaacaacaaggtggccacctgggtggatgagaccctgagctctgtggccagcaagctggagcacacagcccagacctacagcgagctgcagggcgagagaattgtgtccctgcactgctgtgccctgtacacctgtgcccagctggagaacagcctgtactggtggggcgtggtgcccttcagccagaggaagaagatgctggagaaggcccgggccaagaacaagaagcccaagagcagcgctggcatcagctccatgcccaacatcaccgtgggcacccaggtgtgcctgaggaacaaccccctgtaccacgccggggctgtggccttcagcatctctgctggcatccccaaggtgggcgtgctgatggagagcgtgtggaacatgaatgacagctgccgcttccagctgcggagccctgagagcctgaagaacatggagaaggccagcaagaccacagaggccaagccagagagcaagcaggagcctgtgaagacagagatgggccccccacccagccctgccagcacctgcagtgatgccagcagcatcgccagcagcgcctccatgccctacaagagaagaagaagcaccccagcccccaaggaggaggagaaggtgaatgaggagcagtggagcctgcgggaggtggtgtttgtggaggatgtgaagaatgtgcctgtgggcaaggtgctgaaggtggatggagcctacgtggccgtgaagtttcctggcaccagcagcaacaccaactgccagaacagcagcggcccagatgctgaccccagcagcctgctgcaggactgccgcctgctgagaattgatgagctgcaggtggtgaagacaggaggcacccccaaggtgcctgactgcttccagaggacccccaagaagctgtgcatccctgagaagacagagatcctggccgtgaatgtggacagcaagggcgtgcatgctgtgctgaagacaggcaactgggtgcgctactgcatctttgacctggccaccgggaaggccgagcaggagaacaacttccccaccagcagcatcgccttcctgggccagaatgaaagaaatgtggccatcttcaccgctggccaggagagccccatcatcctgagagatggaaatggcaccatctaccccatggccaaggactgcatgggcggcatccgggaccctgactggctggacctgccccccatcagcagcctgggcatgggcgtgcacagcctcatcaacctgcctgccaacagcaccatcaagaagaaggctgctgtgatcatcatggctgtggagaagcagaccctgatgcagcacatcctgcgctgtgactatgaggcctgccggcagtacctgatgaacctggagcaggccgtggtgctggagcagaacctgcagatgctgcagaccttcatcagccaccgctgtgatggcaacagaaacatcctgcacgcctgtgtgtctgtgtgcttccccaccagcaacaaggagaccaaggaggaggaggaggccgagaggagtgaaagaaacacctttgctgagcggctgtctgctgtggaggccatcgccaatgccatctctgtggtgagcagcaatggacctggcaacagagctggcagcagcagcagccgcagcctgcggctgcgggagatgatgagaagaagcctgcgggctgctggcctgggcagacatgaggccggggccagcagcagtgaccaccaggaccctgtgtccccacccatcgcccctccttcctgggtgcctgaccccccagccatggaccctgatggagacatcgacttcatcctggccccagctgtgggcagcctgaccacagctgccactggaacaggccagggccccagcaccagcaccatccctggccccagcacagagcccagcgtggtggagagcaaggacaggaaggccaatgcccacttcatcctgaagctgctgtgtgacagcgtggtgctgcagccctacctgcgggagctgctgagcgccaaggatgcccggggcatgacccccttcatgtctgctgtgtctggccgggcctacccagctgccatcaccatcctggagacagcccagaagatcgccaaggccgagatcagcagcagcgagaaggaggaggatgtgttcatgggcatggtgtgccccagcggcaccaacccagatgacagccccctgtatgtgctgtgctgcaatgacacctgcagcttcacctggacaggagctgagcacatcaaccaggacatctttgaatgtaggacctgtggcctgctggagagcctgtgctgctgcacagaatgtgcccgggtgtgccacaagggccatgactgcaagctgaagaggaccagccccacagcctactgtgactgctgggagaagtgcaagtgcaagaccctgattgctggccagaagagcgcccggctggacctgctgtaccgcctgctgacagccaccaacctggtgaccctgcccaacagcagaggagagcacctgctgctcttcctggtgcagacagtggcccggcagacagtggagcactgccagtacagaccaccccgcatccgggaggacaggaacaggaagacagccagccctgaggacagcgacatgccagaccatgacctggagcccccaagatttgcccagctggccctggagcgggtgctgcaggactggaatgccctgaagtccatgatcatgtttggcagccaggagaacaaggaccccctgagcgccagcagccgcatcggccacctgctgcctgaggagcaggtgtacctgaaccagcagagcggcaccatccggctggactgcttcacccactgcctgattgtgaagtgcacagctgacatcctgctgctggacaccctgctgggcaccctggtgaaggagctgcagaacaagtacaccccaggaagaagagaggaggccatcgctgtgaccatgaggttcctgcggtctgtggcccgggtgtttgtgatcctgtctgtggagatggccagcagcaagaagaagaacaacttcatcccccagcccatcggcaagtgcaagagggtcttccaggccctgctgccctatgctgtggaggagctgtgcaatgtggccgagagcctgattgtgcctgtgaggatgggcatcgcccggcccacagcccccttcaccctggccagcaccagcattgatgccatgcagggcagcgaggagctgttctctgtggagcccctgcccccccggcccagcagtgaccagagcagcagcagcagccagagccagagcagctacatcatccggaacccccagcagaggcgcatcagccagagccagcctgtgcggggcagagatgaggagcaggatgacatcgtgtctgcagatgtggaggaggtggaggtggtggagggcgtggccggggaggaggaccaccatgatgagcaggaggagcacggggaggagaatgctgaggccgagggccagcatgatgaacatgatgaagatggcagtgacatggagctggacctgctggccgctgctgagacagaaagtgacagcgagagcaaccacagcaaccaggacaatgccagcggcagaagatctgtggtgacagctgccacagctggcagcgaggccggggccagctctgtgcctgccttcttctctgaagatgacagccagagcaatgacagcagtgacagcgacagcagcagcagccagagtgatgacatcgagcaggagaccttcatgctggatgagcccctggagaggaccaccaacagcagccacgccaatggagctgcccaggcccccaggtccatgcagtgggccgtgaggaacacccagcaccagagagctgccagcacagcccccagcagcaccagcaccccagctgccagcagcgctggcctcatctacatcgaccccagcaacctgcggcgcagcggcaccatcagcaccagcgctgctgctgctgctgctgccctggaggccagcaatgccagcagctacctgaccagcgccagcagcctggcccgggcctacagcatcgtcatccggcagatcagtgacctgatgggcctcatccccaagtacaaccacctggtgtacagccagatcccagctgctgtgaagctgacctaccaggatgctgtgaacctgcagaactacgtggaggagaagctgatccccacctggaactggatggtgtccatcatggacagcacagaggcccagctgcgctatggcagcgccctggccagcgctggggaccccggccaccccaaccaccccctgcacgccagccagaacagcgcccggcgggagaggatgacagcccgggaggaggccagcctgcggaccctggagggcagaagaagagccaccctgctgagcgcccggcagggcatgatgtctgcccggggggacttcctgaactatgccctgagcctgatgaggagccacaatgatgagcacagtgatgtgctgcctgtgctggatgtgtgcagcctgaagcacgtggcctacgtgttccaggccctgatctactggatcaaggccatgaaccagcagaccaccctggacaccccccagctggagaggaagaggacccgggagctgctggagctgggcatcgacaatgaagacagcgagcatgaaaatgatgatgacaccaaccagagcgccaccctgaatgacaaggatgatgacagcctgcctgctgagaccggccagaaccaccccttcttccgccgcagtgacagcatgaccttcctgggctgcatcccccccaacccctttgaggtgcccctggccgaggccatccccctggccgaccagccccacctgctgcagcccaatgccaggaaggaggacctgtttggccggcccagccagggcctgtacagcagcagcgccagcagcggcaagtgcctgatggaggtgacagtggacaggaactgcctggaggtgctgcccaccaagatgtcctatgctgccaacctgaagaatgtgatgaacatgcagaaccggcagaagaaggagggggaggagcagcctgtgctgcctgaggagacagagagcagcaagccaggccccagcgcccatgacctggccgcccagctgaagagcagcctgctggccgagatcggcctgacagaaagtgagggcccccccctgaccagcttccggccccagtgcagcttcatgggcatggtgatcagccatgacatgctgctgggccgctggaggctgagcctggagctgtttggccgggtcttcatggaggatgtgggcgctgagcccggcagcatcctgacagagctgggcggctttgaggtgaaggagagcaagttccggcgggagatggagaagctgaggaaccagcagagccgggacctgagcctggaggtggaccgggaccgggacctgctgatccagcagaccatgaggcagctgaacaaccactttggaagaagatgtgccaccacccccatggctgtgcaccgggtgaaggtgaccttcaaggatgagcctggagagggcagcggcgtggcccggagcttctacacagccatcgcccaggccttcctgagcaatgagaagctgcccaacctggagtgcatccagaatgccaacaagggcacccacaccagcctgatgcagaggctgaggaacagaggagagcgggaccgggagcgggagcgggagcgggagatgagaagaagcagcggcctgcgggccggcagcagaagagaccgggaccgggacttccggcggcagctgagcattgacacccggcccttccggcctgccagcgagggcaaccccagtgatgatcctgagcccctgcctgcccaccggcaggccctgggggagcggctgtacccccgggtgcaggccatgcagcctgcctttgccagcaagatcaccggcatgctgctggagctgagccctgcccagctgctgctgctgctggccagcgaggacagcctgcgggcccgggtggatgaggccatggagctgatcatcgcccacggcagagaaaatggagctgacagcatcctggacctgggcctggtggacagcagcgagaaggtgcagcaggagaacaggaagagacatggcagcagccgctctgtggtggacatggacctggatgacacagatgatggagatgacaatgcccccctcttctaccagcccgggaagaggggcttctacacccccaggcctgggaagaacacagaggcccggctgaactgcttcaggaacatcggccgcatcctgggcctgtgcctgctgcagaatgagctgtgccccatcaccctgaacagacatgtgatcaaggtgctgctgggcaggaaggtgaactggcatgactttgccttctttgatcctgtgatgtatgagagcctgcggcagctgatcctggccagccagagcagtgatgctgatgctgtgttcagcgccatggacctggcctttgccatcgacctgtgcaaggaggagggcggcggccaggtggagctgatccccaacggggtgaacatccctgtgaccccccagaatgtgtatgaatatgtgaggaaatatgcagagcacaggatgctggtggtggccgagcagcccctgcacgccatgaggaagggcctgctggatgtgctgcccaagaacagcctggaggacctgacagctgaggacttccggctgctggtgaatggctgtggggaggtgaatgtgcagatgctgatctccttcaccagcttcaatgatgagagcggggagaatgctgagaagctgctgcagttcaagcgctggttctggagcatcgtggagaagatgtccatgacagagcggcaggacctggtgtacttctggaccagcagccccagcctgcctgccagcgaggagggcttccagcccatgcccagcatcaccatccggcccccagatgaccagcacctgcccacagccaacacctgcatcagccggctgtatgtgcccctgtacagcagcaagcagatcctgaagcagaagctgctgctggccatcaagaccaagaactttggatttgtgtag

SEQ ID NO: 188344 - DNA, 8400 bp, Artificial Sequence
  derived and/or modified sequence
atgaccagcatccacttcgtggtgcaccccctgcccggcaccgaggaccagttgaatgatcgtctgagagaggtctccgagaaattaaacaagtacaacctcaattcacatccacctctcaatgttctcgaacaggccacaatcaaacaatgtgttgtgggccctaaccacgccgcattccttcttgaggacggcagggtgtgtaggattggcttttcagtgcagccggatcggctagaactgggcaaaccagataacaacgatggctccaagctcaactctaatagtggggctggtagaacctcaaggcctggaaggacttcggatagcccatggttcttgagcggtagcgaaacccttggcaggctcgctggaaacaccctggggagcaggtggagctccggcgtcgggggcagtggggggggcagttcagggcgaagttctgctggtgctcgggacagccgaagacagaccagagtgattaggacaggccgggaccgggggtccggccttttaggttcccagccgcaacctgttattccagcaagtgttatccctgaagagctcatatcccaagcacaggtggtgctccaaggcaagagtcggtccgtgattataagagaactgcagagaactaacctagatgtaaatctcgccgtgaacaatcttctgtccagggatgacgaagatggagacgacggagatgacaccgcaagcgagtcatacttgcctggtgaggatctgatgtccctcctggacgccgacatccattctgctcacccaagcgtcattattgacgcagatgctatgttcagtgaggacattagttatttcggttacccttctttcagaaggtcctccctctcacgactcggttctagtcgggtgcttcttctcccattggaacgagacagtgaactcttgagggagagggaatccgttttaagattgagggaacggcgctggttagacggcgcaagcttcgataatgagaggggttcaacctcgaaggaaggtgagccgaatctggacaaaaagaataccccagtccagtctcccgttagtctgggtgaagatctgcagtggtggcccgataaggacggaacaaagtttatctgcatcggggccttatattctgagctgctggctgtatcaagtaagggagagctgtaccaatggaaatggtcggagtctgaaccgtatagaaatgctcagaatccttctttacatcatccccgggctacatttctaggactaacaaacgaaaagattgttctgctttcggccaacagtattcgcgccacagtagctaccgagaacaacaaggtggccacatgggtagacgaaacactgagctccgtcgcctctaagctggaacacaccgcgcagacttattctgagctccaaggcgagcggatcgtatctctacattgctgcgccctgtacacctgcgctcagttggagaattccctctactggtggggcgtggtacctttctcccagaggaagaagatgcttgagaaggctcgcgcaaaaaacaaaaaacctaaatcttcggccgggatctcatccatgccaaatattaccgtaggcacccaggtctgtcttcgcaataatccactctaccatgctggcgccgtggccttttccatctctgcaggtataccgaaggttggggtgttgatggaatccgtctggaacatgaacgatagttgccgtttccaactccggagtccagagagcttgaaaaatatggaaaaagcctcaaaaacaactgaggccaaacctgagtccaagcaggagccagtgaagaccgaaatgggtcctccgcccagccctgcatcaacatgttcagatgctagctctattgccagtagtgctagcatgccgtataaacggcgcagaagtacgcctgctccaaaggaggaagaaaaggtgaacgaggaacaatggagcctgcgagaagtcgtttttgtggaagacgtcaagaatgtaccagtgggcaaggtactgaaggttgatggagcgtatgtcgctgtgaaattcccggggacttcttccaataccaactgccaaaatagttcaggtccggatgctgaccctagctctttactccaggattgccggctgctgcgaatcgacgagctgcaggtggtcaaaaccggcggaacacccaaagtccccgactgttttcaacggacaccaaaaaagctctgtattcccgagaagactgagatacttgccgtgaatgtcgattcgaagggggtgcacgccgtcctgaaaacaggaaactgggtgagatattgtatcttcgatctcgccactggcaaagctgagcaagagaacaacttcccaacgagttctattgctttcctcggtcagaacgaaagaaacgtggcgatttttaccgccggccaggaatccccaattattctaagagatggcaacggtacaatctatcccatggctaaagattgcatgggaggaattagggacccagattggctcgatctgcctcccatctccagcctcggcatgggagtgcactctctcataaatttaccagccaactcgacaatcaaaaagaaagcggccgttatcatcatggccgtcgagaagcaaactctcatgcagcacatacttaggtgtgactatgaggcatgtaggcaatatctcatgaacctagagcaggcagtcgtgcttgagcagaacctacaaatgctgcagacatttattagccaccgttgtgatgggaaccggaatatcctccatgcttgtgttagcgtctgtttccccaccagtaacaaagaaacgaaagaggaagaagaagccgaacggtcagagcggaacaccttcgctgaaagattgtccgccgtggaggccattgccaatgccattagtgtcgtctcctcaaacggacccggaaatcgggcaggcagttcttcctcacggtctttgaggctccgtgagatgatgcgacgatccctccgtgctgcaggactaggaaggcacgaggccggcgcctcttccagtgaccatcaggatccggtctccccacctattgcaccgccatcatgggtgccagatccccccgccatggacccggacggagacattgattttattctggcccccgctgtgggcagcctcaccactgctgcaacagggacaggacagggaccctctacatctaccatccccggtcccagtacagagccctccgtagtggaatcaaaggaccgcaaggcaaacgctcattttatcctcaagctcctgtgcgacagtgtggtgttgcagccatacttgcgagagcttctgtctgccaaagacgccaggggtatgacgcctttcatgagtgccgtttcagggcgcgcctatcctgctgccatcaccattctggaaaccgcccagaagatcgcaaaggctgagataagctcttcagagaaagaggaagacgtatttatgggaatggtatgtccttccggaactaacccagatgactctccactgtatgtgttatgctgcaacgacacctgctcctttacttggaccggggcagaacacatcaaccaagacatttttgaatgtcgtacgtgtggcttgctcgagagtctgtgctgttgtaccgagtgcgcgcgagtgtgtcacaaaggccacgattgtaagctcaagcgcacttctcccacagcatactgtgactgctgggagaagtgtaagtgcaagacacttattgctggccagaaatctgcaagactggacctcctctacaggttgctgacagctacaaatcttgtgactctccccaattcacgtggtgaacacttgctccttttcctggttcaaaccgtggcacggcagacagttgagcactgtcaatacaggcccccccgcatccgggaggacagaaaccggaagacagctagtcctgaggactcagatatgcccgatcacgaccttgaaccacccaggttcgcgcagttagcactggagcgggtgctgcaggactggaatgcactaaaaagcatgatcatgttcggaagtcaggagaacaaggaccccctgagcgcttcgagcagaatcggccacctgctgcccgaagagcaggtatacctgaatcagcaatccgggaccattcgcctggactgcttcacacactgtctaatcgtcaaatgcacagccgacatacttctgttggatacactgctgggtaccctagttaaggaattacagaacaagtacactccaggcagacgggaagaggccatcgccgtgacgatgaggtttctgcgttccgtcgcaagagtgttcgttatcctcagcgtggagatggcttcgtccaagaagaagaataacttcattccccaaccaattggcaagtgcaagagagtttttcaggctctactaccctacgcagtggaggagctgtgtaacgtggctgagtctttgatcgtgcctgttaggatgggtatcgcccggccgactgccccgtttacgcttgcctctacttccattgatgccatgcaaggatccgaagagttgttcagcgtcgaaccgctgcccccccgcccatcaagtgaccaatccagcagtagttctcagagccagagcagttacattatcaggaatccccaacagcgacgtatctcacagtcccagcctgtgagagggcgagatgaggaacaggacgacatagtttcagcagacgtcgaagaggttgaggtggttgaaggcgtagctggggaggaggatcatcatgatgagcaagaagagcacggcgaggaaaacgctgaggcggaggggcaacacgatgaacacgatgaagatggctccgatatggaactggacctactggctgccgccgagacggagagtgacagcgagtccaaccactcaaatcaggataatgcttcgggccgaaggtccgtcgtcaccgccgcaacagctggctctgaagctggagcttcatccgtaccagcatttttcagcgaggacgactcccaaagtaacgatagctccgactccgatagctcatcaagccaatccgatgatattgagcaagagacgtttatgcttgatgaacctctggagcgcaccacaaatagctctcacgctaacggggccgctcaagccccccggagtatgcagtgggctgttagaaatactcagcaccagcgtgcagcctcgacggcaccctcatccacaagcaccccagcggcctcttctgccggtctgatatacattgatccaagcaatctcaggcggagcggcacaatcagtacatctgccgctgcggcggcagccgctctggaagccagcaacgcgagtagttatctcacatctgccagtagtctcgcccgcgcctatagcattgtcataaggcagatctctgatttaatgggcctgatacccaaatataatcacctggtgtatagtcagatccctgctgccgttaagctgacttaccaggacgcagtcaacctacagaactatgtagaagagaaactgatccctacctggaattggatggtgagcatcatggactccacagaggcccagttgcggtatgggagtgcactcgcttctgccggagatccaggtcatcccaatcacccccttcacgcttctcagaattccgccaggcgagagagaatgacagcccgtgaagaagcttcacttagaactctagagggacgacgtcgcgcaaccctcctgtccgccagacagggcatgatgagcgcccggggcgactttctgaattatgcattgagcttgatgagatcccacaatgatgagcacagcgacgttctccccgtcctggatgtttgttctctcaagcatgtagcctacgtctttcaggccctgatatactggatcaaagccatgaatcagcaaaccacattggataccccacagctcgagcgcaaaagaactagggaactgctagaactggggattgataacgaagactctgaacacgagaacgatgacgacaccaatcagtctgcgacactgaatgacaaggatgacgacagtctgcccgctgaaaccggtcagaatcacccattcttccggcggtcggactctatgacgtttctgggttgtatcccccctaatccctttgaggtccctctggcagaagcaatccccctcgcagatcaaccccaccttctccagcctaacgctagaaaagaagatctgttcggccgcccctcacaaggcctgtattcatccagcgcgagttcaggaaaatgtttaatggaggtcacagtagaccggaactgcctggaagtgctgcctaccaaaatgagttatgctgccaacctgaagaatgtgatgaatatgcagaatcggcaaaaaaaggagggcgaggagcagcctgtgctaccggaggaaaccgagtcttcaaaacccggcccaagcgctcatgatctggccgcacaactgaagtcttcactcctggctgagatcggtctgactgagtcagaagggcctcctctaaccagcttccggccccaatgttcattcatgggcatggtgatctctcacgatatgctgctggggcgttggcgcctgagtctcgagctgtttggacgcgtcttcatggaagatgtaggggctgaacccggttccattctcaccgaactgggaggatttgaggtgaaagaatctaagtttaggagagagatggaaaagctacggaatcagcagagccgggatctttctctcgaggtggacagggacagagaccttctgattcaacagacaatgaggcaactgaataatcatttcgggagaaggtgtgcaacaactccgatggctgtgcatcgcgttaaggtgacctttaaggatgaacctggtgaaggcagtggggtggcacgaagtttttatacagctatcgcacaggccttcttgtctaacgagaagttgcctaaccttgagtgcattcagaatgcaaataagggcacacacacttccctcatgcagcggctgcgtaatcggggggaaagggatagggagcgggagagagaacgcgaaatgcggcgttcctcagggctgcgtgcaggcagcaggagagatcgtgatcgcgattttcggcgccagttgagcatagatacccgaccgtttcgcccggccagcgagggcaatccttctgatgaccctgagccactaccagctcatcgtcaggccctaggtgaaagattgtatcccagggtgcaggcaatgcagcccgcttttgcttctaaaattaccggcatgctgctggagctcagccctgcccagctgttgctgctgctcgcctctgaggatagtctaagagccagggttgacgaggctatggagctcattattgcgcacggcagagagaatggggcagactctattctggatctaggcctcgtcgatagttccgagaaggtgcagcaggagaacagaaagcgccatgggtcttcacgatctgtcgtcgacatggatcttgatgacaccgacgacggagacgataatgctcctctattctatcagcccggtaagaggggattctatactccacgccctggtaagaataccgaagctcggctgaattgcttccggaatattggtcgtatcctggggctttgtctgctgcagaatgagctgtgtcctattacccttaatcgtcatgttatcaaggtactgttgggacgtaaagtcaattggcacgactttgcattctttgaccctgtgatgtacgagtccctgagacaactcatccttgcgtcacaatcaagcgacgctgacgcagtattttctgctatggacctcgcatttgcaattgatctgtgcaaagaggaaggcggcggccaggttgagctgatacctaatggagtgaatatccccgtcacacctcagaacgtttacgaatacgtgaggaaatacgccgagcatagaatgctggttgtggcagagcagcctctgcacgcaatgaggaagggcctactcgacgtgttaccaaaaaactcgctggaagatctcacagccgaggacttcagactgctcgtgaacggctgtggtgaggtcaacgtgcagatgctgatctccttcacttcattcaatgacgaaagtggcgagaacgcagaaaaactgctgcagttcaaacgttggttctggagtattgtggaaaagatgtcaatgaccgagaggcaggatctcgtgtatttctggacatctagcccttcgttgcccgcctcggaggaggggttccagcctatgccgtctattacgatccgcccacccgacgatcagcacctgccaacagctaatacatgcataagtcgactctatgttccgctgtatagctctaagcagatactcaagcaaaaattactgcttgctatcaaaactaagaatttcggctttgtatag

SEQ ID NO: 188345 - DNA, 8399 bp, Artificial Sequence
  derived and/or modified sequence
atgacatctatccactttgtggtgcaccccctgcctggaacggaggatcaactcaatgataggttaagggaagtttcagagaaactgaacaagtataatctcaactcccacccacccctcaatgtgcttgagcaggctactataaaacaatgcgttgtggggccaaaccacgccgcattcctgctagaagatgggagagtgtgccggatcggattttctgtgcagcccgaccgacttgagctgggcaagcctgataataatgatggctccaaattaaatagcaatagcggagccggacggacttcccgtcctggcagaacttcggacagtccttggtttctctcaggatcagaaacactggggaggctcgctgggaacacccttgggagccggtggagctcaggcgtgggcggatccgggggaggtagttccggcagaagctccgccggtgccagggactctcgacgccaaacacgtgtaattagaaccggaagagataggggcagcggtttgttggggtcccagccccagcctgtcattcccgctagcgttatacctgaggagctgataagccaggcccaggtggtgttgcagggaaaaagcaggtctgtgataattcgcgaattgcaaaggactaatctggacgttaacctcgccgttaataacctactgagcagagatgacgaggacggcgatgacggggatgacaccgcgagtgagagctacctaccaggagaggacctgatgagcctgctcgatgccgacattcacagtgcgcacccttcagtgattattgacgcggatgccatgttctctgaagatatttcttatttcggctacccctctttccgcagaagtagtctgtctcgtctagggtcgagtcgggtgctgttgctgcccctcgaaagggactctgagttactcagggagcgcgagtccgtgttgcgattgcgagagagacgctggttggatggggctagcttcgacaatgagcgaggatccacgtcaaaggagggagagccaaatttagacaaaaagaatacacctgttcagagcccggtctccctgggcgaggatcttcagtggtggcccgataaggacggcaccaagttcatttgcataggcgcattgtattctgagctcctggctgtttcttcaaaaggcgagctgtatcagtggaaatggtcagagagcgagccttatagaaacgctcagaatccttccttacatcatccccgtgccacatttctcggcctgactaacgaaaaaatcgtcctactctctgcgaacagcattcgtgccacagttgccacagagaataataaggttgctacctgggttgatgagactctatcatccgtagcttccaaattagagcacacagctcagacttacagcgaattgcaaggagaaagaatcgtctccttgcactgctgtgctctctacacctgcgcgcaactggaaaactccctctattggtggggcgtggtgccattctcccagcggaagaagatgttggaaaaagcacgcgcaaagaacaagaaacctaagtcatccgctggcattagctctatgccgaatatcactgtgggcacccaggtgtgcctgcggaataaccctctatatcacgcaggagccgtggctttctccatttctgctggcatccctaaggtgggcgtgctcatggagagcgtttggaatatgaatgactcctgcagattccaacttcgttcccccgaatccttaaagaatatggaaaaggcttccaagactactgaggccaaacctgaatcgaagcaagaacctgtgaagacagaaatgggtcctccaccaagcccggcaagcacgtgctctgatgctagttctatcgcttctagcgctagcatgccgtacaagcgcagacggagtacgcctgcccctaaggaagaagaaaaggtaaacgaggaacagtggtctctgagagaggtggtgtttgtcgaggatgtcaagaatgttccagttggcaaggtgctaaaggttgatggtgcttacgtggccgttaaatttcctggtacctcctccaacaccaactgccagaatagcagcggacccgatgccgatcctagttccctgctacaggattgtagactcctgcgaatcgacgaattgcaagtggtaaagaccggtggcacaccaaaggtgcccgactgtttccagagaacccctaaaaagctctgtataccagagaaaacagagattctcgctgtaaacgtggattctaagggggttcacgccgtgttaaagaccggcaactgggtaaggtactgcatctttgacttggcgaccggcaaagctgaacaggagaataattttccaacatcctccattgcctttctagggcagaatgagcgtaatgtggctatattcacagccggacaggaatcccctattatcctcagagacggtaacggaactatctacccaatggccaaggactgcatgggcggaattcgggatcctgattggctggatcttccgccaatcagtagcctaggcatgggcgttcatagcttaattaatcttcccgctaactccaccatcaagaagaaagcagccgtcatcatcatggccgtcgagaagcagacgttgatgcagcatattctaagatgtgattatgaggcttgccgccagtacctcatgaatctggagcaagccgtggtgttagagcagaatctacaaatgctgcagacgtttatttctcatagatgtgatgggaacaggaatatcctgcacgcatgcgtgtctgtgtgttttcccacaagcaacaaggaaacgaaggaggaggaagaagcagagaggagcgaaagaaacactttcgcggaaagactatctgctgttgaggccattgcgaatgccatctccgtggtgagcagcaatgggcctggtaaccgcgcaggcagctcatctagcagatcccttaggctgcgtgagatgatgcgacgcagcctgagagctgcaggcctgggtcggcatgaagccggtgcatcatcctcagatcatcaggaccccgtatcacctcccattgctccaccttcctgggttccagatcccccagctatggatccagacggggacatcgattttatacttgctccagccgtgggtagtctaacgactgccgcaactgggactggtcagggcccttccacctccacaattccaggtccctccacagagccctccgtggtcgaaagcaaagatcgcaaagccaatgcccactttatactgaaactgctgtgcgatagcgttgtgcttcagccatatctgagagagctgctttcagcgaaagacgccagaggtatgactcctttcatgtccgctgtgtcagggcgtgcttatccagccgctatcacaattctggagaccgcccagaagatcgcaaaggcagaaatctcatcctcagagaaagaggaagacgtatttatgggaatggtatgcccttctgggaccaatccagatgacagccccttatatgtgctatgctgcaacgacacctgcagcttcacttggacaggcgctgaacatatcaatcaggacattttcgaatgccgtacatgcgggctgcttgaatccctgtgctgttgcaccgaatgtgccagagtatgccacaaggggcatgattgcaaactgaaacggacttcccctactgcgtactgcgattgctgggaaaagtgtaagtgcaaaactctgatcgcagggcagaagtcagccaggcttgacctgctttaccgcctcctcacggcaactaacttggtaactctcccaaactcacgcggagaacacctgttactctttctggttcagaccgtggccaggcagactgtggaacattgccagtatcgccctcctaggataagagaggacaggaatcgcaaaactgctagtcctgaggatagcgatatgcccgatcatgacctcgagcctccaagattcgcccagctggccctagagagagtgctgcaagactggaacgcgctcaaaagcatgatcatgttcggttctcaggaaaacaaggaccctcttagcgcatcctccaggataggacacctcctgcccgaagaacaggtgtacttgaaccagcagagtggaacgattagacttgattgttttactcactgcctgatcgttaagtgtactgctgatatccttttgctggatactttgttggggaccttggtgaaggagctccaaaataaatatacccccggacgcagagaggaagccattgccgtcaccatgcggttcttgcggagtgtcgcacgagtgttcgtcatcttgagcgttgagatggcctcaagcaaaaaaaaaaataacttcattccacagcctatcggtaaatgcaagcgcgtgtttcaggcacttttgccttacgccgtggaagagctctgtaacgtcgcagaaagcctcattgtgccggttcgaatgggaattgctcgtcctactgcaccattcaccttggcgtctacctccatcgatgcgatgcagggatccgaagagctgttcagcgtggagccattgccccctcgcccaagctcagatcagtctagttcttctagtcagtcacagagttcttacatcattaggaatcctcaacagcgacgaattagccagtcacaacccgttagaggacgcgacgaagagcaagatgatatcgtgagtgctgatgttgaagaggtggaagtggttgagggcgttgcaggcgaggaagatcaccacgacgaacaagaggaacatggggaagaaaatgctgaggctgaggggcagcatgacgagcatgacgaggatgggagcgatatggagttagacctactggctgcggctgagacagaatccgattctgaaagcaatcacagtaaccaggataacgcaagcggcagaagatccgtagtgactgccgcaacagccggatctgaggccggagcctctagcgttccagctttcttttctgaagatgactcacagagcaacgatagcagcgattccgacagttcctcatcacagagtgatgacatcgaacaggaaaccttcatgcttgatgagccactagaaagaaccacgaacagctcccatgctaatggggcagcgcaggcccctcggtccatgcagtgggctgtccggaacacccagcaccagcgggctgccagtacggccccatcttcaacatcaacccctgcagctagctcagcagggttgatctatatcgatccttcaaatctaaggagatctggcacaatcagtacttccgctgctgccgctgccgctgccctggaagcctccaatgcctcgagctatctgacctctgcttcttcactcgcacgtgcctactcaatcgtaatcaggcagatctccgacctaatggggctgattccaaaatacaaccatttggtttactcccagattcctgcagcagtcaagctcacctatcaagatgccgtcaacctgcagaattacgtcgaagaaaaactcatccccacttggaactggatggtgagtattatggatagcacagaggctcagttgcgttacgggagtgccctggccagtgcgggagaccctggccatcccaaccatccacttcacgcctcacaaaactccgccagacgtgagaggatgaccgccagagaagaagcctctctgcgcaccctggaaggtcgcagacgtgccactcttctcagtgcaaggcagggaatgatgtcggctcgtggagacttcctgaactacgccctttcattgatgcggtctcacaacgatgagcactccgatgtgctgcccgtactagatgtgtgttcactgaagcacgtcgcatatgtgtttcaagctcttatatactggatcaaagccatgaatcagcagaccactctggacacacctcagctggagcgcaagcggactcgggaactgctggagctgggtattgataatgaggactcagaacacgagaacgatgacgatacaaaccagtctgccactctgaacgataaagacgacgacagcctgccagccgagactggtcaaaatcatccctttttccggagatctgattctatgacctttctgggctgtataccacctaacccatttgaggtcccgctggccgaggccatcccgctggcagaccaaccgcatctgttgcaacccaatgccaggaaagaggaccttttcggcagaccttcacaggggctctatagctcctctgccagtagcggtaaatgtctgatggaagtgactgttgacagaaattgcttggaggttcttccaactaaaatgtcatacgcagctaatctcaaaaatgtgatgaacatgcagaaccggcagaagaaagagggcgaggaacagcctgtccttcccgaggaaaccgaatccagcaaacccggacccagtgcacatgatctcgcagcccagctaaagtccagcctcctggcagagatcggcctgaccgagtcagaaggcccaccacttacctccttcaggccccagtgctctttcatgggaatggtcattagccatgatatgctcctcggtcgatggaggctttccctggaactgttcggccgagtcttcatggaggatgtgggagcagagcctggaagcattcttacagagctgggcggattcgaagtgaaagaatccaagttcaggcgggagatggagaagctgaggaaccaacagagtagggatctatccttagaagttgatagggaccgggatctgctcattcagcagacaatgcggcagctgaataaccactttggcagacggtgcgcaaccactccaatggcggtgcaccgggttaaggtcaccttcaaggacgagcctggagaaggatccggagtggccaggagtttctataccgccatcgctcaggcctttctgtcaaatgaaaaactccctaacttagaatgcatccagaacgcaaataaaggaacgcacacgtcactgatgcaaagattgagaaatcggggtgaaagggacagggaacgcgagcgcgagcgggagatgaggcgaagcagcggcttacgagcaggcagcagacgcgatagagacagggacttccgacgccagctctcaattgacacgcgccctttcaggcccgcttccgaaggcaacccttccgacgaccccgaacccttgcccgcacaccggcaggcactgggagaacggctgtaccctcgggtgcaggctatgcagcctgccttcgcgtctaagatcactggtatgttgctggagctctcccccgcacagttgctgcttctgctcgcatcagaggatagtttacgggctcgtgtggacgaggctatggaactcatcattgctcatggaagggaaaacggtgccgacagcattctcgacctcggcctagtggactcctcagagaaggtgcagcaggaaaaccgcaagagacacgggtcaagccgctcagttgtggacatggatctggatgacacagacgatggcgacgataacgcacctttattttaccaacctggaaagcgtgggttttacactcctcggccaggaaaaaataccgaagcgcgtctgaactgttttcgcaacattggaagaattctcgggttgtgtctactacagaatgagctctgccctataacattaaatcgccacgtgatcaaggtgctattgggtagaaaagtaaattggcacgattttgcgttttttgacccagtcatgtacgagtcactccggcagttgatcctcgcctctcagtcctcagatgcagatgccgtattctcagcgatggacctagcctttgccattgatctttgtaaggaggaggggggtggccaggttgagctgattccaaacggagtgaatatccccgtcacaccgcagaacgtgtatgaatatgtacgcaagtacgccgaacatcggatgctcgtagtcgctgaacagcctttgcacgctatgcggaaaggactccttgatgtattgccgaagaatagtcttgaggatcttacggcagaagatttccgtcttctcgttaatgggtgtggggaagtcaatgttcagatgctgattagcttcacaagctttaatgacgaatccggggagaatgcagagaagttgttgcagttcaagcgatggttttggagcatcgtggaaaagatgagcatgacagagagacaggatctcgtgtatttctggacaagctccccgtccctgcccgcttccgaggaaggcttccagccaatgcccagcattaccattagaccccctgacgatcaacatctacctactgccaacacctgcatctctagactgtacgttccactttactctagtaaacagattctgaagcagaagctcctgctagctatcaagaccaagaattttggtttcgtgta

SEQ ID NO: 188346 - DNA, 10297 bp, Artificial Sequence
  derived and/or modified sequence
gagggggccttgccgcccgtttcccggagccccgcctctcgccgccgcgcccccgcccgccggtctcctccctcctcctcctcccgtttgcccctcccccgccgctccggagcggagcctgcgagacggagaaactggggcagaagtgaagatggcggcggcagcttctcgctagtgacgcgcggtgcgggctcatctccttcccctccttcctcacctcccctagtccggaccccgtccgccgccgggaccagaccgtccccgtagcccgcagccagcagccgcccctctcctcccccggccgcccctctcccaacgcccgtctgccgctggccggcggcgcgcccctggtcccggccgcctgcctcgcactccgcgctgtcgccgggggagcgggtggcgtgtggattcgccctcctgcccgcccctccgggccgcggacacacgcccggcagggaggcggcggcggcccctgcgtatttgcttccctccatttggggactgggaggcggcggcggctgtgggttttggggaggggtagagggctggggggcgggcgagagcgggagggggccgccctcgagtggaggacgagaaggaaagcaccatgacgtccatccatttcgtggttcacccgctgccgggcaccgaggaccagctcaatgacaggttacgagaagtttctgagaagctgaacaaatataatttaaacagccacccccctttgaatgtattggaacaggctactattaaacagtgtgtggtgggaccaaatcatgctgcctttcttcttgaggatggtagagtttgcaggattggtttttcagtacagccagacagattggaattgggtaaacctgataataatgatgggtcaaagttgaacagcaactcgggggcagggaggacgtcaaggcctggtaggacaagcgactctccatggtttctctcaggttctgagactctaggcaggctggcaggcaacaccttaggaagccgctggagttctggagtgggtggaagtggtggaggatcctctggtaggtcatcagctggagctcgagattcccgccggcagactcgagttattcggacaggacgggatcgagggtctgggcttttgggcagtcagccccagccagttattccagcatctgtcattccagaggagctgatttcacaggcccaagttgttttacaaggcaaatccagaagtgtcattattcgagaacttcagagaacaaatcttgatgtgaaccttgctgtaaataatttacttagccgggatgatgaagatggagatgatggggatgatacagccagcgaatcttatttgcctggagaggatcttatgtctctccttgatgccgacattcattctgcccacccaagtgtcattattgatgcagatgccatgttttctgaagacattagctattttggttacccttcttttcgtcgttcatcactttccaggctaggctcatctcgagttctccttcttcccttagagagagactctgagctgttgcgtgaacgtgaatccgttttacgtttacgtgaacgaaggtggcttgatggagcctcatttgataatgaaaggggttctaccagcaaggaaggagagccaaacttggataagaagaatacacctgttcaaagtccagtatctctaggagaagatttgcagtggtggcctgataaggatggaacaaaattcatctgtattggggctctgtattctgaacttctggctgtcagcagtaaaggagaactttatcagtggaaatggagtgaatctgagccttacagaaatgcccagaatccttcattacatcatccacgagcaacatttttggggttaaccaatgaaaagatagtcctcctgtctgcaaatagcataagagcaactgtagctacagaaaataacaaggttgctacatgggtggatgaaactttaagttctgtggcttctaaattagagcacactgctcagacttactctgaacttcaaggagagcggatagtttctttacattgctgtgccctttacacctgcgctcagctggaaaacagtttatattggtggggtgtagttccttttagtcaaaggaagaaaatgttagagaaagctagagcaaaaaataaaaagcctaaatccagtgctggtatttcttcaatgccgaacatcactgttggtacccaggtatgcttgagaaataatcctctttatcatgctggagcagttgcattttcaattagtgctgggattcctaaagttggtgtcttaatggagtcagtttggaatatgaatgacagctgtagatttcaacttagatctcctgaaagcttgaaaaacatggaaaaagctagcaaaactactgaagctaagcctgaaagtaagcaggagccagtgaaaacagaaatgggtcctccaccatctccagcatccacgtgtagtgatgcatcctcaattgccagcagtgcatcaatgccatacaaacgacgacggtcaacccctgcaccaaaagaagaggaaaaggtgaatgaagagcagtggtctcttcgggaagtggtttttgtggaagatgtcaagaatgttcctgttggcaaggtgctaaaagtagatggtgcctatgttgctgtaaaatttccaggaacctccagtaatactaactgtcagaacagctctggtccagatgctgacccttcttctctcctgcaggattgtaggttacttagaattgatgaattgcaggttgtcaaaactggtggaacaccgaaggttcccgactgtttccaaaggactcctaaaaagctttgtatacctgaaaaaacagaaatattagcagtgaatgtagattccaaaggtgttcatgctgttctgaagactggaaattgggtacgatactgtatctttgatcttgctacaggaaaagcagaacaggaaaataattttcctacaagcagcattgctttccttggtcagaatgagaggaatgtagccattttcactgctggacaggaatctcccattattcttcgagatggaaatggtaccatctacccaatggccaaagattgcatgggaggaataagggatcccgattggctggatcttccacctattagtagtcttggaatgggtgtgcattctttaataaatcttcctgccaattcaacaatcaaaaagaaagctgctgttatcatcatggctgtagagaaacaaaccttaatgcaacacattctgcgctgtgactatgaggcctgtcgacaatatctaatgaatcttgagcaagcggttgttttagagcagaatctacagatgctgcagacattcatcagccacagatgtgatggaaatcgaaatattttgcatgcttgtgtatcagtttgctttccaaccagcaataaagaaactaaagaagaagaggaagcggagcgttctgaaagaaatacatttgcagaaaggctttctgctgttgaggccattgcaaatgcaatatcagttgtttcaagtaatggcccaggtaatcgggctggatcatcaagtagccgaagtttgagattacgggaaatgatgagacgttcgttgagagcagctggtttgggtagacatgaagctggagcttcatccagtgaccaccaggatccagtttcaccccccatagctccccctagttgggttcctgaccctcctgcgatggatcctgatggtgacattgattttatcctggcccccgctgtgggatctcttaccacagcagcaaccggtactggtcaaggaccaagcacctccactattccaggtccttccacagagccatctgtagtagaatccaaggatcgaaaggcgaatgctcattttatattgaaattgttatgtgacagtgtggttctccagccctatctacgagaacttctttctgccaaggatgcaagagggatgaccccatttatgtcagctgtaagtggccgagcttatcctgctgcaattaccatcttagaaactgctcagaaaattgcaaaagctgaaatatcctcaagtgaaaaagaggaagatgtattcatgggaatggtttgcccatcaggtaccaaccctgatgactctcctttatatgttttatgttgtaatgacacttgcagttttacatggactggagcagagcacattaaccaggatatttttgagtgtcgaacttgtggcttgctggagtcactgtgttgttgtacggaatgtgcaagggtttgtcataaaggtcatgattgcaaactcaaacggacatcaccaacagcctactgtgattgttgggagaaatgtaaatgtaaaactcttattgctggacagaaatctgctcgtcttgatctactttatcgcctgctcactgctactaatctggttactctgccaaacagcaggggagagcacctcttactattcttagtacagacagtcgcaaggcagacggtggagcattgtcaatacaggccacctcgaatcagggaagatcgtaaccgaaaaacagccagtcctgaagattcagatatgccagatcatgatttagagcctccaagatttgcccagcttgcattggagcgtgttctacaggactggaatgccttgaaatctatgattatgtttgggtcgcaggagaataaagaccctcttagtgccagcagtagaataggccatcttttgccagaagagcaagtatacctcaatcagcaaagtggcacaattcggctggactgtttcactcattgccttatagttaagtgtacagcagatattttgcttttagatactctactaggtacactagtgaaagaactccaaaacaaatatacacctggacgtagagaagaagctattgctgtgacaatgaggtttctacgttcagtggcaagagtttttgttattctgagtgtggaaatggcttcatccaaaaagaaaaacaactttattccacagccaattggaaaatgcaagcgtgtattccaagcattgctaccttacgctgtggaagaattgtgcaacgtagcagagtcactgattgttcctgtcagaatggggattgctcgtccaactgcaccatttaccctggctagtactagcatagatgccatgcagggcagtgaagaattattttcagtggaaccactaccaccacgaccatcatctgatcagtctagcagctccagtcagtctcagtcatcctacatcatcaggaatccacagcagaggcgcatcagccagtcacagcccgttcggggcagagatgaagaacaggatgatattgtttcagcagatgtggaagaggttgaggtggtggagggtgtggctggagaagaggatcatcatgatgaacaggaagaacacggggaagaaaatgctgaggcagagggacaacatgatgagcatgatgaagacgggagtgatatggagctggacttgttagcagcagctgaaacagaaagtgatagtgaaagtaaccacagcaaccaagataatgctagtgggcgcagaagcgttgtcactgcagcaactgctggttcagaagcaggagcaagcagtgttcctgccttcttttctgaagatgattctcaatcgaatgactcaagtgattctgatagcagtagtagtcagagtgacgacatagaacaggagacctttatgcttgatgagccattagaaagaaccacaaatagctcccatgccaatggtgctgcccaagctccccgttcaatgcagtgggctgtccgcaacacccagcatcagcgagcagccagtacagccccttccagtacatctacaccagcagcaagttcagcgggtttgatttatattgatccttcaaacttacgccggagtggtaccatcagtacaagtgctgcagctgcagcagctgctttggaagctagcaacgccagcagttacctaacatctgcaagcagtttagccagggcttacagcattgtcattagacaaatctcggacttgatgggccttattcctaagtataatcacctagtatactctcagattccagcagctgtgaaattgacttaccaagatgcagtaaacttacagaactatgtagaagaaaagcttattcccacttggaactggatggtcagtattatggattctactgaagctcaattacgttatggttctgcattagcatctgctggtgatcctggacatccaaatcatcctcttcacgcttctcagaattcagcgagaagagagaggatgactgcgcgagaagaagctagcttacgaacacttgaaggcagacgacgtgccaccttgcttagcgcccgtcaaggaatgatgtctgcacgaggagacttcctaaattatgctctgtctctaatgcggtctcataatgatgagcattctgatgttcttccagttttggatgtttgctcattgaagcatgtggcatatgtttttcaagcacttatatactggattaaggcaatgaatcagcagacaacattggatacacctcaactagaacgcaaaaggacgcgagaactcttggaactgggtattgataatgaagattcagaacatgaaaatgatgatgacaccaatcaaagtgctactttgaatgataaggatgatgactctcttcctgcagaaactggccaaaaccatccatttttccgacgttcagactccatgacattccttgggtgtatacccccaaatccatttgaagtgcctctggctgaagccatccccttggctgatcagccacatctgttgcagccaaatgctagaaaggaggatctttttggccgtccaagtcagggtctttattcttcatctgccagtagtgggaaatgtttaatggaggttacagtggatagaaactgcctagaggttcttccaacaaaaatgtcttatgctgccaatctgaaaaatgtaatgaacatgcaaaaccggcaaaaaaaagaaggggaagaacagcccgtgctgccagaagaaactgagagttcaaaaccagggccatctgctcatgatcttgctgcacaattaaaaagtagcttactagcagaaataggacttactgaaagtgaagggccacctctcacatctttcaggccacagtgtagctttatgggaatggttatttcccatgatatgctgctaggacgttggcgcctttctttagaactgttcggcagggtattcatggaagatgttggagcagaacctggatcaatcctaactgaattgggtggttttgaggtaaaagaatcaaaattccgcagagaaatggaaaaactgagaaaccagcagtcaagagatttgtcactagaggttgatcgggatcgagatcttctcattcagcagactatgaggcagcttaacaatcactttggtcgaagatgtgctactacaccaatggctgtacacagagtaaaagtcacatttaaggatgagccaggagagggcagtggtgtagcacgaagtttttatacagccattgcacaagcatttttatcaaatgaaaaattgccaaatctagagtgtatccaaaatgccaacaaaggcacccacacaagtttaatgcagagattaaggaaccgaggagagagagaccgggaaagggagagagaaagggaaatgaggaggagtagtggtttgcgagcaggttctcggagggaccgggatagagactttagaagacagctttccatcgacactaggccctttagaccagcctctgaagggaatcctagcgatgatcctgagcctttgccagcacatcggcaggcacttggagagaggctttatcctcgtgtacaagcaatgcaaccagcatttgcaagtaaaatcactggcatgttgttggaattatccccagctcagctgcttctccttctagcaagtgaggattctctgagagcaagagtggatgaggccatggaactcattattgcacatggacgggaaaatggagctgatagtatcctggatcttggattagtagactcctcagaaaaggtacagcaggaaaaccgaaagcgccatggctctagtcgaagtgtagtagatatggatttagatgatacagatgatggtgatgacaatgcccctttgttttaccaacctgggaaaagaggattttatactccaaggcctggcaagaacacagaagcaaggttgaattgtttcagaaacattggcaggattcttggactatgtctgttacagaatgaactatgtcctatcacattgaatagacatgtaattaaagtattgcttggtagaaaagtcaattggcatgattttgctttttttgatcctgtaatgtatgagagtttgcggcaactaatcctcgcgtctcagagttcagatgctgatgctgttttctcagcaatggatttggcatttgcaattgacctgtgtaaagaagaaggtggaggacaggttgaactcattcctaatggtgtaaatataccagtcactccacagaatgtatatgagtatgtgcggaaatacgcagaacacagaatgttggtagttgcagaacagcccttacatgcaatgaggaaaggtctactagatgtgcttccaaaaaattcattagaagatttaacggcagaagattttaggcttttggtaaatggctgcggtgaagtcaatgtgcaaatgctgatcagttttacctctttcaatgatgaatcaggagaaaatgctgagaagcttctgcagttcaagcgttggttctggtcaatagtagagaagatgagcatgacagaacgacaagatcttgtttacttttggacatcaagcccatcactgccagccagtgaagaaggattccagcctatgccctcaatcacaataagaccaccagatgaccaacatcttcctactgcaaatacttgcatttctcgactttacgtcccactctattcctctaaacagattctcaaacagaaattgttactcgccattaagaccaagaattttggttttgtgtagagtataaaaagtgtgtattgctgtgtaatattactagcaaattttgtagatttttttccatttgtctataaaagtttatggaagttaatgctgtcatacccccctggtggtaccttaaagagataaaatgcagacattccttgctgagtttatagcttaaaggcctaaggagcactagcaacatttggctatattggtttgctagtcaccaacttctgggtctaaccccagccaaagatgacagcagaacaacataatttacactgtgatttatctttttgctgagggggaaaaaatgtaaatgttctgaaaattcactgctgcctttgtggaaactgtttcagcaaaggttcttgtatagagggaatagggaatttcaaaataaaaaattaagtatgttctgtgttttcattttaactttttttatggtgtttaatttgtggttggctgcaactgtgtatcatgtatatggaacttgtaaaaaagttctcgacattcagatcttaagagatgaaatcacttttacctataaaaaccacttttattgcggtttgactgcattgagctctaggatattaaatgatatcactaatattttgcatgtaatttgctcatttgagtgagggcactttttttgtacatatgatggggccaatgcacaatacttttatcacaatcaactttttctttgtatccctatttcaatgagcagtcagtctcaagaggttactgcacttcagttctaactagacatttgtactaaggtatttcagttatgtaaactcagcctgggcactttctgataactgtaaaatgttttataagatcatgattattgaagatacattttggaaaattttaaatgttcgtgagcagcttaactacttttgtatctagccttttttaagtatcttgttacatttacttttttaaataaagaaattacagaagaaatgtcaagtaatattgaagaaacaatagtttttatttatgtagttgtacatttttaaactaagggcaatacactgacatggttatgtgcataaaaattttgacttaaagaactggaagtttatatacacctggactataagaaacagaagaaaatcagtccacattttacagttagcagagaatcctaaatggcactggcctggccaccttttcattttacaaatgggggaagtgaagtgtgaccccttacttggcataggaagttaacttacacctaataactgacaggtttttgttttgatgacctattaattatgtagcctaggattaatatcc

SEQ ID NO: 188347 - DNA, 8400 bp, Artificial Sequence
  derived and/or modified sequence
atgaccagcatccacttcgtggtgcaccccctgcccggcaccgaggaccagctgaacgacagactgagagaggtgagcgagaagctgaacaagtacaacctgaacagccacccccccctgaacgtgctggagcaggccaccatcaagcagtgcgtggtgggccccaaccacgccgccttcctgctggaggacggcagagtgtgcagaatcggcttcagcgtgcagcccgacagactggagctgggcaagcccgacaacaacgacggcagcaagctgaacagcaacagcggcgccggcagaaccagcagacccggcagaaccagcgacagcccctggttcctgagcggcagcgagaccctgggcagactggccggcaacaccctgggcagcagatggagcagcggcgtgggcggcagcggcggcggcagcagcggcagaagcagcgccggcgccagagacagcagaagacagaccagagtgatcagaaccggcagagacagaggcagcggcctgctgggcagccagccccagcccgtgatccccgccagcgtgatccccgaggagctgatcagccaggcccaggtggtgctgcagggcaagagcagaagcgtgatcatcagagagctgcagagaaccaacctggacgtgaacctggccgtgaacaacctgctgagcagagacgacgaggacggcgacgacggcgacgacaccgccagcgagagctacctgcccggcgaggacctgatgagcctgctggacgccgacatccacagcgcccaccccagcgtgatcatcgacgccgacgccatgttcagcgaggacatcagctacttcggctaccccagcttcagaagaagcagcctgagcagactgggcagcagcagagtgctgctgctgcccctggagagagacagcgagctgctgagagagagagagagcgtgctgagactgagagagagaagatggctggacggcgccagcttcgacaacgagagaggcagcaccagcaaggagggcgagcccaacctggacaagaagaacacccccgtgcagagccccgtgagcctgggcgaggacctgcagtggtggcccgacaaggacggcaccaagttcatctgcatcggcgccctgtacagcgagctgctggccgtgagcagcaagggcgagctgtaccagtggaagtggagcgagagcgagccctacagaaacgcccagaaccccagcctgcaccaccccagagccaccttcctgggcctgaccaacgagaagatcgtgctgctgagcgccaacagcatcagagccaccgtggccaccgagaacaacaaggtggccacctgggtggacgagaccctgagcagcgtggccagcaagctggagcacaccgcccagacctacagcgagctgcagggcgagagaatcgtgagcctgcactgctgcgccctgtacacctgcgcccagctggagaacagcctgtactggtggggcgtggtgcccttcagccagagaaagaagatgctggagaaggccagagccaagaacaagaagcccaagagcagcgccggcatcagcagcatgcccaacatcaccgtgggcacccaggtgtgcctgagaaacaaccccctgtaccacgccggcgccgtggccttcagcatcagcgccggcatccccaaggtgggcgtgctgatggagagcgtgtggaacatgaacgacagctgcagattccagctgagaagccccgagagcctgaagaacatggagaaggccagcaagaccaccgaggccaagcccgagagcaagcaggagcccgtgaagaccgagatgggccccccccccagccccgccagcacctgcagcgacgccagcagcatcgccagcagcgccagcatgccctacaagagaagaagaagcacccccgcccccaaggaggaggagaaggtgaacgaggagcagtggagcctgagagaggtggtgttcgtggaggacgtgaagaacgtgcccgtgggcaaggtgctgaaggtggacggcgcctacgtggccgtgaagttccccggcaccagcagcaacaccaactgccagaacagcagcggccccgacgccgaccccagcagcctgctgcaggactgcagactgctgagaatcgacgagctgcaggtggtgaagaccggcggcacccccaaggtgcccgactgcttccagagaacccccaagaagctgtgcatccccgagaagaccgagatcctggccgtgaacgtggacagcaagggcgtgcacgccgtgctgaagaccggcaactgggtgagatactgcatcttcgacctggccaccggcaaggccgagcaggagaacaacttccccaccagcagcatcgccttcctgggccagaacgagagaaacgtggccatcttcaccgccggccaggagagccccatcatcctgagagacggcaacggcaccatctaccccatggccaaggactgcatgggcggcatcagagaccccgactggctggacctgccccccatcagcagcctgggcatgggcgtgcacagcctgatcaacctgcccgccaacagcaccatcaagaagaaggccgccgtgatcatcatggccgtggagaagcagaccctgatgcagcacatcctgagatgcgactacgaggcctgcagacagtacctgatgaacctggagcaggccgtggtgctggagcagaacctgcagatgctgcagaccttcatcagccacagatgcgacggcaacagaaacatcctgcacgcctgcgtgagcgtgtgcttccccaccagcaacaaggagaccaaggaggaggaggaggccgagagaagcgagagaaacaccttcgccgagagactgagcgccgtggaggccatcgccaacgccatcagcgtggtgagcagcaacggccccggcaacagagccggcagcagcagcagcagaagcctgagactgagagagatgatgagaagaagcctgagagccgccggcctgggcagacacgaggccggcgccagcagcagcgaccaccaggaccccgtgagcccccccatcgccccccccagctgggtgcccgacccccccgccatggaccccgacggcgacatcgacttcatcctggcccccgccgtgggcagcctgaccaccgccgccaccggcaccggccagggccccagcaccagcaccatccccggccccagcaccgagcccagcgtggtggagagcaaggacagaaaggccaacgcccacttcatcctgaagctgctgtgcgacagcgtggtgctgcagccctacctgagagagctgctgagcgccaaggacgccagaggcatgacccccttcatgagcgccgtgagcggcagagcctaccccgccgccatcaccatcctggagaccgcccagaagatcgccaaggccgagatcagcagcagcgagaaggaggaggacgtgttcatgggcatggtgtgccccagcggcaccaaccccgacgacagccccctgtacgtgctgtgctgcaacgacacctgcagcttcacctggaccggcgccgagcacatcaaccaggacatcttcgagtgcagaacctgcggcctgctggagagcctgtgctgctgcaccgagtgcgccagagtgtgccacaagggccacgactgcaagctgaagagaaccagccccaccgcctactgcgactgctgggagaagtgcaagtgcaagaccctgatcgccggccagaagagcgccagactggacctgctgtacagactgctgaccgccaccaacctggtgaccctgcccaacagcagaggcgagcacctgctgctgttcctggtgcagaccgtggccagacagaccgtggagcactgccagtacagaccccccagaatcagagaggacagaaacagaaagaccgccagccccgaggacagcgacatgcccgaccacgacctggagccccccagattcgcccagctggccctggagagagtgctgcaggactggaacgccctgaagagcatgatcatgttcggcagccaggagaacaaggaccccctgagcgccagcagcagaatcggccacctgctgcccgaggagcaggtgtacctgaaccagcagagcggcaccatcagactggactgcttcacccactgcctgatcgtgaagtgcaccgccgacatcctgctgctggacaccctgctgggcaccctggtgaaggagctgcagaacaagtacacccccggcagaagagaggaggccatcgccgtgaccatgagattcctgagaagcgtggccagagtgttcgtgatcctgagcgtggagatggccagcagcaagaagaagaacaacttcatcccccagcccatcggcaagtgcaagagagtgttccaggccctgctgccctacgccgtggaggagctgtgcaacgtggccgagagcctgatcgtgcccgtgagaatgggcatcgccagacccaccgcccccttcaccctggccagcaccagcatcgacgccatgcagggcagcgaggagctgttcagcgtggagcccctgccccccagacccagcagcgaccagagcagcagcagcagccagagccagagcagctacatcatcagaaacccccagcagagaagaatcagccagagccagcccgtgagaggcagagacgaggagcaggacgacatcgtgagcgccgacgtggaggaggtggaggtggtggagggcgtggccggcgaggaggaccaccacgacgagcaggaggagcacggcgaggagaacgccgaggccgagggccagcacgacgagcacgacgaggacggcagcgacatggagctggacctgctggccgccgccgagaccgagagcgacagcgagagcaaccacagcaaccaggacaacgccagcggcagaagaagcgtggtgaccgccgccaccgccggcagcgaggccggcgccagcagcgtgcccgccttcttcagcgaggacgacagccagagcaacgacagcagcgacagcgacagcagcagcagccagagcgacgacatcgagcaggagaccttcatgctggacgagcccctggagagaaccaccaacagcagccacgccaacggcgccgcccaggcccccagaagcatgcagtgggccgtgagaaacacccagcaccagagagccgccagcaccgcccccagcagcaccagcacccccgccgccagcagcgccggcctgatctacatcgaccccagcaacctgagaagaagcggcaccatcagcaccagcgccgccgccgccgccgccgccctggaggccagcaacgccagcagctacctgaccagcgccagcagcctggccagagcctacagcatcgtgatcagacagatcagcgacctgatgggcctgatccccaagtacaaccacctggtgtacagccagatccccgccgccgtgaagctgacctaccaggacgccgtgaacctgcagaactacgtggaggagaagctgatccccacctggaactggatggtgagcatcatggacagcaccgaggcccagctgagatacggcagcgccctggccagcgccggcgaccccggccaccccaaccaccccctgcacgccagccagaacagcgccagaagagagagaatgaccgccagagaggaggccagcctgagaaccctggagggcagaagaagagccaccctgctgagcgccagacagggcatgatgagcgccagaggcgacttcctgaactacgccctgagcctgatgagaagccacaacgacgagcacagcgacgtgctgcccgtgctggacgtgtgcagcctgaagcacgtggcctacgtgttccaggccctgatctactggatcaaggccatgaaccagcagaccaccctggacaccccccagctggagagaaagagaaccagagagctgctggagctgggcatcgacaacgaggacagcgagcacgagaacgacgacgacaccaaccagagcgccaccctgaacgacaaggacgacgacagcctgcccgccgagaccggccagaaccaccccttcttcagaagaagcgacagcatgaccttcctgggctgcatcccccccaaccccttcgaggtgcccctggccgaggccatccccctggccgaccagccccacctgctgcagcccaacgccagaaaggaggacctgttcggcagacccagccagggcctgtacagcagcagcgccagcagcggcaagtgcctgatggaggtgaccgtggacagaaactgcctggaggtgctgcccaccaagatgagctacgccgccaacctgaagaacgtgatgaacatgcagaacagacagaagaaggagggcgaggagcagcccgtgctgcccgaggagaccgagagcagcaagcccggccccagcgcccacgacctggccgcccagctgaagagcagcctgctggccgagatcggcctgaccgagagcgagggcccccccctgaccagcttcagaccccagtgcagcttcatgggcatggtgatcagccacgacatgctgctgggcagatggagactgagcctggagctgttcggcagagtgttcatggaggacgtgggcgccgagcccggcagcatcctgaccgagctgggcggcttcgaggtgaaggagagcaagttcagaagagagatggagaagctgagaaaccagcagagcagagacctgagcctggaggtggacagagacagagacctgctgatccagcagaccatgagacagctgaacaaccacttcggcagaagatgcgccaccacccccatggccgtgcacagagtgaaggtgaccttcaaggacgagcccggcgagggcagcggcgtggccagaagcttctacaccgccatcgcccaggccttcctgagcaacgagaagctgcccaacctggagtgcatccagaacgccaacaagggcacccacaccagcctgatgcagagactgagaaacagaggcgagagagacagagagagagagagagagagagagatgagaagaagcagcggcctgagagccggcagcagaagagacagagacagagacttcagaagacagctgagcatcgacaccagacccttcagacccgccagcgagggcaaccccagcgacgaccccgagcccctgcccgcccacagacaggccctgggcgagagactgtaccccagagtgcaggccatgcagcccgccttcgccagcaagatcaccggcatgctgctggagctgagccccgcccagctgctgctgctgctggccagcgaggacagcctgagagccagagtggacgaggccatggagctgatcatcgcccacggcagagagaacggcgccgacagcatcctggacctgggcctggtggacagcagcgagaaggtgcagcaggagaacagaaagagacacggcagcagcagaagcgtggtggacatggacctggacgacaccgacgacggcgacgacaacgcccccctgttctaccagcccggcaagagaggcttctacacccccagacccggcaagaacaccgaggccagactgaactgcttcagaaacatcggcagaatcctgggcctgtgcctgctgcagaacgagctgtgccccatcaccctgaacagacacgtgatcaaggtgctgctgggcagaaaggtgaactggcacgacttcgccttcttcgaccccgtgatgtacgagagcctgagacagctgatcctggccagccagagcagcgacgccgacgccgtgttcagcgccatggacctggccttcgccatcgacctgtgcaaggaggagggcggcggccaggtggagctgatccccaacggcgtgaacatccccgtgaccccccagaacgtgtacgagtacgtgagaaagtacgccgagcacagaatgctggtggtggccgagcagcccctgcacgccatgagaaagggcctgctggacgtgctgcccaagaacagcctggaggacctgaccgccgaggacttcagactgctggtgaacggctgcggcgaggtgaacgtgcagatgctgatcagcttcaccagcttcaacgacgagagcggcgagaacgccgagaagctgctgcagttcaagagatggttctggagcatcgtggagaagatgagcatgaccgagagacaggacctggtgtacttctggaccagcagccccagcctgcccgccagcgaggagggcttccagcccatgcccagcatcaccatcagaccccccgacgaccagcacctgcccaccgccaacacctgcatcagcagactgtacgtgcccctgtacagcagcaagcagatcctgaagcagaagctgctgctggccatcaagaccaagaacttcggcttcgtgtag

SEQ ID NO: 188348 - protein, 1050 aa, Artificial Sequence
  derived and/or modified sequence
MEVAVEKAVAAAAAASAAASGGPSAAPSGENEAESRQGPDSERGGEAARLNLLDTCAVCHQNIQSRAPKLLPCLHSFCQRCLPAPQRYLMLPAPMLGSAETPPPVPAPGSPVSGSSPFATQVGVIRCPVCSQECAERHIIDNFFVKDTTEVPSSTVEKSNQVCTSCEDNAEANGFCVECVEWLCKTCIRAHQRVKFTKDHTVRQKEEVSPEAVGVTSQRPVFCPFHKKEQLKLYCETCDKLTCRDCQLLEHKEHRYQFIEEAFQNQKVIIDTLITKLMEKTKYIKFTGNQIQNRIIEVNQNQKQVEQDIKVAIFTLMVEINKKGKALLHQLESLAKDHRMKLMQQQQEVAGLSKQLEHVMHFSKWAVSSGSSTALLYSKRLITYRLRHLLRARCDASPVTNNTIQFHCDPSFWAQNIINLGSLVIEDKESQPQMPKQNPVVEQNSQPPSGLSSNQLSKFPTQISLAQLRLQHMQQQVMAQRQQVQRRPAPVGLPNPRMQGPIQQPSISHQQPPPRLINFQNHSPKPNGPVLPPHPQQLRYPPNQNIPRQAIKPNPLQMAFLAQQAIKQWQISSGQGTPSTTNSTSSTPSSPTITSAAGYDGKAFGSPMIDLSSPVGGSYNLPSLPDIDCSSTIMLDNIVRKDTNIDHGQPRPPSNRTVQSPNSSVPSPGLAGPVTMTSVHPPIRSPSASSVGSRGSSGSSSKPAGADSTHKVPVVMLEPIRIKQENSGPPENYDFPVVIVKQESDEESRPQNANYPRSILTSLLLNSSQSSTSEETVLRSDAPDSTGDQPGLHQDNSSNGKSEWLDPSQKSPLHVGETRKEDDPNEDWCAVCQNGGELLCCEKCPKVFHLSCHVPTLTNFPSGEWICTFCRDLSKPEVEYDCDAPSHNSEKKKTEGLVKLTPIDKRKCERLLLFLYCHEMSLAFQDPVPLTVPDYYKIIKNPMDLSTIKKRLQEDYSMYSKPEDFVADFRLIFQNCAEFNEPDSEVANAGIKLENYFEELLKNLYPEKRFPKPEFRNESEDNKFSDDSDDDFVQPRKKRLKSIEERQLLK

SEQ ID NO: 188349 - protein, 961 aa, Artificial Sequence
  derived and/or modified sequence
MLPAPMLGSAETPPPVPAPGSPVSGSSPFATQVGVIRCPVCSQECAERHIIDNFFVKDTTEVPSSTVEKSNQVCTSCEDNAEANGFCVECVEWLCKTCIRAHQRVKFTKDHTVRQKEEVSPEAVGVTSQRPVFCPFHKKEQLKLYCETCDKLTCRDCQLLEHKEHRYQFIEEAFQNQKVIIDTLITKLMEKTKYIKFTGNQIQNRIIEVNQNQKQVEQDIKVAIFTLMVEINKKGKALLHQLESLAKDHRMKLMQQQQEVAGLSKQLEHVMHFSKWAVSSGSSTALLYSKRLITYRLRHLLRARCDASPVTNNTIQFHCDPSFWAQNIINLGSLVIEDKESQPQMPKQNPVVEQNSQPPSGLSSNQLSKFPTQISLAQLRLQHMQQQVMAQRQQVQRRPAPVGLPNPRMQGPIQQPSISHQQPPPRLINFQNHSPKPNGPVLPPHPQQLRYPPNQNIPRQAIKPNPLQMAFLAQQAIKQWQISSGQGTPSTTNSTSSTPSSPTITSAAGYDGKAFGSPMIDLSSPVGGSYNLPSLPDIDCSSTIMLDNIVRKDTNIDHGQPRPPSNRTVQSPNSSVPSPGLAGPVTMTSVHPPIRSPSASSVGSRGSSGSSSKPAGADSTHKVPVVMLEPIRIKQENSGPPENYDFPVVIVKQESDEESRPQNANYPRSILTSLLLNSSQSSTSEETVLRSDAPDSTGDQPGLHQDNSSNGKSEWLDPSQKSPLHVGETRKEDDPNEDWCAVCQNGGELLCCEKCPKVFHLSCHVPTLTNFPSGEWICTFCRDLSKPEVEYDCDAPSHNSEKKKTEGLVKLTPIDKRKCERLLLFLYCHEMSLAFQDPVPLTVPDYYKIIKNPMDLSTIKKRLQEDYSMYSKPEDFVADFRLIFQNCAEFNEPDSEVANAGIKLENYFEELLKNLYPEKRFPKPEFRNESEDNKFSDDSDDDFVQPRKKRLKSIEERQLLK

SEQ ID NO: 188350 - DNA, 3153 bp, Artificial Sequence
  derived and/or modified sequence
atggaggtggccgtggagaaggccgtggccgccgccgccgccgccagcgccgccgccagcggcggccccagcgccgcccccagcggcgagaacgaggccgagagcagacagggccccgacagcgagagaggcggcgaggccgccagactgaacctgctggacacctgcgccgtgtgccaccagaacatccagagcagagcccccaagctgctgccctgcctgcacagcttctgccagagatgcctgcccgccccccagagatacctgatgctgcccgcccccatgctgggcagcgccgagacccccccccccgtgcccgcccccggcagccccgtgagcggcagcagccccttcgccacccaggtgggcgtgatcagatgccccgtgtgcagccaggagtgcgccgagagacacatcatcgacaacttcttcgtgaaggacaccaccgaggtgcccagcagcaccgtggagaagagcaaccaggtgtgcaccagctgcgaggacaacgccgaggccaacggcttctgcgtggagtgcgtggagtggctgtgcaagacctgcatcagagcccaccagagagtgaagttcaccaaggaccacaccgtgagacagaaggaggaggtgagccccgaggccgtgggcgtgaccagccagagacccgtgttctgccccttccacaagaaggagcagctgaagctgtactgcgagacctgcgacaagctgacctgcagagactgccagctgctggagcacaaggagcacagataccagttcatcgaggaggccttccagaaccagaaggtgatcatcgacaccctgatcaccaagctgatggagaagaccaagtacatcaagttcaccggcaaccagatccagaacagaatcatcgaggtgaaccagaaccagaagcaggtggagcaggacatcaaggtggccatcttcaccctgatggtggagatcaacaagaagggcaaggccctgctgcaccagctggagagcctggccaaggaccacagaatgaagctgatgcagcagcagcaggaggtggccggcctgagcaagcagctggagcacgtgatgcacttcagcaagtgggccgtgagcagcggcagcagcaccgccctgctgtacagcaagagactgatcacctacagactgagacacctgctgagagccagatgcgacgccagccccgtgaccaacaacaccatccagttccactgcgaccccagcttctgggcccagaacatcatcaacctgggcagcctggtgatcgaggacaaggagagccagccccagatgcccaagcagaaccccgtggtggagcagaacagccagccccccagcggcctgagcagcaaccagctgagcaagttccccacccagatcagcctggcccagctgagactgcagcacatgcagcagcaggtgatggcccagagacagcaggtgcagagaagacccgcccccgtgggcctgcccaaccccagaatgcagggccccatccagcagcccagcatcagccaccagcagcccccccccagactgatcaacttccagaaccacagccccaagcccaacggccccgtgctgcccccccacccccagcagctgagatacccccccaaccagaacatccccagacaggccatcaagcccaaccccctgcagatggccttcctggcccagcaggccatcaagcagtggcagatcagcagcggccagggcacccccagcaccaccaacagcaccagcagcacccccagcagccccaccatcaccagcgccgccggctacgacggcaaggccttcggcagccccatgatcgacctgagcagccccgtgggcggcagctacaacctgcccagcctgcccgacatcgactgcagcagcaccatcatgctggacaacatcgtgagaaaggacaccaacatcgaccacggccagcccagaccccccagcaacagaaccgtgcagagccccaacagcagcgtgcccagccccggcctggccggccccgtgaccatgaccagcgtgcacccccccatcagaagccccagcgccagcagcgtgggcagcagaggcagcagcggcagcagcagcaagcccgccggcgccgacagcacccacaaggtgcccgtggtgatgctggagcccatcagaatcaagcaggagaacagcggcccccccgagaactacgacttccccgtggtgatcgtgaagcaggagagcgacgaggagagcagaccccagaacgccaactaccccagaagcatcctgaccagcctgctgctgaacagcagccagagcagcaccagcgaggagaccgtgctgagaagcgacgcccccgacagcaccggcgaccagcccggcctgcaccaggacaacagcagcaacggcaagagcgagtggctggaccccagccagaagagccccctgcacgtgggcgagaccagaaaggaggacgaccccaacgaggactggtgcgccgtgtgccagaacggcggcgagctgctgtgctgcgagaagtgccccaaggtgttccacctgagctgccacgtgcccaccctgaccaacttccccagcggcgagtggatctgcaccttctgcagagacctgagcaagcccgaggtggagtacgactgcgacgcccccagccacaacagcgagaagaagaagaccgagggcctggtgaagctgacccccatcgacaagagaaagtgcgagagactgctgctgttcctgtactgccacgagatgagcctggccttccaggaccccgtgcccctgaccgtgcccgactactacaagatcatcaagaaccccatggacctgagcaccatcaagaagagactgcaggaggactacagcatgtacagcaagcccgaggacttcgtggccgacttcagactgatcttccagaactgcgccgagttcaacgagcccgacagcgaggtggccaacgccggcatcaagctggagaactacttcgaggagctgctgaagaacctgtaccccgagaagagattccccaagcccgagttcagaaacgagagcgaggacaacaagttcagcgacgacagcgacgacgacttcgtgcagcccagaaagaagagactgaagagcatcgaggagagacagctgctgaagtag

SEQ ID NO: 188351 - DNA, 2886 bp, Artificial Sequence
  derived and/or modified sequence
atgctgcccgcccccatgctgggcagcgccgagacccccccccccgtgcccgcccccggcagccccgtgagcggcagcagccccttcgccacccaggtgggcgtgatcagatgccccgtgtgcagccaggagtgcgccgagagacacatcatcgacaacttcttcgtgaaggacaccaccgaggtgcccagcagcaccgtggagaagagcaaccaggtgtgcaccagctgcgaggacaacgccgaggccaacggcttctgcgtggagtgcgtggagtggctgtgcaagacctgcatcagagcccaccagagagtgaagttcaccaaggaccacaccgtgagacagaaggaggaggtgagccccgaggccgtgggcgtgaccagccagagacccgtgttctgccccttccacaagaaggagcagctgaagctgtactgcgagacctgcgacaagctgacctgcagagactgccagctgctggagcacaaggagcacagataccagttcatcgaggaggccttccagaaccagaaggtgatcatcgacaccctgatcaccaagctgatggagaagaccaagtacatcaagttcaccggcaaccagatccagaacagaatcatcgaggtgaaccagaaccagaagcaggtggagcaggacatcaaggtggccatcttcaccctgatggtggagatcaacaagaagggcaaggccctgctgcaccagctggagagcctggccaaggaccacagaatgaagctgatgcagcagcagcaggaggtggccggcctgagcaagcagctggagcacgtgatgcacttcagcaagtgggccgtgagcagcggcagcagcaccgccctgctgtacagcaagagactgatcacctacagactgagacacctgctgagagccagatgcgacgccagccccgtgaccaacaacaccatccagttccactgcgaccccagcttctgggcccagaacatcatcaacctgggcagcctggtgatcgaggacaaggagagccagccccagatgcccaagcagaaccccgtggtggagcagaacagccagccccccagcggcctgagcagcaaccagctgagcaagttccccacccagatcagcctggcccagctgagactgcagcacatgcagcagcaggtgatggcccagagacagcaggtgcagagaagacccgcccccgtgggcctgcccaaccccagaatgcagggccccatccagcagcccagcatcagccaccagcagcccccccccagactgatcaacttccagaaccacagccccaagcccaacggccccgtgctgcccccccacccccagcagctgagatacccccccaaccagaacatccccagacaggccatcaagcccaaccccctgcagatggccttcctggcccagcaggccatcaagcagtggcagatcagcagcggccagggcacccccagcaccaccaacagcaccagcagcacccccagcagccccaccatcaccagcgccgccggctacgacggcaaggccttcggcagccccatgatcgacctgagcagccccgtgggcggcagctacaacctgcccagcctgcccgacatcgactgcagcagcaccatcatgctggacaacatcgtgagaaaggacaccaacatcgaccacggccagcccagaccccccagcaacagaaccgtgcagagccccaacagcagcgtgcccagccccggcctggccggccccgtgaccatgaccagcgtgcacccccccatcagaagccccagcgccagcagcgtgggcagcagaggcagcagcggcagcagcagcaagcccgccggcgccgacagcacccacaaggtgcccgtggtgatgctggagcccatcagaatcaagcaggagaacagcggcccccccgagaactacgacttccccgtggtgatcgtgaagcaggagagcgacgaggagagcagaccccagaacgccaactaccccagaagcatcctgaccagcctgctgctgaacagcagccagagcagcaccagcgaggagaccgtgctgagaagcgacgcccccgacagcaccggcgaccagcccggcctgcaccaggacaacagcagcaacggcaagagcgagtggctggaccccagccagaagagccccctgcacgtgggcgagaccagaaaggaggacgaccccaacgaggactggtgcgccgtgtgccagaacggcggcgagctgctgtgctgcgagaagtgccccaaggtgttccacctgagctgccacgtgcccaccctgaccaacttccccagcggcgagtggatctgcaccttctgcagagacctgagcaagcccgaggtggagtacgactgcgacgcccccagccacaacagcgagaagaagaagaccgagggcctggtgaagctgacccccatcgacaagagaaagtgcgagagactgctgctgttcctgtactgccacgagatgagcctggccttccaggaccccgtgcccctgaccgtgcccgactactacaagatcatcaagaaccccatggacctgagcaccatcaagaagagactgcaggaggactacagcatgtacagcaagcccgaggacttcgtggccgacttcagactgatcttccagaactgcgccgagttcaacgagcccgacagcgaggtggccaacgccggcatcaagctggagaactacttcgaggagctgctgaagaacctgtaccccgagaagagattccccaagcccgagttcagaaacgagagcgaggacaacaagttcagcgacgacagcgacgacgacttcgtgcagcccagaaagaagagactgaagagcatcgaggagagacagctgctgaagtag

SEQ ID NO: 188352 - DNA, 3153 bp, Artificial Sequence
  derived and/or modified sequence
atggaagtcgcagtcgagaaggccgttgcagccgccgccgccgcgtctgctgcggctagcggaggtccaagtgcagcaccatctggggagaacgaggccgaatcccggcaaggaccagactccgagcgaggtggagaggcggccagactgaatctattagacacgtgcgccgtatgtcaccagaacatccagtccagggcccccaagttactgccctgtttacactcattctgtcagagatgtctcccggccccacagcggtacttgatgttgcctgcccctatgctcggatcagctgaaacacccccccccgtgcccgcacctgggagccctgtatctggtagtagcccattcgcaactcaagtgggagtgatcaggtgcccagtttgctcgcaggaatgtgctgagcgccacattattgacaactttttcgtaaaagacactacagaggtgccctcctccacggtggaaaagagtaatcaggtgtgtacgtcgtgtgaggataacgccgaagccaatggcttctgcgtggagtgtgtagagtggctgtgtaagacttgcattcgcgctcatcagcgggtgaaattcactaaagatcacacagtgcgccagaaagaggaagtgagccctgaggccgttggtgtaacaagtcaacggcctgtgttctgtccattccacaaaaaggagcaactgaagctgtactgcgagacatgcgataagctgacttgtagagactgccagctgttggaacataaggaacatagataccaattcatcgaagaggcctttcaaaaccaaaaggtcattatcgatacgctcatcacaaagcttatggagaagactaagtacattaaatttaccggcaaccagatccaaaacaggattattgaagtcaaccagaatcagaagcaggtcgaacaggacataaaagttgcaatttttaccttgatggtggaaattaataaaaagggtaaggccctgttacaccagctagagagtctggccaaggaccatcgaatgaagctgatgcagcagcagcaggaggtggcggggctcagtaaacagctggaacacgtaatgcacttttctaaatgggctgtcagcagcggaagcagcacagctctgctgtactccaaaagactgatcacgtaccgcctgaggcaccttctgagagcaaggtgcgatgccagccctgtaaccaacaacaccatccaatttcactgtgatccatcattttgggctcagaatattataaatcttggaagtttagtcatcgaggataaagagtcccagcctcaaatgcccaagcagaacccagttgttgagcagaacagccagccgccatcaggactgtccagtaatcagctgagtaaattcccgacacagatttctctggctcagctccgcctgcagcacatgcagcagcaagtcatggcacagcgccagcaggtgcagagacgccctgctcctgtgggactgcccaatcccaggatgcaggggcctattcaacaaccatctatttcccatcaacagccccctccccggctgatcaattttcaaaatcattctccgaagccgaacggaccagtgctgcctccgcaccctcaacagctgcgctaccctccaaaccaaaatatccccagacaggcaattaagcctaacccactgcagatggcgtttctggcacaacaggctatcaagcaatggcagatctcttcaggccagggaaccccttcaacaaccaatagtacttcttccacccccagttctcccactattacatccgcagctgggtacgatggaaaagcctttggaagtcccatgatcgatcttagcagcccagttggaggttcctacaatcttcctagcttgcccgacatcgactgttcatccactatcatgttagacaatatagtccggaaggataccaacattgaccacggccaaccccgacccccatcaaatcggacagtgcagtcacctaactcttctgtgcctagccctgggttggctggaccagtgactatgacttccgtacatccaccgatcaggtccccttctgcctctagtgtggggagccgtggatcgagcggaagcagcagcaagcctgccggggccgactcaactcacaaagtccctgtagtgatgctcgagccaattcggattaagcaagaaaattcaggcccccctgaaaattatgatttcccagtcgtaatagtgaagcaagagtcagatgaggagtctagaccccaaaacgctaactaccctagatccattcttacttcactgctactcaatagttcccagtcgtccacctcagaagaaacggttttgaggtctgacgccccagattctaccggagaccagccaggacttcatcaggacaacagttccaatggaaagagtgaatggctcgatccaagccagaagtccccacttcacgtgggtgagaccagaaaggaagacgatccgaatgaggattggtgtgccgtgtgtcagaacggtggcgaattactgtgctgcgagaaatgtccaaaagtgttccacctcagctgtcatgtgcctaccctcactaattttccctccggtgagtggatctgcaccttttgccgggatctgagtaaacccgaagtggaatacgactgcgacgcaccaagccataatagcgagaagaaaaagactgaaggtcttgtaaagctgactcctatagacaagcgcaaatgtgaacgcttgctgctgttcctctactgtcacgagatgtccctggccttccaggatcctgtgccacttactgtacccgactattataaaataattaagaaccctatggatttgtcaacaattaagaaacgacttcaggaagactattccatgtactctaaaccggaggattttgtggcagacttccgactgatttttcaaaattgcgctgagttcaacgagccagatagtgaagtagccaatgcaggaatcaaactcgaaaactactttgaggaattgctcaagaacctttacccagagaagcgattccccaaaccagagttcagaaacgaatcagaagataataaattttccgacgattcagacgatgacttcgtgcagccacgaaagaagaggctcaaaagcatcgaggaacggcaactacttaagtag

SEQ ID NO: 188353 - DNA, 2886 bp, Artificial Sequence
  derived and/or modified sequence
atgctaccagcccccatgctggggagtgccgagacccccccaccagtgcctgcccctggctctccagtctcgggctctagtcccttcgccacccaggtgggcgtgatcagatgcccagtgtgcagccaagagtgtgccgaacgccacatcatcgataatttcttcgtgaaagatacaaccgaagtcccatctagtaccgtcgagaagagtaatcaggtatgcacctcctgcgaagataacgccgaagcaaatgggttctgcgtggagtgtgtggaatggctctgtaagacctgtataagggcgcaccaacgagtgaagttcactaaagaccataccgtcagacagaaagaagaggttagtccagaagcagtgggagtgacgagccagagacctgtgttttgccccttccacaagaaagagcaactaaaactgtattgtgagacctgtgacaaattaacctgccgagactgtcaactgctagaacataaagaacatcgctatcaatttatagaggaggcgttccagaaccagaaagtgattatcgacaccttgattacgaagttgatggaaaagaccaagtacattaaatttactgggaaccagattcagaatcggattattgaggtcaaccaaaaccagaagcaggttgagcaggatatcaaagtggcaatctttactctcatggtcgaaataaacaaaaagggcaaggcgttactgcatcaactagagagccttgcaaaagaccaccgaatgaagctgatgcaacagcagcaggaggtggctggccttagtaagcagttagaacatgtgatgcacttcagcaagtgggcggtcagctctggttctagtacagccctgctgtattcaaagcgtttaatcacgtacagacttaggcacctactgagggcccgatgcgatgcctctccagttaccaacaacactatccagtttcactgtgaccctagcttctgggcccagaatatcatcaatcttggatccctagtgattgaggacaaggagtcacaaccccaaatgccaaagcagaaccctgtggtggagcagaattcacagccaccttccggccttagctccaaccaattgtcaaaatttccaacccagatttcgcttgcccaattgaggctacagcatatgcagcaacaggttatggctcaacgccagcaggtccaacggcgaccagctcccgtgggactgcccaatccgaggatgcagggaccaatccaacaaccttccatatcacatcagcagcctccaccgcggttgatcaatttccaaaatcattcaccaaaacctaatggacctgtgttgccccctcacccacagcagcttcgatacccccctaaccagaatatcccacggcaggcgataaaacccaatcccctgcagatggccttcctggcacagcaagccatcaaacagtggcagatctcttccgggcaggggactccttctactaccaactctactagctcgacacccagttctcccaccatcaccagtgccgctggatacgatgggaaggcttttggctctccaatgattgatctgtcttcacctgtgggtggttcttacaatctcccatccctgcccgacatcgattgttcttcaaccattatgttggacaatattgtgcgtaaggacactaatatcgatcacggccagcctaggcctccctccaacaggacagttcagagtccaaactcttcagtgccctcccccggtctggctggcccagtcaccatgactagcgtgcatccacccatccggagcccgagcgcttcatccgttgggtcccgtggatcgagcgggtcatcctcgaaacctgccggggccgactctacgcacaaggtgcctgtggtaatgctggagcccattcgaataaaacaggaaaatagcggacctccggaaaattacgatttccccgttgtcatcgtgaaacaggagtctgacgaggagtccagaccccagaacgctaattatccccgctcgatccttacctcacttctcctgaactctagccaaagtagtaccagcgaggaaacagtgctgcggagcgatgcacccgattctacaggggatcagcccggattgcaccaggataactcgagcaatggtaaatccgaatggcttgacccatcccagaagtcacctctccacgtaggagagactcgtaaggaggatgacccaaacgaggactggtgcgctgtctgccagaatggtggtgagttgctgtgctgcgagaagtgtccgaaggttttccatcttagctgccatgtgcccaccctgactaattttccctcaggtgaatggatctgcactttttgcagagacctgagcaaacccgaagttgaatatgattgcgatgccccatcgcacaactccgaaaaaaagaagaccgaggggcttgtaaagctgacacccatcgataagcgcaagtgtgaacgtctgcttttattcctatactgccacgaaatgagccttgcatttcaggaccctgtgccattgacagtgccggactattacaaaatcattaaaaaccccatggatcttagcaccattaagaagcgattgcaggaagactactctatgtactcgaaacctgaggactttgtggcagacttcaggctaatctttcagaactgcgccgaattcaacgagccagactccgaagttgctaacgcgggcatcaagctcgagaattattttgaagagttgttgaaaaatctttatcccgaaaagcggtttcctaagccagaattccgtaatgaatcggaagacaataagttttctgacgacagcgacgacgattttgtgcagcctaggaagaaacgtttgaagagtatcgaagagaggcagctcctgaaatag

SEQ ID NO: 188354 - DNA, 3153 bp, Artificial Sequence
  derived and/or modified sequence
atggaggtggccgtggagaaggctgtggccgctgctgctgctgccagcgctgctgccagcggcggccccagcgctgcccccagcggggagaatgaagctgagagccggcagggcccagattctgagcggggcggggaggccgcccggctgaacctgctggacacctgtgctgtgtgccaccagaacatccagagccgggcccccaagctgctgccctgcctgcacagcttctgccagcgctgcctgcctgccccccagcgctacctgatgctgcctgcccccatgctgggcagcgctgagaccccacctcctgtgcctgcccctggcagccctgtgtctggcagcagcccctttgccacccaggtgggcgtcatccgctgccctgtgtgcagccaggagtgtgccgagcggcacatcatcgacaacttctttgtgaaggacaccacagaggtgcccagcagcacagtggagaagagcaaccaggtgtgcaccagctgtgaagataatgctgaggccaacggcttctgtgtggagtgtgtggagtggctgtgcaagacctgcatccgggcccaccagagggtgaagttcaccaaggaccacacagtgcggcagaaggaggaggtgtccccagaggccgtgggcgtgaccagccagaggcctgtgttctgccccttccacaagaaggagcagctgaagctgtactgtgagacctgtgacaagctgacctgccgggactgccagctgctggagcacaaggagcaccgctaccagttcatcgaggaggccttccagaaccagaaggtgatcatcgacaccctcatcaccaagctgatggagaagaccaagtacatcaagttcaccggcaaccagatccagaaccgcatcatcgaggtgaaccagaaccagaagcaggtggagcaggacatcaaggtggccatcttcaccctgatggtggagatcaacaagaagggcaaggccctgctgcaccagctggagagcctggccaaggaccacaggatgaagctgatgcagcagcagcaggaggtggccggcctgagcaagcagctggagcacgtgatgcacttcagcaagtgggccgtgagcagcggcagcagcacagccctgctgtacagcaagaggctcatcacctaccgcctgcggcacctgctgcgggcccgctgtgatgccagccctgtgaccaacaacaccatccagttccactgtgaccccagcttctgggcccagaacatcatcaacctgggcagcctggtgattgaggacaaggagagccagccccagatgcccaagcagaaccctgtggtggagcagaacagccagcccccatctggcctgagcagcaaccagctgagcaagttccccacccagatcagcctggcccagctgcggctgcagcacatgcagcagcaggtgatggcccagaggcagcaggtgcagaggaggcctgcccctgtgggcctgcccaaccccaggatgcagggccccatccagcagcccagcatcagccaccagcagcccccacccaggctcatcaacttccagaaccacagccccaagcccaatggacctgtgctgcccccccacccccagcagctgcgctacccacccaaccagaacatcccccggcaggccatcaagcccaaccccctgcagatggccttcctggcccagcaggccatcaagcagtggcagatcagcagcggccagggcacccccagcaccaccaacagcaccagcagcacccccagcagccccaccatcaccagcgctgctggctatgatggcaaggccttcggcagccccatgattgacctgagcagccctgtgggcggcagctacaacctgcccagcctgcctgacatcgactgcagcagcaccatcatgctggacaacatcgtgaggaaggacaccaacatcgaccacggccagccccggccccccagcaacagaacagtgcagagccccaacagctctgtgcccagccctggcctggccggccctgtgaccatgacctctgtgcacccccccatccgcagccccagcgccagctctgtgggcagccggggcagcagcggcagcagcagcaagccagctggagctgacagcacccacaaggtgcctgtggtgatgctggagcccatccgcatcaagcaggagaacagcggccccccagaaaattatgacttccctgtggtgattgtgaagcaggagagtgatgaggagagccggccccagaatgccaactaccccaggagcatcctgaccagcctgctgctgaacagcagccagagcagcaccagcgaggagaccgtgctgcggagtgatgccccagacagcactggagaccagcccggcctgcaccaggacaacagcagcaatggcaagtctgagtggctggaccccagccagaagagccccctgcacgtgggggagaccaggaaagaagatgaccccaatgaagactggtgtgctgtgtgccagaatggaggagagctgctgtgctgtgagaagtgccccaaggtgttccacctgagctgccacgtgcccaccctgaccaacttccccagcggggagtggatctgcaccttctgccgggacctgagcaagccagaggtggagtatgactgtgatgcccccagccacaacagcgagaagaagaagacagagggcctggtgaagctgacccccatcgacaagaggaaatgtgagcggctgctgctcttcctgtactgccacgagatgagcctggccttccaggaccctgtgcccctgactgtgcctgactactacaagatcatcaagaaccccatggacctgagcaccatcaagaagaggctgcaggaggactacagcatgtacagcaagccagaagattttgtggccgacttccgcctcatcttccagaactgtgccgagttcaatgaaccagacagcgaggtggccaatgccggcatcaagctggagaactactttgaggagctgctgaagaacctgtacccagagaagcgcttccccaagccagagttcagaaatgaaagtgaggacaacaagttcagtgatgacagtgatgatgactttgtgcagcccaggaagaagaggctgaagagcattgaggagcggcagctgctgaagtag

SEQ ID NO: 188355 - DNA, 2886 bp, Artificial Sequence
  derived and/or modified sequence
atgctgcctgcccccatgctgggcagcgctgagaccccacctcctgtgcctgcccctggcagccctgtgtctggcagcagcccctttgccacccaggtgggcgtcatccgctgccctgtgtgcagccaggagtgtgccgagcggcacatcatcgacaacttctttgtgaaggacaccacagaggtgcccagcagcacagtggagaagagcaaccaggtgtgcaccagctgtgaggacaatgctgaggccaacggcttctgtgtggagtgtgtggagtggctgtgcaagacctgcatccgggcccaccagagggtgaagttcaccaaggaccacacagtgcggcagaaggaggaggtgtccccagaggccgtgggcgtgaccagccagaggcctgtgttctgccccttccacaagaaggagcagctgaagctgtactgtgagacctgtgacaagctgacctgccgggactgccagctgctggagcacaaggagcaccgctaccagttcatcgaggaggccttccagaaccagaaggtgatcatcgacaccctcatcaccaagctgatggagaagaccaagtacatcaagttcaccggcaaccagatccagaaccgcatcatcgaggtgaaccagaaccagaagcaggtggagcaggacatcaaggtggccatcttcaccctgatggtggagatcaacaagaagggcaaggccctgctgcaccagctggagagcctggccaaggaccacaggatgaagctgatgcagcagcagcaggaggtggccggcctgagcaagcagctggagcacgtgatgcacttcagcaagtgggccgtgagcagcggcagcagcacagccctgctgtacagcaagaggctcatcacctaccgcctgcggcacctgctgcgggcccgctgtgatgccagccctgtgaccaacaacaccatccagttccactgtgaccccagcttctgggcccagaacatcatcaacctgggcagcctggtgattgaggacaaggagagccagccccagatgcccaagcagaaccctgtggtggagcagaacagccagccccccagcggcctgagcagcaaccagctgagcaagttccccacccagatcagcctggcccagctgcggctgcagcacatgcagcagcaggtgatggcccagaggcagcaggtgcagaggaggcctgcccctgtgggcctgcccaaccccaggatgcagggccccatccagcagcccagcatcagccaccagcagcccccacccaggctcatcaacttccagaaccacagccccaagcccaacggccctgtgctgcccccccacccccagcagctgcgctacccacccaaccagaacatcccccggcaggccatcaagcccaaccccctgcagatggccttcctggcccagcaggccatcaagcagtggcagatcagcagcggccagggcacccccagcaccaccaacagcaccagcagcacccccagcagccccaccatcaccagcgctgctggctatgatggcaaggccttcggcagccccatgattgacctgagcagccctgtgggcggcagctacaacctgcccagcctgcctgacatcgactgcagcagcaccatcatgctggacaacatcgtgaggaaggacaccaacatcgaccacggccagcccaggcctcccagcaacagaacagtgcagagccccaacagctctgtgcccagccctggcctggccggccctgtgaccatgacctctgtgcacccccccatccgcagccccagcgccagctctgtgggcagccggggcagcagcggcagcagcagcaagccagctggagctgacagcacccacaaggtgcctgtggtgatgctggagcccatccgcatcaagcaggagaacagcggccccccagagaactatgacttccctgtggtgattgtgaagcaggagagtgatgaggagagccggccccagaatgccaactaccccaggagcatcctgaccagcctgctgctgaacagcagccagagcagcaccagcgaggagaccgtgctgcggagtgatgccccagacagcactggagaccagcccggcctgcaccaggacaacagcagcaatggcaagtctgagtggctggaccccagccagaagagccccctgcacgtgggggagaccaggaaggaggatgaccccaatgaagactggtgtgctgtgtgccagaatggaggagagctgctgtgctgtgagaagtgccccaaggtgttccacctgagctgccacgtgcccaccctgaccaacttccccagcggggagtggatctgcaccttctgccgggacctgagcaagccagaggtggagtatgactgtgatgcccccagccacaacagcgagaagaagaagacagagggcctggtgaagctgacccccatcgacaagaggaaatgtgagcggctgctgctcttcctgtactgccacgagatgagcctggccttccaggaccctgtgcccctgactgtgcctgactactacaagatcatcaagaaccccatggacctgagcaccatcaagaagaggctgcaggaggactacagcatgtacagcaagccagaggactttgtggccgacttccgcctcatcttccagaactgtgccgagttcaatgaaccagattctgaggtggccaatgccggcatcaagctggagaactactttgaggagctgctgaagaacctgtacccagagaagcgcttccccaagccagagttcagaaatgaaagtgaggacaacaagttcagtgatgacagtgatgatgactttgtgcagcccaggaagaagaggctgaagagcattgaggagcggcagctgctgaagtag

SEQ ID NO: 188356 - DNA, 3153 bp, Artificial Sequence
  derived and/or modified sequence
atggaggtggccgtggagaaggccgtggccgccgccgccgccgccagtgcagctgccagcggcggtccatctgctgcgccgtcaggcgaaaatgaagctgagagtcgccagggtcctgactcagagagaggcggcgaagcggccagactgaatctcctggatacatgcgccgtttgccatcagaacatccagtccagggccccaaagttacttccctgcctgcattccttctgtcagcggtgcctccccgcaccccagcggtacttgatgctgccagccccaatgctgggcagcgccgagacacccccacccgtgccagcccccggcagccctgtatccggttccagcccttttgccactcaggtgggtgtgataagatgcccagtgtgctcgcaggagtgcgctgaaaggcatattattgataacttcttcgtcaaagacacgacagaggtgcccagctccacggtggaaaagtcgaaccaagtttgcacctcgtgtgaagacaatgctgaagcgaatggattctgcgtggagtgtgttgagtggctatgcaaaacctgcattcgcgcccaccagcgcgtgaaatttaccaaggaccacaccgtgagacaaaaggaagaagtttcccccgaggccgttggcgtgacctcgcagcgtcctgtcttctgccctttccacaaaaaagagcagttgaagctctactgcgaaacatgcgacaaattgacctgtagagattgccagttgctggaacacaaggagcaccggtatcagttcatcgaggaagcctttcaaaaccagaaggtcattatcgataccctgatcacaaaactgatggagaaaacgaagtacattaaatttactggtaaccagattcagaatcgaatcatcgaggtgaaccagaaccagaagcaggtggaacaggatatcaaggtagcaatattcaccttgatggtcgaaatcaacaaaaaggggaaagctcttctgcatcagcttgagtccttagcgaaagatcatagaatgaaactgatgcagcagcagcaagaagtcgccggactgagcaagcaactcgaacatgttatgcatttctccaagtgggcagtcagtagcggcagttctacagcactgctctattctaaacgcctcattacttatcggcttagacacctgctgcgagccagatgcgatgctagccccgtgactaataacaccattcaatttcattgcgatcccagtttctgggcacagaacattatcaacctgggcagcttggttattgaggataaggagagtcaacctcagatgcccaaacagaaccctgtggttgagcagaactcccaaccacctagtggcctatccagcaaccagctgagcaagttcccaacccagatcagtctcgcacagctgagactccagcatatgcaacagcaggtgatggctcagcggcaacaagtccagagaagacccgctccggtggggctgcccaaccctagaatgcagggtcctattcagcagccttctatcagtcatcagcagccaccgcctcggctaattaatttccaaaaccactcccctaaaccaaatggacccgtacttccgccccacccccagcagttgagatacccccccaaccagaacatacctcgccaggccattaaacccaacccgctacagatggcttttctggcccagcaggcaatcaaacagtggcagattagcagcggacagggcacaccatctactacaaatagcacaagttcaacgcccagctcccccacaataacgagcgccgctgggtacgacggcaaggcgtttggctctccgatgatcgacctgtcttccccagtgggtggaagttataacttgcccagcctgcctgacattgattgtagcagcacaatcatgctcgataacatcgttagaaaggacactaacattgaccacggccaaccacggccaccatccaacaggactgttcagtccccaaactcatcggtgcctagccctgggttggcaggcccggtcaccatgacttcagtacacccccccataagaagtccctctgcctccagtgtcggcagtagaggatcgtctgggtcctcctccaaacccgccggggccgattccacacataaagtccctgtggttatgctggagccaattagaattaagcaagagaactcaggtccgcctgaaaattacgactttcctgtcgtgattgtcaagcaagaatcagatgaggagagtcggcctcagaatgcaaactaccccaggtcaattctaacatccctcctcctgaactcctctcagagttccaccagcgaagagacagtgctccgatccgatgcgcccgattccaccggtgaccagccgggactgcatcaggacaattcttcaaacggcaagtccgagtggctggacccatcccagaaatcccccctgcatgtcggtgagaccaggaaggaagacgatccgaatgaggattggtgcgctgtgtgccagaacgggggagaactgctgtgctgtgaaaagtgtcctaaagtcttccatctgagctgccacgtacccacattgaccaatttcccaagtggggagtggatatgcaccttctgtagggatctgtcaaaacctgaagtagaatatgattgtgacgccccctcacataactctgaaaagaaaaaaaccgaagggcttgtgaaactcacacctatcgataaaaggaaatgtgagagactgttgctctttctatactgccacgaaatgagcctggcatttcaagatcctgtgccactgactgttcccgactactacaaaatcattaagaatcctatggacctctcaactattaagaagcgattacaggaggattattctatgtattcgaaacctgaagacttcgtggctgacttccgtttgatctttcaaaactgcgccgagtttaacgaaccagactctgaggtcgctaacgccggaattaagctcgaaaactacttcgaagaactgctcaaaaatctatacccggagaaaaggtttcccaagcctgagttccgaaacgaaagtgaggacaataagtttagcgatgacagcgatgatgattttgtgcaacccagaaaaaaacgcctgaaaagtatcgaggaaaggcagctccttaagtag

SEQ ID NO: 188357 - DNA, 2886 bp, Artificial Sequence
  derived and/or modified sequence
atgctgcccgcccccatgctgggcagcgccgagacccccccccccgttcccgcccccggaagtccagtctctggaagttcaccctttgctacccaggtcggcgttatccggtgcccggtctgtagccaagagtgtgcagaaaggcacattatagataacttcttcgtaaaggacacaaccgaagtcccgagctctacggtagagaaaagcaaccaagtttgcacatcatgtgaggataacgctgaagcgaacggattttgcgtggaatgcgttgagtggttgtgtaagacctgcatccgggcccaccaacgtgtcaagttcactaaggatcatacagtgagacagaaagaggaggtgagtcccgaagccgtgggggtcacgagtcagaggcccgtcttttgtccttttcataagaaagaacagctgaaattgtactgtgagacttgtgacaagctgacttgcagggactgccagttgctggagcacaaggagcaccggtaccagtttatagaggaggcctttcagaatcagaaggtcatcatagacacacttataaccaagctgatggagaaaaccaagtacataaaatttacaggcaaccagatccagaataggattatcgaggtcaaccagaatcagaagcaagtggaacaggacattaaagtcgccatcttcaccctcatggtcgagattaataagaagggaaaggcgctgctgcaccagctcgaatccctggcaaaggaccatcggatgaaactgatgcaacaacagcaggaagtggctggactaagtaaacagcttgaacacgtaatgcacttttccaaatgggctgtcagcagcggcagctctacagcactgctatactcgaaacggctcattacctaccggctgagacatctcctgcgggcccggtgcgatgcctctcccgtgaccaacaatacaatccagttccactgtgatccatccttctgggcacagaacataataaatttgggcagtctagtgatcgaggataaagagtctcagccacagatgccaaagcagaaccctgtggtcgaacagaattctcagccaccctctggactgagctcaaatcagctcagtaaatttcctacgcagatatcgctggctcagctgagactacagcacatgcagcagcaggtaatggctcaaagacagcaggtgcaacggcgcccagctcccgtgggactgcctaatcctcgaatgcaaggccctattcagcagccctccatttcacaccagcagcccccacctcgtttgataaattttcagaaccactcaccgaagcctaacggccccgttctgccgccgcacccgcagcaactccgctatcccccgaaccaaaacattccccggcaagcgatcaaaccgaacccacttcagatggcatttttggcacagcaggctatcaagcagtggcaaatttcgagcggacagggaacaccgtctacgaccaatagcactagttctacccccagcagcccaacgattacaagtgctgctggctatgacggcaaagccttcggctcccctatgattgacctcagttctcccgtagggggtagctacaatttaccatcccttcccgatatcgattgttcttcaaccattatgctggacaacatcgtgcgcaaggacacaaatatcgaccatggccagcctcgaccgccaagtaaccgcaccgtgcagtctcccaattcttccgtgccttcgcccggccttgccggacccgtgacgatgacatccgttcaccctccgataaggtctcctagtgccagcagcgtgggctcccgaggctcctctggctcttctagtaagccagccggagctgattctactcataaggtgcccgtggtcatgctcgagcccatcaggatcaagcaggaaaactcaggacctccagaaaattacgacttcccagtggttatcgtcaagcaggagagcgacgaagagtcaagacctcaaaacgccaactatcctcgcagcattctaactagtctcctgctgaattcatcgcagtcctctacctcggaggagactgtccttaggtctgacgcgccagacagcactggagatcagccaggcctccatcaggacaattccagcaatgggaagtccgagtggctggaccctagccaaaagtcccccttgcatgttggcgagacacgcaaggaggacgatcctaatgaggactggtgtgcagtgtgtcagaacggcggagaattgctctgctgtgagaagtgtcctaaggttttccacttatcctgccacgttcccaccctgacaaatttcccctccggcgagtggatatgtactttttgtcgggatctatcaaaacccgaagtcgagtatgattgcgatgcccccagccacaacagcgagaaaaagaagacagaaggacttgtgaaacttaccccgattgacaagcgaaagtgtgaacgcctactgctgtttctgtattgtcacgaaatgtccctcgccttccaggatccagtgccgttgactgtcccagattattacaagatcattaaaaatccaatggatttgtccaccatcaagaaaagacttcaggaggactactcaatgtactcaaagccagaagatttcgtggctgactttcggttaatcttccagaactgcgctgagttcaatgagccagactcagaagtggctaacgccggcattaaactcgagaactatttcgaggaactcctaaaaaatctttaccctgagaaaaggttccctaagccagagtttcgcaatgaaagcgaagacaataaatttagtgacgatagcgatgatgactttgtccagccccggaaaaaaaggttaaaatcaatcgaagagaggcagctgcttaaatag

SEQ ID NO: 188358 - DNA, 3153 bp, Artificial Sequence
  derived and/or modified sequence
atggaggtggctgtggagaaggcggtggccgcagccgctgctgcttccgccgctgctagcgggggtccaagcgccgctccaagtggagagaacgaagcggaatcccggcaaggtcctgacagcgaaagaggcggagaagccgctcggctaaatctcctggatacttgtgcagtttgtcaccagaacattcagtcccgagccccaaagctgctcccttgcctgcattccttttgccagcggtgcctgcccgctccccagaggtaccttatgctaccggctcctatgctaggaagtgctgagactcctccgccagtgccggctccgggttcgcctgtgagcggttccagcccgttcgcaacacaagttggtgtgatccgctgtcccgtttgcagccaggaatgcgcggaaagacacatcattgataacttcttcgtgaaggacacgacggaggtgccttcaagcaccgtggaaaagtcgaaccaagtctgtacctcctgtgaggacaatgctgaggcgaacggcttttgcgtggaatgtgtggagtggctctgcaaaacctgcatacgggctcatcaacgggtgaaattcacaaaggatcatactgtgaggcaaaaggaagaggtttctcccgaggcagtgggcgtgacaagccaacggcctgtcttttgcccatttcataaaaaagaacaactgaagctctactgcgagacatgtgataaactgacctgccgggattgccagcttttagaacataaagaacataggtaccagttcattgaggaagcctttcagaaccagaaggtgattatcgacaccctcatcacaaaactgatggagaagacaaaatatatcaaattcactggtaaccagatccagaatcgcattatagaggtgaatcagaaccagaagcaagtggagcaagatattaaagtcgcaatattcactttgatggtcgagataaataagaaaggtaaggccctcttacatcagctggaatccctcgccaaggaccaccgcatgaagctgatgcagcaacaacaggaggttgccggactttctaagcagctcgagcacgtgatgcatttctctaagtgggctgtaagctcaggtagttccaccgcccttctctactcaaaacgcctgattacctataggctgcgacacctgctacgtgcccgttgcgacgcgtctccagtgacaaataatacaatacagtttcactgtgacccatccttctgggctcaaaatatcattaacctgggcagcctggtgattgaagacaaagaaagccagccacagatgccaaaacagaatccggtcgtagaacagaattctcagcctccttccggcctgtcaagcaaccagctgtcaaagtttcccacccaaatcagcctcgcccaattgaggttgcagcacatgcaacagcaagtcatggctcagaggcagcaggtgcagcgtcggcctgccccagtgggattgccaaaccccagaatgcagggacccatccagcagccatccataagccaccagcagcctccacctaggttaattaattttcagaaccattctcctaagcccaacggcccagttctcccaccccaccctcagcaacttcggtatcctcccaaccagaacatcccaagacaagcaatcaagcctaaccctctgcagatggctttccttgcccagcaggctattaagcaatggcaaatcagttctggccagggaacaccgagtacaactaactctacatctagcacaccttcgagtcctaccattacaagcgcagccggttatgacggcaaggccttcggttctcccatgattgacctgagctccccagtaggaggttcgtataatctgccatctttgccagacatcgattgctcgagcaccattatgctcgataacatagtcagaaaagatacaaatattgatcacgggcagcctaggcccccttcaaacagaacggtgcagtctccaaattccagcgtccctagcccaggcttggcaggacctgttaccatgacatccgttcacccaccaatcagaagtccctccgcatctagcgtgggttcaaggggttcaagcggctccagctcaaaacccgctggtgcagacagcactcacaaggtgccagtcgtgatgcttgagcccataaggatcaaacaagaaaactctggccctccggaaaattatgatttcccagtcgtgatcgtgaagcaggagagcgacgaggagtcccgccctcaaaacgcgaattatcctcggagcattttgaccagcctgctgctcaatagttcccagtcttccactagcgaagagacagtcttgagaagcgacgctcctgacagcacgggggaccagcctggtcttcaccaagacaactcatctaacggcaagtccgagtggctagaccctagccaaaagagccctctccacgtgggggaaacccggaaagaggatgatccaaacgaagattggtgcgcagtctgtcagaacgggggagagctcctgtgctgtgagaaatgccctaaggtcttccacctgagctgccatgtacctacgctcacgaactttccgagcggagagtggatatgcaccttctgcagggacctgtccaaacccgaagtcgaatacgactgcgatgccccttcacataattctgagaagaagaagacagagggcctggtgaaacttactcccatcgataagcgcaaatgcgagcggttgcttctcttcctgtattgtcacgagatgagcctcgccttccaggatcccgttccacttaccgtgccggactattataagataatcaaaaaccccatggacctgtccactatcaaaaagagactgcaggaggactatagtatgtactccaagccagaagatttcgtggcggatttccgattgatctttcagaattgtgccgagttcaatgagccagattccgaggtcgccaacgcaggaataaagttagagaactatttcgaagagctcctgaagaacctttatccagagaagagatttcctaagcctgagtttcgaaatgaatcggaagacaacaagttcagcgacgatagcgacgacgatttcgtacagcccaggaagaaaagactgaaatccatcgaagagcgacaactgctcaagtag

SEQ ID NO: 188359 - DNA, 2886 bp, Artificial Sequence
  derived and/or modified sequence
atgctacccgcaccaatgctgggcagtgctgaaaccccaccaccagtacccgctcccggttcccccgtctctggaagtagtcctttcgctactcaggtcggcgttatccgctgtccagtgtgttcccaggagtgcgcagagcggcatatcatcgataatttttttgtgaaagatacaactgaagtgcccagctcaacagtggaaaaaagcaaccaggtctgcacatcctgcgaggataatgccgaagctaatggtttctgtgtggagtgcgtcgaatggctttgtaaaacctgcatcagagctcatcagcgggtcaaatttacaaaggaccacaccgtcaggcaaaaggaggaggtaagccccgaagctgtaggagtgacctcgcagcggccagtgttctgcccgttccacaaaaaagaacaactcaagctctactgcgagacatgcgataagttgacatgccgcgattgtcagttgctggagcacaaggagcatagatatcagttcatagaggaggccttccagaaccagaaggttataatagacaccctgattaccaagctgatggagaagacgaaatatatcaagttcacaggcaatcagatccagaatcgcataattgaggttaatcagaaccaaaaacaggtggaacaggacattaaggttgccatattcactcttatggttgagattaacaaaaaaggcaaggctctgttgcatcagctggagtctctagcgaaagaccatagaatgaagctgatgcagcagcaacaggaagtggctgggctctcgaagcaactcgagcacgtgatgcacttttccaaatgggctgtgagctcaggctcctccacagccttgctgtatagcaagcgcttaataacctatcgcttacggcacctgctgagggcaaggtgtgacgcctcacctgtgactaataacacaattcagttccattgcgatcccagtttttgggcacagaacatcatcaatctcggaagcctggtcatagaggataaagaatctcagccccagatgccaaaacaaaatccagtggtggagcagaattcgcagcctccctcagggctatcatccaatcagttgtcaaagtttcccacccagatttctcttgcccaattaaggctgcaacacatgcagcaacaggtaatggcccaacgccaacaggtgcagcggaggcccgctccagtaggactgcccaaccccaggatgcaaggcccaattcagcagccatcaattagtcaccagcaaccccctccacgcctgatcaacttccagaaccatagcccaaaaccgaacggacctgttcttccaccccacccccaacaactacgctaccctcccaatcagaatatccccagacaggcaattaagcctaaccccctgcaaatggcgttcttggcacaacaggctattaagcagtggcagataagcagtgggcaggggactccaagcacaaccaactcaacttcttccacaccgagctctcctacaattacaagcgcagccggttatgatggcaaagcgtttgggtccccaatgatcgatctgtccagtcccgtagggggaagctataacctccccagcttaccggacatcgattgtagtagcaccatcatgctggacaatatcgttcgtaaggataccaatatcgatcatggccaacctagaccccctagcaacaggacggttcagtccccaaatagcagtgtgccatcccccggactcgcaggcccagtgactatgacgtcggtccacccccctatcaggtccccaagcgcctcatccgtcggcagcagagggtcctcaggctcaagttcgaagccggctggtgccgactccactcataaagttcccgtggtaatgctggaacccattaggatcaagcaggaaaatagcgggcctccagaaaactatgattttccggtggttatcgttaaacaagagagtgacgaagaaagcaggcctcagaacgccaattatcctcgttctattctgactagcctgctgctaaattcaagccagtctagcacgagtgaggaaacagtgctccgctcagatgcgcctgattcgaccggcgatcagcctggcctccaccaggataatagcagcaacgggaaaagtgagtggctcgatccaagccagaaatctcccctccacgtcggagaaactcggaaggaggatgaccctaatgaggattggtgcgccgtgtgccagaacggtggagagctgctatgttgcgagaaatgcccaaaggtttttcacctcagttgccatgtacctacacttacgaatttcccttccggggagtggatttgcacattttgtcgggatttaagtaagcctgaagtggagtacgactgcgatgccccatcacataattccgaaaagaagaagaccgaggggctggtaaagctcactcccatcgacaaaagaaaatgcgaaagacttctgctatttctgtactgtcatgaaatgtcattggccttccaggaccctgtgcccctcactgtgcctgattattataagataataaaaaatccaatggatctgtcgacaattaagaaacgcctccaggaggactattcgatgtatagtaagcctgaggactttgttgcagatttccgcctcatctttcaaaactgcgctgagttcaacgagccagactccgaagtggcaaatgccggaatcaaactggaaaattacttcgaggagttgcttaaaaacctgtatcctgagaagaggttccccaaacctgagttccgtaacgagtccgaggacaacaaatttagtgacgattctgatgatgactttgtgcagcccaggaaaaaaagactcaaaagtattgaggagcgccaattgctcaagtag

SEQ ID NO: 188360 - DNA, 8410 bp, Artificial Sequence
  derived and/or modified sequence
gacagataccctccttccggccgcgccactcgggaggcggatcccgtgggcctgaggaggcttcccccgcccggtttgctttccctccctcgctggcgctgccgcgagtccaccgagcggcctctgaggagcagccgcaggaggaggaggaggtcgtcgggggcggcgggcggagaccgcgctctcgcttccccggcggcggcaagggcaggacaatggaggtggcggtggagaaggcggtggcggcggcggcagcggcctcggctgcggcctccggggggccctcggcggcgccgagcggggagaacgaggccgagagtcggcagggcccggactcggagcgcggcggcgaggcggcccggctcaacctgttggacacttgcgccgtgtgccaccagaacatccagagccgggcgcccaagctgctgccctgcctgcactctttctgccagcgctgcctgcccgcgccccagcgctacctcatgctgcccgcgcccatgctgggctcggccgagaccccgccacccgtccctgcccccggctcgccggtcagcggctcgtcgccgttcgccacccaagttggagtcattcgttgcccagtttgcagccaagaatgtgcagagagacacatcatagataacttttttgtgaaggacactactgaggttcccagcagtacagtagaaaagtcaaatcaggtatgtacaagctgtgaggacaacgcagaagccaatgggttttgtgtagagtgtgttgaatggctctgcaagacgtgtatcagagctcatcagagggtaaagttcacaaaagaccacactgtcagacagaaagaggaagtatctccagaggcagttggtgtcaccagccagcgaccagtgttttgtccttttcataaaaaggagcagctgaagctgtactgtgagacatgtgacaaactgacatgtcgagactgtcagttgttagaacataaagagcatagataccaatttatagaagaagcttttcagaatcagaaagtgatcatagatacactaatcaccaaactgatggaaaaaacaaaatacataaaattcacaggaaatcagatccaaaacagaattattgaagtaaatcaaaatcaaaagcaggtggaacaggatattaaagttgctatatttacactgatggtagaaataaataaaaaaggaaaagctctactgcatcagttagagagccttgcaaaggaccatcgcatgaaacttatgcaacaacaacaggaagtggctggactctctaaacaattggagcatgtcatgcatttttctaaatgggcagtttccagtggcagcagtacagcattactttatagcaaacgactgattacataccggttacggcacctccttcgtgcaaggtgtgatgcatccccagtgaccaacaacaccatccaatttcactgtgatcctagtttctgggctcaaaatatcatcaacttaggttctttagtaatcgaggataaagagagccagccacaaatgcctaagcagaatcctgtcgtggaacagaattcacagccaccaagtggtttatcatcaaaccagttatccaagttcccaacacagatcagcctagctcaattacggctccagcatatgcagcaacaggtaatggctcagaggcaacaggtgcaacggaggccagcacctgtgggtttaccaaaccctagaatgcaggggcccatccagcaaccttccatctctcatcagcaaccgcctccacgtttgataaactttcagaatcacagccccaaacccaatggaccagttcttcctcctcatcctcaacaactgagatatccaccaaaccagaacataccacgacaagcaataaagccaaaccccctacagatggctttcttggctcaacaagccataaaacagtggcagatcagcagtggacagggaaccccatcaactaccaacagcacatcctctactccttccagccccacgattactagtgcagcaggatatgatggaaaggcttttggttcacctatgatcgatttgagctcaccagtgggagggtcttataatcttccctctcttccggatattgactgttcaagtactattatgctggacaatattgtgaggaaagatactaatatagatcatggccagccaagaccaccctcaaacagaacggtccagtcaccaaattcatcagtgccatctccaggccttgcaggacctgttactatgactagtgtacaccccccaatacgttcacctagtgcctccagcgttggaagccgaggaagctctggctcttccagcaaaccagcaggagctgactctacacacaaagtcccagtggtcatgctggagccaattcgaataaaacaagaaaacagtggaccaccggaaaattatgatttccctgttgttatagtgaagcaagaatcagatgaagaatctaggcctcaaaatgccaattatccaagaagcatactcacctccctgctcttaaatagcagtcagagctctacttctgaggagactgtgctaagatcagatgcccctgatagtacaggagatcaacctggacttcaccaggacaattcctcaaatggaaagtctgaatggttggatccttcccagaagtcacctcttcatgttggagagacaaggaaagaggatgaccccaatgaggactggtgtgcagtttgtcaaaacggaggggaactcctctgctgtgaaaagtgccccaaagtattccatctttcttgtcatgtgcccacattgacaaattttccaagtggagagtggatttgcactttctgccgagacttatctaaaccagaagttgaatatgattgtgatgctcccagtcacaactcagaaaaaaagaaaactgaaggccttgttaagttaacacctatagataaaaggaagtgtgagcgcctacttttatttctttactgccatgaaatgagcctggcttttcaagaccctgttcctctaactgtgcctgattattacaaaataattaaaaatccaatggatttgtcaaccatcaagaaaagactacaagaagattattccatgtactcaaaacctgaagattttgtagctgattttagattgatctttcaaaactgtgctgaattcaatgagcctgattcagaagtagccaatgctggtataaaacttgaaaattattttgaagaacttctaaagaacctctatccagaaaaaaggtttcccaaaccagaattcaggaatgaatcagaagataataaatttagtgatgattcagatgatgactttgtacagccccggaagaaacgcctcaaaagcattgaagaacgccagttgcttaaataatatgcagcaccactagcttgtgctggtttttagatttttttgttttcaaaaaaacatttgtcagtaatttaacatcactacaaaaagaagagtttgtgactattctcatctctgttttggacgtttactagactttgatttccttaatagcccatttctgttaacctcttatcactaagaaagaaaggaaagaaggagatgaatagaagaaagaaaatggaaagaaggaaaaaaggaggatagaaaaaggatggaagaaagaagcattgaaaacaaagacattcttcccacttcttggatttttaaaccacagtctggagtgatagctactgtagaaaggaaatagactttgtatgaactctttaagttgaaaagtaaaaaatatatgtggtttggatgtgtgctttaattcagctttagaaattaataccactacccgtgaattatatggcctgacaatatgaattaggtgtactgtactgaagaacagtactccacaaacatgggtggtaacaagagttccatcccaggaggccaaacggtgcaacagaagggtaggttagatgctattaagaaggcacttaatagtacatcatgtaagatggcaactgtattaaagaaaaatccggaaaacaaatgtttgatttttgtttttgtttttatcttgtctgtagaggtattttggtatagcaggttttcaaggccattttttatacatttctagatctagattttcaacttcttccactgagggaagtatatacatttgggtttgctgtgtgtctatgtgaggtttaattgtacaggtgatccttttacaacaagcctcattgtttgcagtatagcttttagtggaactacccaaaatataaatacagcagcgtgcactgtatttgatgtgagggttcttcatcatataccctactgggcattaaatataagttcctctgaaagggactcgtttttgtggttttcatctgtctataatttggaatgaaaatgtgttgtaggattttgggagcaggcagctggggggaattaatagtgattttttttttttcctgaagcatctatctcatgtttttcttttgagagtcagaacatcaaacttaatctttgatctgacttctgattttattcttctgattgattgatagaggtacaaaagacttatcttctgaggacaagcatattcttaatgtgccagacctacccggttcagctgatatagatagatagatagatagaagaaaattgctgtgccatacattaatccagcatttgacacaatatctaaatggtttgccgaagttaatctgtatttataaaacattaactggagtaaatttttctccttaggatgatagaataaaaagagctcacttgaaagaaggctattatttgcattatatcacctgccataaatttaacatagaagacttggttttatctacatggctttacttcttaaagtggaaaatatcctgtggctaattcattgggttttcaggtactgctaaagataaaatacagggagaaaataacttgttagcaatagatccccattgtttatatatataggtcttgttcataatatgtcaattatgtattgttaaaaagtcctactcacttttcaaatatgtgttacatggtaatgtttgtcattgttgttttaaagttgcatttgacatttgttctccaaagagtgtttgaacagattttgataacagtgcatacaccttttgtctttttttgctccagcattttatttttagcacagcagctgtggagcttttgctgataattttattgttggtatcttagaatactgttcgtctgacagtttattcttccatacttgtctcccaagttaaaacagagcaaaacagataaattattttgagaatcatcacaaaagggagttagaacttgtgagactaaaactataatttcctaaatgtgactaatgaaccccaaactgtcactattacattcagtgccatatttatctttcaaaacagtatttgtttcaccctaaccatctttggctgaatgaaaggcagttgagaaccatcttttggtcatacataatataattatattaaaagtaaagatcggggctgggcgcagtggctcacacctgcaatcccaccagcactttgggaggccaaggtgggcggatcacaaagtcaagagttcgagatcagcctggccaacattgtgaaaccccgcctctacaaaaaatacaaaaattagccggacatggtggcgtgcaactgtaatcccaactactcaggaggctgagacaggagaatcacttgaacgcaggaggcagaagttgcagtgagccaagatctcaccattgcactccagcctgagtgacagagactcagtctcaaaaacaaaaagtaaaggtcttgggtttctctctgtaaatagcctttgtgtaatggtctttagattaatatcctttgactttattaataagtacctgtgtgcccaggtggatctcagctaagtcatccttaaattctgttcaaatagaaataaaccataaaatgagcctaactataacccacactcacttatcaagcattcccccaaaagttcagtgcgattcaggtaaccttgacctaaacttgtacactccggtgtacatctttgaccataaactctgggagatttccctctggatttgggatcaggagcccagtagggccccattgctgaatgtttatcacacttctggctagggcttatggatgagcagaccacgtaggagctaggatttactcagttccacctcactgacagcttttctaggtgccaagcaactgacttttcctgtgtaaggaagcccaagtacttgaccagtgatatatatggccatggcaaaagtataaatggatggatgtagaccatattcaacgcagaatacattttagatcggtatctggcattgtaatcattttgtcttttgaattaacatgccctgcttgtcttttctgaatggaagggtaggaaagtggaaggtactaaaaaggaaaatgtagttttagtttcttttctaagctaaagaactggctttactactgctatattttactaccacatagtagtgtagatgtagtataacttgcttaggaatgctttcaaaaaggttacctccatagtcaaaaaaagggggagtatacagctgattgttgcatttatgaaactgcatttcaatatgctatgctgttactgtgcttagacacttccttacgtttgagttccaaggagagagagtgagaagaggaactccttttgctgagctctggtccaaattaatgtgaatccccaaagtaaattgctgcatatgaacaacaggttttaggtttaaattgaagatacattcattttatatgtatttgttgtgaatgagagaaattgagtgatctgattggccattaaaattatggtgaatgggtcgggcgcagtggctcacgcctgtaatcccagcactttgggaggccgaggtgggtagatacctgaggtcaggagtttgagaccagcctgaccaacatggtgaaaccccatctctactaaaaataccaaaatcaccagggtgtggtggcccatgcctgtaatcctagctactcgggaggctgaggcaggagaatcggcttgaacccaggaggcagaggttgcagtgagctgagatcgcaccactgtagtccagcctgggtgtcagagcaagactctgtcacaaaaagaaaaattatggggaatggccgggcgcggtggctcacacctgtaatcccagcactttgggaggccgaggtgggtggatcacctgaagtcaggagctcaagaccagcctggccaacatggtgaaaccccacctcaacagaatatacaaaaaaattagctgggtgtggtggcgggtgcctgtaatctcagctactttgggatgctgaggcaggagaatagcttgaacccaggaggtggaggttgcagtgagtcgagattgcaccattgcactccagcctgggcaacaagagcaaaactctgtctcaaaaaaaaaaaaaaatggtgaccatgcgttcaaccatataatttcttactgaaattgagctcctccttttgaataaccatgtacatatttttaaaagtattttatagccctatgtaaattaatagttgatgtctttttataaatgtttattgcatattcatcttgaatgtgaatttactgttgtaattcacatactggtgtcatgtttctgagtgagaataatgctagtcagtcagatcacagatttttctccatgaaggttttacttattgagagggacatctgaggcagtagtcttcgtctttaatttttgggggcagattggtgctttggttttaataaaaactaactttgatggatttttactgtcaatattttaccacaaggattttttaatagaaaaattactgaatgttacttcagcagagttctatctactttgagtctccattactactactgttgttcccctagctgtaacattgatccatataggggcaagctactagtccataaatagctgtaataggaaaacagttttttaaaattctaacacgtgtatttcaccagccttaaaagatttaaaaaaaaatctgacaggaaggaaagcgggtggtaagtatcttggattattctgcctcataccagccactcccaaagtaggaggaccaaagatgccatgaagacttctagttgtctggaagttatttggggaaggggggaaagacacagagtggggacctttggaagtcattttaaaaatttagctatgttaattccacttgtaaagtttgaaaggttttgattcttgtaatttctgagaattactatgttttaaatttactattggatatttaacagatctttcatggggccaacctatttgcttccttaattttcaaattaagtcctaatttgagtcctaaaaaaatctttccttgttagttgcaagttaaacatttaataaaattattttcccacgttt

SEQ ID NO: 188361 - DNA, 3417 bp, Artificial Sequence
  derived and/or modified sequence
actcgggaggcggatcccgtgggcctgaggaggcttcccccgcccggtttgctttccctccctcgctggcgctgccgcgagtccaccgagcggcctctgaggagcagccgcaggaggaggaggaggtcgtcgggggcggcgggcggagaccgcgctctcgcttccccggcggcggcaagggcaggacaatggaggtggcggtggagaaggcggtggcggcggcgaggcggcccggctcaacctgttggacacttgcgccgtgtgccaccagaacatccagagccgggcgcccaagctgctgccctgcctgcactctttctgccagcgctgcctgcccgcgccccagcgctacctcatgctgcccgcgcccatgctgggctcggccgagaccccgccacccgtccctgcccccggctcgccggtcagcggctcgtcgccgttcgccacccaagttggagtcattcgttgcccagtttgcagccaagaatgtgcagagagacacatcatagataacttttttgtgaaggacactactgaggttcccagcagtacagtagaaaagtcaaatcaggtatgtacaagctgtgaggacaacgcagaagccaatgggttttgtgtagagtgtgttgaatggctctgcaagacgtgtatcagagctcatcagagggtaaagttcacaaaagaccacactgtcagacagaaagaggaagtatctccagaggcagttggtgtcaccagccagcgaccagtgttttgtccttttcataaaaaggagcagctgaagctgtactgtgagacatgtgacaaactgacatgtcgagactgtcagttgttagaacataaagagcatagataccaatttatagaagaagcttttcagaatcagaaagtgatcatagatacactaatcaccaaactgatggaaaaaacaaaatacataaaattcacaggaaatcagatccaaaacagaattattgaagtaaatcaaaatcaaaagcaggtggaacaggatattaaagttgctatatttacactgatggtagaaataaataaaaaaggaaaagctctactgcatcagttagagagccttgcaaaggaccatcgcatgaaacttatgcaacaacaacaggaagtggctggactctctaaacaattggagcatgtcatgcatttttctaaatgggcagtttccagtggcagcagtacagcattactttatagcaaacgactgattacataccggttacggcacctccttcgtgcaaggtgtgatgcatccccagtgaccaacaacaccatccaatttcactgtgatcctagtttctgggctcaaaatatcatcaacttaggttctttagtaatcgaggataaagagagccagccacaaatgcctaagcagaatcctgtcgtggaacagaattcacagccaccaagtggtttatcatcaaaccagttatccaagttcccaacacagatcagcctagctcaattacggctccagcatatgcagcaacaggtaatggctcagaggcaacaggtgcaacggaggccagcacctgtgggtttaccaaaccctagaatgcaggggcccatccagcaaccttccatctctcatcagcaaccgcctccacgtttgataaactttcagaatcacagccccaaacccaatggaccagttcttcctcctcatcctcaacaactgagatatccaccaaaccagaacataccacgacaagcaataaagccaaaccccctacagatggctttcttggctcaacaagccataaaacagtggcagatcagcagtggacagggaaccccatcaactaccaacagcacatcctctactccttccagccccacgattactagtgcagcaggatatgatggaaaggcttttggttcacctatgatcgatttgagctcaccagtgggagggtcttataatcttccctctcttccggatattgactgttcaagtactattatgctggacaatattgtgaggaaagatactaatatagatcatggccagccaagaccaccctcaaacagaacggtccagtcaccaaattcatcagtgccatctccaggccttgcaggacctgttactatgactagtgtacaccccccaatacgttcacctagtgcctccagcgttggaagccgaggaagctctggctcttccagcaaaccagcaggagctgactctacacacaaagtcccagtggtcatgctggagccaattcgaataaaacaagaaaacagtggaccaccggaaaattatgatttccctgttgttatagtgaagcaagaatcagatgaagaatctaggcctcaaaatgccaattatccaagaagcatactcacctccctgctcttaaatagcagtcagagctctacttctgaggagactgtgctaagatcagatgcccctgatagtacaggagatcaacctggacttcaccaggacaattcctcaaatggaaagtctgaatggttggatccttcccagaagtcacctcttcatgttggagagacaaggaaagaggatgaccccaatgaggactggtgtgcagtttgtcaaaacggaggggaactcctctgctgtgaaaagtgccccaaagtattccatctttcttgtcatgtgcccacattgacaaattttccaagtggagagtggatttgcactttctgccgagacttatctaaaccagaagttgaatatgattgtgatgctcccagtcacaactcagaaaaaaagaaaactgaaggccttgttaagttaacacctatagataaaaggaagtgtgagcgcctacttttatttctttactgccatgaaatgagcctggcttttcaagaccctgttcctctaactgtgcctgattattacaaaataattaaaaatccaatggatttgtcaaccatcaagaaaagactacaagaagattattccatgtactcaaaacctgaagattttgtagctgattttagattgatctttcaaaactgtgctgaattcaatgagcctgattcagaagtagccaatgctggtataaaacttgaaaattattttgaagaacttctaaagaacctctatccagaaaaaaggtttcccaaaccagaattcaggaatgaatcagaagataataaatttagtgatgattcagatgatgactttgtacagccccggaagaaacgcctcaaaagcattgaagaacgccagttgcttaaataatatgcagcaccactagcttgtgctggtttttagatttttttgttttcaaaaaaacatttgtcagtaatttaacatcactacaaaaagaagagtttgtgactattctcatctctgttttggacgtttactagactttgatttccttaatagcccatttctgttaacctcttatcact

SEQ ID NO: 188362 - protein, 519 aa, Artificial Sequence
  derived and/or modified sequence
MFLLPLPAAGRVVVRRLAVRRFGSRSLSTADMTKGLVLGIYSKEKEDDVPQFTSAGENFDKLLAGKLRETLNISGPPLKAGKTRTFYGLHQDFPSVVLVGLGKKAAGIDEQENWHEGKENIRAAVAAGCRQIQDLELSSVEVDPCGDAQAAAEGAVLGLYEYDDLKQKKKMAVSAKLYGSGDQEAWQKGVLFASGQNLARQLMETPANEMTPTRFAEIIEKNLKSASSKTEVHIRPKSWIEEQAMGSFLSVAKGSDEPPVFLEIHYKGSPNANEPPLVFVGKGITFDSGGISIKASANMDLMRADMGGAATICSAIVSAAKLNLPINIIGLAPLCENMPSGKANKPGDVVRAKNGKTIQVDNTDAEGRLILADALCYAHTFNPKVILNAATLTGAMDVALGSGATGVFTNSSWLWNKLFEASIETGDRVWRMPLFEHYTRQVVDCQLADVNNIGKYRSAGACTAAAFLKEFVTHPKWAHLDIAGVMTNKDEVPYLRKGMTGRPTRTLIEFLLRFSQDNA

SEQ ID NO: 188363 - DNA, 1560 bp, Artificial Sequence
  derived and/or modified sequence
atgttcctgctgcccctgcccgccgccggcagagtggtggtgagaagactggccgtgagaagattcggcagcagaagcctgagcaccgccgacatgaccaagggcctggtgctgggcatctacagcaaggagaaggaggacgacgtgccccagttcaccagcgccggcgagaacttcgacaagctgctggccggcaagctgagagagaccctgaacatcagcggcccccccctgaaggccggcaagaccagaaccttctacggcctgcaccaggacttccccagcgtggtgctggtgggcctgggcaagaaggccgccggcatcgacgagcaggagaactggcacgagggcaaggagaacatcagagccgccgtggccgccggctgcagacagatccaggacctggagctgagcagcgtggaggtggacccctgcggcgacgcccaggccgccgccgagggcgccgtgctgggcctgtacgagtacgacgacctgaagcagaagaagaagatggccgtgagcgccaagctgtacggcagcggcgaccaggaggcctggcagaagggcgtgctgttcgccagcggccagaacctggccagacagctgatggagacccccgccaacgagatgacccccaccagattcgccgagatcatcgagaagaacctgaagagcgccagcagcaagaccgaggtgcacatcagacccaagagctggatcgaggagcaggccatgggcagcttcctgagcgtggccaagggcagcgacgagccccccgtgttcctggagatccactacaagggcagccccaacgccaacgagccccccctggtgttcgtgggcaagggcatcaccttcgacagcggcggcatcagcatcaaggccagcgccaacatggacctgatgagagccgacatgggcggcgccgccaccatctgcagcgccatcgtgagcgccgccaagctgaacctgcccatcaacatcatcggcctggcccccctgtgcgagaacatgcccagcggcaaggccaacaagcccggcgacgtggtgagagccaagaacggcaagaccatccaggtggacaacaccgacgccgagggcagactgatcctggccgacgccctgtgctacgcccacaccttcaaccccaaggtgatcctgaacgccgccaccctgaccggcgccatggacgtggccctgggcagcggcgccaccggcgtgttcaccaacagcagctggctgtggaacaagctgttcgaggccagcatcgagaccggcgacagagtgtggagaatgcccctgttcgagcactacaccagacaggtggtggactgccagctggccgacgtgaacaacatcggcaagtacagaagcgccggcgcctgcaccgccgccgccttcctgaaggagttcgtgacccaccccaagtgggcccacctggacatcgccggcgtgatgaccaacaaggacgaggtgccctacctgagaaagggcatgaccggcagacccaccagaaccctgatcgagttcctgctgagattcagccaggacaacgcctag

SEQ ID NO: 188364 - DNA, 1560 bp, Artificial Sequence
  derived and/or modified sequence
atgttcttgcttcccctcccagctgccgggagagtcgtggtgcggcgcctggcagtccgccgcttcggtagcagatccctcagtacagctgatatgacaaagggactggtactcggtatctactcaaaagaaaaggaggacgatgtcccccagtttacctctgccggcgagaacttcgacaaactgctcgccggcaagctacgtgagacgttgaacattagtgggccaccactgaaggccggaaaaacccgcacattctatggcttgcaccaggatttcccctctgtcgtgcttgtcgggctgggaaaaaaggctgctgggatagatgagcaggagaactggcacgagggaaaagaaaacatcagggccgcggtggccgcagggtgcagacagatccaggatctggagttgtcctcagtggaggtggatccttgcggcgatgctcaggcagccgccgagggcgctgttctcggactctacgaatatgatgatctgaaacagaagaagaaaatggccgtgagcgctaaactgtatggttccggtgatcaggaggcatggcaaaagggggtcctgttcgcttctggtcagaatctggccagacaactgatggagaccccagctaacgagatgaccccaacgcgcttcgcggagatcattgaaaagaatcttaagagcgcctcctcaaagaccgaagtgcacatacgacctaagtcatggatcgaggagcaggccatggggtcatttctgagcgttgccaagggatctgacgagcctcctgtcttccttgaaattcactataaaggtagcccgaatgctaacgagccccctctcgtcttcgtcggcaagggtatcactttcgattccggcggtatcagcatcaaggcttcggcaaacatggacttgatgcgggccgatatggggggcgctgccaccatctgctctgcaatcgtcagcgccgccaagttaaatctgcctatcaacataataggcctggcccccctgtgcgagaacatgccaagtgggaaagccaataagcccggtgacgtggtgcgggccaaaaatggtaagactatccaggttgacaacaccgacgccgaaggtaggctcatactggcagacgccctgtgctatgctcacactttcaatcccaaagtaatcctcaacgctgcaactctgaccggtgcaatggacgtggccctggggtccggtgcaacgggggtattcacaaacagttcttggctttggaataaactgtttgaggcatccattgaaaccggagatagggtttggcggatgccactgttcgaacattatactagacaggtggtggactgtcagctggcagatgtgaataatatcgggaaataccgctccgccggggcgtgtaccgcagcagccttccttaaagagtttgtgactcatcctaaatgggcacacctcgacatcgctggcgtcatgaccaacaaggatgaggtgccttaccttcgcaaggggatgacagggagaccaactcggacactgatcgagtttttgttacgattttctcaagataatgcttag

SEQ ID NO: 188365 - DNA, 1560 bp, Artificial Sequence
  derived and/or modified sequence
atgttcctgctgcccctgcctgctgctggccgggtggtggtgcggcggctggccgtgcggcgcttcggcagccgcagcctgagcacagctgacatgaccaagggcctggtgctgggcatctacagcaaggagaaggaggatgatgtgccccagttcaccagcgctggagaaaattttgacaagctgctggccggcaagctgcgggagaccctgaacatcagcggcccccccctgaaggccggcaagaccaggaccttctacggcctgcaccaggacttccccagcgtggtgctggtgggcctgggcaagaaggccgccggcattgatgagcaggagaactggcatgagggcaaggagaacatccgggctgctgtggccgccggctgccggcagatccaggacctggagctgagctctgtggaggtggacccctgtggagatgcccaggccgctgctgagggcgctgtgctgggcctgtatgaatatgatgacctgaagcagaagaagaagatggctgtgtctgccaagctgtatggcagcggggaccaggaggcctggcagaagggcgtgctgtttgccagcggccagaacctggcccggcagctgatggagaccccagccaatgagatgacccccaccaggtttgctgagatcatcgagaagaacctgaagagcgccagcagcaagacagaggtgcacatccggcccaagtcctggattgaggagcaggccatgggcagcttcctgtctgtggccaagggcagtgatgagccccctgtgttcctggagatccactacaagggcagccccaatgccaatgaaccacccctggtgtttgtgggcaagggcatcacctttgacagcggcggcatcagcatcaaggccagcgccaacatggacctgatgagagctgacatgggcggggccgccaccatctgcagcgccatcgtgtctgctgccaagctgaacctgcccatcaacatcatcggcctggcccccctgtgtgagaacatgcccagcggcaaggccaacaagccaggagatgtggtgcgggccaagaatggcaagaccatccaggtggacaacacagatgctgagggccgcctcatcctggctgatgccctgtgctacgcccacaccttcaaccccaaggtgatcctgaatgctgccaccctgactggagccatggatgtggccctgggcagcggggccactggagtcttcaccaacagctcctggctgtggaacaagctgtttgaggccagcattgaaacaggagacagagtgtggaggatgcccctgtttgagcactacacccggcaggtggtggactgccagctggctgatgtgaacaacatcggcaagtacagatctgctggggcctgcacagctgctgccttcctgaaggagtttgtgacccaccccaagtgggcccacctggacattgctggggtgatgaccaacaaggatgaggtgccctacctgaggaagggcatgacaggccggcccaccaggaccctcatcgagttcctgctgcgcttcagccaggacaatgcctag

SEQ ID NO: 188366 - DNA, 1560 bp, Artificial Sequence
  derived and/or modified sequence
atgttcctgctgcccctgcccgccgccggccgggtggtggtgcggagactggccgtgcgacgctttggatctagatcactctcaactgctgatatgactaaggggcttgtgctcggaatttactccaaggagaaagaggacgatgttcctcagttcacaagcgccggcgaaaacttcgataagcttttagcgggtaaactccgggaaactctgaatataagtggaccgccattgaaggccggcaaaaccagaacgttctacggtctccatcaggatttcccttctgtggtccttgtcgggcttggcaaaaaagcagccggcatcgacgaacaggagaactggcacgaaggtaaagagaacatcagagccgcagtggccgctgggtgtcggcagatccaggacctggaactttcatcagtggaagtggatccctgcggggatgcacaagcggcagctgagggcgcggtgcttggcctctacgagtacgatgacttaaagcagaaaaaaaagatggccgtgtctgctaaactatatggaagcggagatcaggaagcctggcagaagggcgtgctctttgcttcaggacagaacctcgccaggcagttgatggagacccccgctaacgagatgacgcctacccgctttgcggaaataatcgagaagaatttaaaatccgcaagctctaaaaccgaggtacatattcgcccaaagagctggatcgaagagcaggctatgggttccttcttaagcgtggcaaagggatcagacgagccacctgtgttcctcgagatccactacaaagggtcaccgaatgcaaacgaacccccgcttgtcttcgtgggtaagggaataacgtttgactccggtggtatcagcataaaagctagcgccaacatggatctgatgagggcggatatgggaggcgctgctaccatttgctccgccatagtctctgcggcgaagctgaatctgccaattaatatcattggactggctcccctgtgcgaaaacatgcccagcggcaaagcaaacaagcctggcgatgttgttagagctaaaaacgggaagacgatccaggtagacaacaccgacgcagaaggaagactaatattggctgatgctctgtgttatgctcacacttttaaccccaaggtgattctcaacgcggcgaccctgaccggtgcaatggatgtagcactgggttctggcgccacaggcgtcttcactaacagttcctggctgtggaacaaactgttcgaagcctcaatcgagacaggagatcgggtctggagaatgcccctgtttgagcactatacgcgccaggttgtagactgccagttggctgacgttaacaatattgggaaataccggagtgcgggagcgtgcacagccgctgctttcctcaaggagttcgtgacacacccaaaatgggcacacttggacatcgctggggttatgacaaataaagacgaagtgccatatctgcggaaagggatgaccgggcgacccacccgcacattgatcgaatttctgttgcgcttttctcaagacaacgcatag

SEQ ID NO: 188367 - DNA, 1560 bp, Artificial Sequence
  derived and/or modified sequence
atgtttctgttgccacttccagcagccggacgcgtcgtagtgaggcgccttgcagtgcgaagatttggatcccggagtctgtccaccgctgatatgacaaagggcctggtgctcggaatctactcaaaagaaaaggaggacgatgtccctcagttcaccagcgctggagagaactttgacaaacttctggccggtaagctgcgcgagaccttgaatatatctggtcctccactgaaagcaggcaagactcggacattctacggactacatcaggattttccgtccgtcgtgctggtgggccttggcaaaaaagcagctggcatcgatgagcaagagaattggcacgaggggaaagaaaacatccgcgctgctgttgccgcaggatgccgccaaatacaagatctggaattatcttctgtggaggtagatccctgcggcgatgctcaggccgctgccgagggtgcagttttgggcctgtacgagtatgatgatctcaaacaaaaaaaaaagatggccgtgagtgccaagctctatggatccggggatcaggaggcttggcaaaaaggcgtactgtttgccagcggacagaacctggctaggcagcttatggagacgcccgctaacgagatgacacctacaagattcgccgagataattgaaaaaaacctcaaatcggcctcttcaaagactgaggttcacattcggcctaagagttggatcgaggaacaggcaatggggtctttcctctcagtggccaaaggctctgacgagcccccagtgtttctggaaattcattacaagggaagtcctaacgccaatgaaccaccactggtgttcgtggggaaaggcattactttcgactccggaggcattagcattaaagcatccgccaacatggatctgatgagggcggacatgggtggtgctgctactatatgctcagccatcgtgagcgctgctaagctgaacctgcctatcaacataataggtcttgccccactatgcgaaaacatgccttccggaaaggccaacaagccaggggatgtcgtgagagccaagaatggaaagacaattcaggtcgacaacacagacgctgagggaagattgattttagctgacgcactgtgttacgcccatacattcaaccctaaggtaatactcaacgcagccactctgaccggcgctatggacgtagctttgggcagcggtgcgaccggggtcttcacaaattcctcctggctctggaacaagttgtttgaagccagtatcgaaaccggcgacagggtttggcgaatgcccttgttcgaacactacacacgccaggtcgtcgattgtcagttggctgacgttaacaacattggtaaatatagaagtgctggggcttgtaccgcggcagcatttcttaaggagtttgtcacacatcctaagtgggcccatctagatatcgcgggtgtaatgactaacaaggacgaagtgccctacctgcgcaagggtatgactggacggccaacgaggacccttattgaattcctgctgcgcttttcacaggataatgcgtag

SEQ ID NO: 188368 - DNA, 2213 bp, Artificial Sequence
  derived and/or modified sequence
gcgggcgcacacgaatgcgggcgcacacgaatgcgggcgcacacgaatgcgggcgcacccttgagtcccctccacaaccgcggtttgatcccagcggtccagtcggccggtgctgcccatccgtcccgccccctagacgcacgtccgctcgcccggcgcccgagccagtccgcgcgcacgccgtctgcgccccgaaagccccgccccaaggcgcgcccgcccaccgctctccacgtgctcgctggagggcggtgcgaggggccgagccgacaagatgttcttgctgcctcttccggctgcggggcgagtagtcgtccgacgtctggccgtgagacgtttcgggagccggagtctctccaccgcagacatgacgaagggccttgttttaggaatctattccaaagaaaaagaagatgatgtgccacagttcacaagtgcaggagagaattttgataaattgttagctggaaagctgagagagactttgaacatatctggaccacctctgaaggcagggaagactcgaaccttttatggtctgcatcaggacttccccagcgtggtgctagttggcctcggcaaaaaggcagctggaatcgacgaacaggaaaactggcatgaaggcaaagaaaacatcagagctgctgttgcagcggggtgcaggcagattcaagacctggagctctcgtctgtggaggtggatccctgtggagacgctcaggctgctgcggagggagcggtgcttggtctctatgaatacgatgacctaaagcaaaaaaagaagatggctgtgtcggcaaagctctatggaagtggggatcaggaggcctggcagaaaggagtcctgtttgcttctgggcagaacttggcacgccaattgatggagacgccagccaatgagatgacgccaaccagatttgctgaaattattgagaagaatctcaaaagtgctagtagtaaaaccgaggtccatatcagacccaagtcttggattgaggaacaggcaatgggatcattcctcagtgtggccaaaggatctgacgagcccccagtcttcttggaaattcactacaaaggcagccccaatgcaaacgaaccacccctggtgtttgttgggaaaggaattacctttgacagtggtggtatctccatcaaggcttctgcaaatatggacctcatgagggctgacatgggaggagctgcaactatatgctcagccatcgtgtctgctgcaaagcttaatttgcccattaatattataggtctggcccctctttgtgaaaatatgcccagcggcaaggccaacaagccgggggatgttgttagagccaaaaacgggaagaccatccaggttgataacactgatgctgaggggaggctcatactggctgatgcgctctgttacgcacacacgtttaacccgaaggtcatcctcaatgccgccaccttaacaggtgccatggatgtagctttgggatcaggtgccactggggtctttaccaattcatcctggctctggaacaaactcttcgaggccagcattgaaacaggggaccgtgtctggaggatgcctctcttcgaacattatacaagacaggttgtagattgccagcttgctgatgttaacaacattggaaaatacagatctgcaggagcatgtacagctgcagcattcctgaaagaattcgtaactcatcctaagtgggcacatttagacatagcaggcgtgatgaccaacaaagatgaagttccctatctacggaaaggcatgactgggaggcccacaaggactctcattgagttcttacttcgtttcagtcaagacaatgcttagttcagatactcaaaaatgtcttcactctgtcttaaattggacagttgaacttaaaaggtttttgaataaatggatgaaaatcttttaacggagacaaaggatggtatttaaaaatgtagaacacaatgaaatttgtatgccttgatttttttttcatttcacacaaagatttataaaggtaaagttaatatcttacttgataaggatttttaagatactctataaatgattaaaatttttagaacttcctaatcacttttcagagtatatgtttttcattgagaagcaaaattgtaactcagatttgtgatgctaggaacatgagcaaactgaaaattactatgcacttgtcagaaacaataaatgcaacttgttgtgc

SEQ ID NO: 188369 - protein, 2371 aa, Artificial Sequence
  derived and/or modified sequence
MAAPESGPALSPGTAEGEEETILYDLLVNTEWPPETEVQPRGNQKHGASFIITKAIRDRLLFLRQYIWYSPAPFLLPDGLVRLVNKQINWHLVLASNGKLLAAVQDQCVEIRSAKDDFTSIIGKCQVPKDPKPQWRRVAWSYDCTLLAYAESTGTVRVFDLMGSELFVISPASSFIGDLSYAIAGLIFLEYKASAQWSAELLVINYRGELRSYLVSVGTNQSYQESHCFSFSSHYPHGINTAIYHPGHRLLLVGGCETAEVGMSKASSCGLSAWRVLSGSPYYKQVTNGGDGVTAVPKTLGLLRMLSVKFYSRQGQEQDGIFKMSLSPDGMLLAAIHFSGKLSIWAIPSLKQQGEWGQNEQPGYDDLNPDWRLSTEKRKKIKDKESFYPLIDVNWWADSAVTLARCSGALTVSSVKTLKNLLGKSCEWFEPSPQVTATHDGGFLSLECEIKLAPKRSRLETRAGEEDEGEEDSDSDYEISAKARYFGYIKQGLYLVTEMERFAPPRKRPRTITKNYRLVSLRSTTPEELYQRKIESEEYEEALSLAHTYGLDTDLVYQRQWRKSAVNVASIQNYLSKIKKRSWVLHECLERVPENVDAAKELLQYGLKGTDLEALLAIGKGADDGRFTLPGEIDIDSISYEELSPPDEEPAKNKKEKELKKRQELLKLVNFSKLTLEQKELCRCRRKLLTYLDRLATYEEILGVPHASEQRYDAEFFKKFRNQNIVLSARTYAQESNVQALEILFTYHGSDLLPHRLAILSNFPETTSPHEYSVLLPEACFNGDSLMIIPWHEHKHRAKDWCEELACRMVVEPNLQDESEFLYAAQPELLRFRMTQLTVEKVMDWYQTRAEEIEHYARQVDCALSLIRLGMERNIPGLLVLCDNLVTLETLVYEARCDVTLTLKELQQMKDIEKLRLLMNSCSEDKYVTSAYQWMVPFLHRCEKQSPGVANELLKEYLVTLAKGDLKFPLKIFQHSKPDLQQKIIPDQDQLMAIALECIYTCERNDQLCLCYDLLECLPERGYGDKTEATTKLHDMVDQLEQILSVSELLEKHGLEKPISFVKNTQSSSEEARKLMVRLTRHTGRKQPPVSESHWRTLLQDMLTMQQNVYTCLDSDACYEIFTESLLCSSRLENIHLAGQMMHCSACSENPPAGIAHKGKPHYRVSYEKSIDLVLAASREYFNSSTNLTDSCMDLARCCLQLITDRPPAIQEELDLIQAVGCLEEFGVKILPLQVRLCPDRISLIKECISQSPTCYKQSTKLLGLAELLRVAGENPEERRGQVLILLVEQALRFHDYKAASMHCQELMATGYPKSWDVCSQLGQSEGYQDLATRQELMAFALTHCPPSSIELLLAASSSLQTEILYQRVNFQIHHEGGENISASPLTSKAVQEDEVGVPGSNSADLLRWTTATTMKVLSNTTTTTKAVLQAVSDGQWWKKSLTYLRPLQGQKCGGAYQIGTTANEDLEKQGCHPFYESVISNPFVAESEGTYDTYQHVPVESFAEVLLRTGKLAEAKNKGEVFPTTEVLLQLASEALPNDMTLALAYLLALPQVLDANRCFEKQSPSALSLQLAAYYYSLQIYARLAPCFRDKCHPLYRADPKELIKMVTRHVTRHEHEAWPEDLISLTKQLHCYNERLLDFTQAQILQGLRKGVDVQRFTADDQYKRETILGLAETLEESVYSIAISLAQRYSVSRWEVFMTHLEFLFTDSGLSTLEIENRAQDLHLFETLKTDPEAFHQHMVKYIYPTIGGFDHERLQYYFTLLENCGCADLGNCAIKPETHIRLLKKFKVVASGLNYKKLTDENMSPLEALEPVLSSQNILSISKLVPKIPEKDGQMLSPSSLYTIWLQKLFWTGDPHLIKQVPGSSPEWLHAYDVCMKYFDRLHPGDLITVVDAVTFSPKAVTKLSVEARKEMTRKAIKTVKHFIEKPRKRNSEDEAQEAKDSKVTYADTLNHLEKSLAHLETLSHSFILSLKNSEQETLQKYSHLYDLSRSEKEKLHDEAVAICLDGQPLAMIQQLLEVAVGPLDISPKDIVQSAIMKIISALSGGSADLGGPRDPLKVLEGVVAAVHASVDKGEELVSPEDLLEWLRPFCADDAWPVRPRIHVLQILGQSFHLTEEDSKLLVFFRTEAILKASWPQRQVDIADIENEENRYCLFMELLESSHHEAEFQHLVLLLQAWPPMKSEYVITNNPWVRLATVMLTRCTMENKEGLGNEVLKMCRSLYNTKQMLPAEGVKELCLLLLNQSLLLPSLKLLLESRDEHLHEMALEQITAVTTVNDSNCDQELLSLLLDAKLLVKCVSTPFYPRIVDHLLASLQQGRWDAEELGRHLREAGHEAEAGSLLLAVRGTHQAFRTFSTALRAAQHWV

SEQ ID NO: 188370 - DNA, 7116 bp, Artificial Sequence
  derived and/or modified sequence
atggccgcacccgagtcgggtccagccctctctccagggacagccgagggggaggaagagacaattctttatgatttgctggttaacaccgaatggcccccagagactgaggtgcagccaagagggaatcagaagcacggggcttccttcattattacaaaggctatccgcgatcggttgctgtttttgcgccagtatatatggtacagcccggctcccttcctcctgcccgatggtctggtccgcctcgttaacaaacaaattaattggcacctggttctggccagcaatggcaaactgctcgcagccgtccaggaccaatgcgtggagatccgatccgccaaggacgattttacaagtatcattggaaaatgtcaggttcccaaagatccaaagccacaatggcgccgtgtagcctggagttatgactgtacactgcttgcctatgccgagtctacgggaaccgtgcgggtatttgatctgatgggttcagagctgttcgtaatttccccagcatcgtcattcattggcgacttaagctacgcgatcgccggactgatattcttggagtataaggcaagcgcccaatggagcgctgagctactggtgattaattataggggggaactcagatcctatcttgtatcagtgggaacgaatcagagctatcaagagtcccactgcttctcattctctagtcattacccacatggcatcaacaccgcgatctaccacccgggccatcggctgctgctcgtaggagggtgcgaaaccgctgaggtgggcatgtcgaaagcatccagttgtgggttgtccgcttggcgagtgctaagcgggtcaccgtattataagcaggttaccaacggtggggacggtgtgactgccgtgcccaaaactttgggtctactgaggatgctaagcgtcaagttttattctcgccagggacaagagcaggatggtatattcaaaatgtctctttccccagatggaatgctgttggctgcaattcatttcagcgggaaactgagtatttgggctatcccctctctgaaacagcagggggagtggggccagaatgagcaacccgggtacgacgacctgaacccagattggcggttaagcaccgagaagaggaaaaagattaaggataaggagtcattttaccccttgatcgacgtgaactggtgggccgacagcgcggtgacactcgcaaggtgctcaggggccctgaccgtgagttctgttaaaacattaaaaaacctcctggggaagagctgtgagtggttcgaacccagccctcaagtgacagcaacgcacgatggcgggttcctgtcactggagtgcgagatcaaactcgcgcctaaaaggagcaggcttgagaccagagcgggtgaagaggatgaaggagaggaggattctgattccgactacgaaatcagcgccaaggccaggtattttggttatatcaagcaaggcctgtacctggtcacggaaatggagaggtttgctccgccccgtaagcggccgaggacaatcacaaaaaattacaggctcgtgtccctccgtagcaccactcctgaggaattgtaccaaagaaagatagaaagcgaggagtatgaagaggctctaagcctggcccatacatacgggttggataccgatctcgtgtatcagagacaatggagaaagagcgctgttaatgtggctagcatacagaattacttgagtaaaatcaagaagagaagctgggtgctgcacgaatgcttagagcgggtgcctgaaaatgtcgatgcagcaaaggagctgcttcagtacggactgaaagggaccgacctcgaagcacttctcgctataggcaaaggggcggatgatggtagattcactctgcccggcgagatagatatcgacagtatctcttatgaagaactgagtccccctgacgaggaacccgcaaagaacaaaaaggagaaagaactgaaaaaaagacaggagctgctcaagctggtgaacttttcaaaactcacgctggaacagaaagaactttgccgctgtcgccggaagctcctgacatacctggataggcttgctacatatgaggaaatactgggcgtcccacacgctagcgagcagcggtacgacgccgagtttttcaagaaattcaggaaccagaatatcgtgctaagtgcaaggacctatgctcaggagagtaacgtgcaagccctcgagatattgtttacctaccatgggtccgacctgctcccacatcgtctggctattctctccaactttcctgagacaacttctccccacgaatattcggtactgctgccagaggcctgttttaacggcgactctctgatgatcatcccatggcatgagcacaagcatcgggcaaaagactggtgcgaggaactagcgtgccggatggtggtggagcctaatctccaagatgagagcgagttcctctacgctgcccagcctgaactgcttagattcaggatgacacagctcactgttgagaaggtgatggattggtaccagacgcgcgccgaggagattgagcattacgccaggcaggtcgactgcgccctttctcttatacgcctcggcatggagaggaacatcccaggcttgctggtgttatgtgataacctggtcaccctggaaactctggtctacgaggcacgttgtgacgtgacccttacattgaaggagctccagcagatgaaggacattgagaaactgcggcttctcatgaatagctgttcagaggacaagtacgtgacgtccgcataccagtggatggtgccttttcttcataggtgcgagaagcagtctcccggtgtagctaacgaacttctgaaggagtatttagtgactttggctaaaggcgatcttaagtttcctctcaagatatttcagcatagcaagccagacctgcaacagaaaatcattcccgatcaggaccagctaatggcaatcgcgctggagtgcatttacacctgtgaaagaaacgatcagttgtgcctgtgttacgatctgctggaatgtcttccggaacgggggtatggagacaagacggaggcaacaactaaacttcacgacatggtggaccagcttgagcagatcctgtctgtttccgaattactcgaaaaacacggcctggagaaacccatatctttcgttaagaatacacagtcatcctccgaggaagccaggaagttgatggttagactgaccagacacactggaaggaaacagcctcccgtcagtgagagccattggcgcacgctcctccaggatatgctgactatgcagcagaatgtctacacttgcctggacagtgacgcctgttacgaaatattcacagaatcactgctatgtagtagccggctcgagaatatccacctggccggccaaatgatgcattgtagcgcttgctccgagaatcctccagccggtattgcccacaagggcaagccacactaccgtgtcagctatgaaaagtcaattgacctggtcctggcagcaagcagagaatatttcaactctagcactaatctgaccgattcatgcatggacctagcacgttgctgtctgcaactgatcaccgaccgaccaccagcaatacaggaggaacttgatctgatccaggccgtgggctgtcttgaggaattcggggtgaagattttgccattgcaggtaagactctgccctgatagaatctcgctgattaaagaatgcatctcccagagtcctacatgctataaacaatccaccaaattgctgggattagctgaactgctgcgggtagcgggcgaaaatcctgaggagaggaggggacaggtcctgattctgctggtcgaacaggccttgcgctttcatgactacaaagctgccagcatgcactgtcaggagttgatggccacgggctacccaaagagctgggacgtgtgttctcaactcgggcagagcgagggatatcaggatttggctacgcgacaagagttgatggctttcgccttgacccactgtccaccaagtagcattgaactgttgctggctgctagcagctcactccagacagaaatcctttaccaacgggtgaattttcagatacaccacgaaggcggggagaacataagtgccagccccttaacttccaaggcagttcaggaggacgaggtcggtgtgccaggaagcaacagtgccgatctcctccgttggaccactgctaccacaatgaaagtattatccaataccacaaccacaacaaaagccgttcttcaagccgtgagcgatggtcagtggtggaaaaagtcgttgacttacctgcgtcctctccaaggacagaaatgcggtggcgcgtatcagatcggcacgacagcaaacgaggacctggaaaagcagggctgtcaccccttctacgaaagcgtgatctcaaacccattcgtggccgagagcgaggggacttacgatacttatcagcacgtgcccgtggaaagttttgcagaggtgcttttgaggaccgggaagctcgctgaagccaagaataaaggcgaggtattcccaactacggaagtcctgctccagctggcctctgaggctcttccaaatgacatgactttagccctcgcctatctgctggccctcccacaagttctcgatgctaatcgatgttttgaaaagcagagccccagcgcactgtcactgcaactggccgcttattattactctctgcaaatttatgcacgtctcgccccatgctttcgcgacaagtgccacccgctttaccgcgccgatccaaaggagctaattaaaatggtgacacggcatgtcacaagacatgagcatgaagcttggccagaggacctgatctctctaacaaaacagttacattgttacaatgaacggcttctagatttcactcaggcgcagatacttcagggtctgaggaaaggcgtggacgtgcagagattcactgccgacgaccagtataaaagagaaaccattttgggactggcagagaccctggaagagtcggtttacagcatcgcgattagcctagcacagaggtactcagtgtctcgctgggaggtcttcatgacccacttggaattcttgtttacggacagcggtctcagtaccctggagatcgaaaatagagcccaggatctgcacttgttcgagacactcaagactgaccctgaggcattccatcagcatatggtcaaatacatctaccctactattggtgggttcgaccatgaacgcttacagtactactttacactcctcgagaactgcgggtgtgccgatctgggtaactgcgctattaaaccggagacccatataagactccttaagaaatttaaggtggtcgccagcggattgaattacaaaaagctaactgacgaaaacatgagtcctcttgaggctttagagccggtcctgagcagccagaatatcctgagtatttcaaaacttgtgcccaaaatccccgagaaagacggacagatgctctctcccagtagcttgtacaccatttggctgcagaaactgttttggaccggcgatccgcatcttataaaacaagtgcccggaagtagcccagagtggctgcacgcctatgacgtatgcatgaagtattttgaccgcctgcacccaggtgatttgatcactgttgttgatgccgtgaccttctctcccaaggcagtgacaaagctctcggtggaagcacgaaaggagatgacacggaaagcaatcaaaactgtgaagcatttcatcgaaaagccaagaaaaagaaattctgaggacgaggcacaggaagccaaggattctaaagtcacctatgcggacacacttaatcacctggaaaaatcactcgcccacctcgagacgttgtcccacagcttcatcctgagtttaaaaaacagtgagcaggagacactccagaaatattcacatctatatgacctgagtcggtccgaaaaggagaaacttcatgatgaagccgtcgccatttgcttggacggtcagcccctcgcgatgatccagcagctgctggaggtggccgtcggaccactcgacatctccccaaaggatatagtgcagtctgccattatgaaaattatctcagcgctgagcggaggctcagctgacttaggtggccccagggacccactgaaggttttggagggagtggtggccgctgttcatgcttccgtcgacaagggcgaggagctggtgtcgcctgaagacttacttgagtggttaagaccgttttgtgcagatgacgcttggcctgtgcggccacggattcatgtgctgcagatcctgggccagtctttccacctcacagaggaggactccaaattactggtttttttccggaccgaggctattctcaaggcctcatggccccagagacaggtcgatatcgccgatatagaaaacgaagaaaaccgctattgtttgttcatggagctgctagaatccagtcatcacgaggcggagtttcaacatctcgtcctactccttcaggcttggccaccaatgaagtcagaatacgtcatcacaaataatccttgggtacgcctcgcaaccgtgatgttgacccgctgtacaatggagaataaagagggtctggggaatgaggtgctcaaaatgtgccgaagcctctataatactaagcagatgctccccgccgagggagtcaaagagctgtgtttattactcctcaaccagagtttgctcttgccatctctgaagctcctactcgaatcccgcgacgagcatctgcacgaaatggccctcgaacagatcactgccgtaacgactgtgaacgattctaactgcgaccaagagctgctgagtttgcttctcgacgcaaaattgctggtgaaatgcgtttctactcctttctacccccgcatcgtagatcacctcctggcatctttgcagcaggggaggtgggacgctgaggaactgggcagacacctgagagaagctggccacgaagctgaggcgggaagtctcttgcttgccgtccgtggcacacatcaggccttccgcactttcagcacagcattgcgagctgctcagcactgggtttag

SEQ ID NO: 188371 - DNA, 7116 bp, Artificial Sequence
  derived and/or modified sequence
atggccgcccctgagagcggccctgccctgagccctggaacagctgagggggaggaggagaccatcctgtatgacctgctggtgaacacagagtggcccccagagacagaggtgcagccccggggcaaccagaagcacggggccagcttcatcatcaccaaggccatccgggaccggctgctcttcctgcggcagtacatctggtacagccctgcccccttcctgctgcctgatggcctggtgcggctggtgaacaagcagatcaactggcacctggtgctggccagcaatggcaagctgctggccgctgtgcaggaccagtgtgtggagatccgcagcgccaaggatgacttcaccagcatcatcggcaagtgccaggtgcccaaggaccccaagccccagtggaggagagtggcctggagctatgactgcaccctgctggcctatgcagagagcactggaacagtgcgggtgtttgacctgatgggcagcgagctgtttgtgatcagccctgccagcagcttcatcggggacctgtcctatgccatcgccggcctcatcttcctggagtacaaggccagcgcccagtggagcgctgagctgctggtgatcaactacagaggagagctgcggagctacctggtgtctgtgggcaccaaccagagctaccaggagagccactgcttctccttcagcagccactacccccacggcatcaacacagccatctaccaccctggccaccggctgctgctggtgggcggctgtgaaacagctgaggtgggcatgagcaaggccagcagctgtggcctgagcgcctggagggtgctgagcggcagcccctactacaagcaggtgaccaatggaggagatggagtgacagctgtgcccaagaccctgggcctgctgaggatgctgtctgtgaagttctacagccggcagggccaggagcaggacggcatcttcaagatgagcctgagcccagatggcatgctgctggccgccatccacttcagcggcaagctgagcatctgggccatccccagcctgaagcagcagggcgagtggggccagaatgagcagcccggctatgatgacctgaacccagactggaggctgagcacagagaagaggaagaagatcaaggacaaggagagcttctaccccctgattgatgtgaactggtgggccgacagcgctgtgaccctggcccgctgcagcggggccctgactgtgtcctctgtgaagaccctgaagaacctgctgggcaagagctgtgagtggtttgagcccagcccccaggtgacagccacccatgatggcggcttcctgagcctggagtgtgagatcaagctggcccccaagaggagccggctggagaccagggctggggaggaggatgaaggagaagaagattctgacagcgactatgagatcagcgccaaggcccgctacttcggctacatcaagcagggcctgtacctggtgacagagatggagagatttgccccacccaggaagaggcccaggaccatcaccaagaactaccgcctggtgtccctgcggagcaccaccccagaggagctgtaccagaggaagattgagagcgaggagtatgaggaggccctgagcctggcccacacctacggcctggacacagacctggtgtaccagaggcagtggaggaagtctgctgtgaatgtggccagcatccagaactacctgagcaagatcaagaagaggtcctgggtgctgcatgaatgtctggagcgggtgcctgaaaatgtggatgctgccaaggagctgctgcagtatggcctgaagggcacagacctggaggccctgctggccatcggcaaaggagcagatgatggccgcttcaccctgcccggggagattgatattgacagcatctcctatgaggagctgagccccccagatgaggagcccgccaagaacaagaaggagaaggagctgaagaagaggcaggagctgctgaagctggtgaacttcagcaagctgaccctggagcagaaggagctgtgccgctgcaggaggaagctgctgacctacctggaccggctggccacctatgaggagatcctgggcgtgccccacgccagcgagcagagatatgatgctgagttcttcaagaagttcaggaaccagaacatcgtgctgagcgcccggacctacgcccaggagagcaatgtgcaggccctggagatcctcttcacctaccacggcagtgacctgctgccccaccggctggccatcctgagcaacttccctgagaccaccagcccccatgagtacagcgtgctgctgcctgaggcctgcttcaacggggacagcctgatgatcatcccctggcatgagcacaagcaccgggccaaggactggtgtgaggagctggcctgcaggatggtggtggagcccaacctgcaggatgaaagtgagttcctgtatgctgcccagcctgagctgctgcgcttcaggatgacccagctgactgtggagaaggtgatggactggtaccagaccagggctgaggagattgagcactacgcccggcaggtggactgtgccctgagcctcatccggctgggcatggagaggaacatccctggcctgctggtgctgtgtgacaacctggtgaccctggagaccctggtgtatgaggcccgctgtgatgtgaccctgaccctgaaggagctgcagcagatgaaggacatcgagaagctgcggctgctgatgaacagctgcagcgaggacaagtatgtgaccagcgcctaccagtggatggtgcccttcctgcaccgctgtgagaagcagagccctggggtggccaatgagctgctgaaggagtacctggtgaccctggccaagggggacctgaagttccccctgaagatcttccagcacagcaagccagacctgcagcagaagatcatcccagaccaggaccagctgatggccatcgccctggagtgcatctacacctgtgaaagaaatgaccagctgtgcctgtgctatgacctgctggagtgcctgcctgagcggggctatggagacaagacagaggccaccaccaagctgcatgacatggtggaccagctggagcagatcctgtctgtgtctgagctgctggagaagcacggcctggagaagcccatcagctttgtgaagaacacccagagcagcagcgaggaggccaggaagctgatggtgcggctgaccaggcacactggaaggaagcagccccctgtgtctgagagccactggaggaccctgctgcaggacatgctgaccatgcagcagaatgtgtacacctgcctggacagtgatgcctgctatgagatcttcacagagagcctgctgtgcagcagccggctggagaacatccacctggccggccagatgatgcactgcagcgcctgcagtgaaaatcctcctgctggcatcgcccacaagggcaagccccactacagagtgtcctatgagaagagcattgacctggtgctggccgccagccgggagtacttcaacagcagcaccaacctgacagacagctgcatggacctggcccgctgctgcctgcagctgatcacagaccggcccccagccatccaggaggagctggacctgatccaggccgtgggctgcctggaggagtttggagtgaagatcctgcccctgcaggtgcggctgtgcccagaccgcatcagcctcatcaaggagtgcatcagccagagccccacctgctacaagcagagcaccaagctgctgggcctggccgagctgctgcgggtggccggggagaaccctgaggagcggcggggccaggtgctgatcctgctggtggagcaggccctgcgcttccatgactacaaggccgcctccatgcactgccaggagctgatggccaccggctaccccaagtcctgggatgtgtgcagccagctgggccagagcgagggctaccaggacctggccacccggcaggagctgatggcctttgccctgacccactgcccccccagcagcattgagctgctgctggccgccagcagcagcctgcagacagagatcctgtaccagagggtgaacttccagatccaccatgaaggaggagagaacatcagcgccagccccctgaccagcaaggctgtgcaggaggatgaggtgggcgtgcccggcagcaacagcgctgacctgctgcgctggaccacagccaccaccatgaaggtgctgagcaacaccaccaccaccaccaaggctgtgctgcaggccgtgtctgatggccagtggtggaagaagagcctgacctacctgcggcccctgcagggccagaagtgtggcggggcctaccagatcggcaccacagccaatgaagacctggagaagcagggctgccaccccttctatgagagcgtcatcagcaacccctttgtggccgagagcgagggcacctatgacacctaccagcacgtgcctgtggagagctttgctgaggtgctgctgaggacaggcaagctggccgaggccaagaacaagggggaggtgttccccaccacagaggtgctgctgcagctggccagcgaggccctgcccaatgacatgaccctggccctggcctacctgctggccctgccccaggtgctggatgccaaccgctgctttgagaagcagagccccagcgccctgagcctgcagctggccgcctactactacagcctgcagatctatgcccggctggccccctgcttccgggacaagtgccaccccctgtacagagctgaccccaaggagctgatcaagatggtgaccaggcatgtgaccaggcatgagcacgaggcctggccagaagatctcatcagcctgaccaagcagctgcactgctacaatgaaaggctgctggacttcacccaggcccagatcctgcagggcctgaggaaaggagtggatgtgcagcgcttcaccgcagatgaccagtacaagcgggagaccatcctgggcctggccgagaccctggaggagagcgtgtacagcatcgccatcagcctggcccagcgctacagcgtgagccgctgggaggtgttcatgacccacctggagttcctgttcacagacagcggcctgagcaccctggagattgagaacagagcccaggacctgcacctgtttgagaccctgaagacagatcctgaggccttccaccagcacatggtgaagtacatctaccccaccatcggcggctttgaccacgagcggctgcagtactacttcaccctgctggagaactgtggctgtgccgacctgggcaactgtgccatcaagccagagacccacatccggctgctgaagaagttcaaggtggtggccagcggcctgaactacaagaagctgacagatgagaacatgagccccctggaggccctggagcctgtgctgagcagccagaacatcctgagcatcagcaagctggtgcccaagatccctgagaaggatggccagatgctgagccccagcagcctgtacaccatctggctgcagaagctgttctggacaggagacccccacctgatcaagcaggtgcccggcagcagccctgagtggctgcacgcctatgatgtgtgcatgaagtactttgaccggctgcaccctggggacctgatcaccgtggtggatgctgtgaccttcagccccaaggctgtgaccaagctgtctgtggaggccaggaaggagatgaccaggaaggccatcaagacagtgaagcacttcatcgagaagcccaggaagagaaattctgaagatgaggcccaggaggccaaggacagcaaggtgacctacgccgacaccctgaaccacctggagaagagcctggcccacctggagaccctgagccacagcttcatcctgagcctgaagaacagcgagcaggagaccctgcagaagtacagccacctgtatgacctgagccgctctgagaaggagaagctgcatgatgaagctgtggccatctgcctggatggccagcccctggccatgatccagcagctgctggaggtggccgtgggccccctggacatcagccccaaggacatcgtgcagagcgccatcatgaagatcatcagcgccctgagcggcggcagcgctgacctgggcggcccccgggaccccctgaaggtgctggagggcgtggtggccgctgtgcacgcctctgtggacaagggggaggagctggtgtccccagaggacctgctggagtggctgcggcccttctgtgctgatgatgcctggcctgtgcggccccgcatccacgtgctgcagatcctgggccagagcttccacctgacagaggaggacagcaagctgctggtgttcttcagaacagaggccatcctgaaggcctcctggccccagaggcaggtggacattgctgacattgaaaatgaggagaaccgctactgcctcttcatggagctgctggagagcagccaccatgaagctgagttccagcacctggtgctgctgctgcaggcctggccacccatgaagtcagaatatgtgatcaccaacaacccctgggtgcggctggccaccgtgatgctgacccgctgcaccatggagaacaaggagggcctgggcaatgaggtgctgaagatgtgccgcagcctgtacaacaccaagcagatgctgcctgctgagggcgtgaaggagctgtgcctgctgctgctgaaccagagcctgctgctgcccagcctgaagctgctgctggagagcagagatgagcacctgcacgagatggccctggagcagatcacagctgtgaccaccgtgaatgacagcaactgtgaccaggagctgctgagcctgctgctggatgccaagctgctggtgaagtgtgtgtccacccccttctacccccgcatcgtggaccacctgctggccagcctgcagcagggccgctgggatgctgaggagctgggccgccacctgcgggaggccggccatgaagctgaggccggcagcctgctgctggccgtgcggggcacccaccaggccttccgcaccttcagcacagccctgcgggccgcccagcactgggtgtag

SEQ ID NO: 188372 - DNA, 7116 bp, Artificial Sequence
  derived and/or modified sequence
atggccgcccccgagagcggccccgccctgagccccggcaccgccgagggggaagaagagacgattctgtatgacctcctggtgaatacagagtggccacctgagaccgaagtgcagccgcgtgggaatcagaagcatggagcgtctttcataatcacaaaagcgatcagagaccgcttactgtttctgagacagtatatctggtatagccctgcccccttcttactgcctgatggactggtgcggttggtaaacaagcagattaattggcacttggtcttggccagcaacggaaaacttttggctgccgtgcaggatcagtgcgtcgagattcgctctgctaaggacgactttactagcatcatcggtaaatgccaggtgcctaaggaccccaaaccacaatggaggcgcgtggcctggtcctatgactgcacactcctggcttacgccgaatcaacgggaactgtgcgggtgtttgacctgatggggtctgaactgtttgtgattagccctgctagtagttttatcggagacctttcatacgccatagccggcttgatattcctggagtacaaagcaagcgctcaatggtccgcagagctgctggtgataaactaccgcggcgagctcagaagttacctggtgtccgtggggactaaccagtcttaccaggagagccactgtttttctttttcttctcattatccccatggaataaacaccgccatttatcatcccggccatcgtctgctcctggtcggcggatgtgagaccgcagaagtgggaatgagcaaggcttccagctgcggactgagtgcctggcgcgttctttccggtagcccttactataagcaagtgactaatgggggcgacggcgtcaccgccgttccaaaaactctcgggctgttgcgcatgctgtcagtgaagttctattctcggcagggccaggaacaagacggcatttttaagatgagcctgagccccgatggaatgctgctggccgccattcacttctctggaaaacttagtatctgggcaattccatccctgaagcaacaaggggagtggggacagaatgaacagcctggatacgatgacctcaatcctgactggcgcttatctaccgaaaagcgtaagaagattaaggacaaagaaagtttctatccattgattgacgtaaattggtgggccgacagcgctgtgaccttggcaaggtgcagcggtgccctaaccgtgtcaagtgtgaagacgctgaagaatctcctaggaaaatcatgtgagtggttcgaacccagcccacaggtcactgccacccatgatggagggtttctgtcacttgagtgtgaaattaagctggctcctaagagatcaagacttgagacaagagctggggaggaagacgagggggaggaagattccgattccgattacgagatttctgcaaaagctcggtatttcggatatattaagcaggggctgtatctcgtcacagagatggagagattcgcccctccgcggaagcgacctcgcactattacaaagaactatagattagtctccctgcgttcgactaccccagaagagctatatcagcgtaaaatcgagtctgaggaatatgaggaggcgctctctctcgcgcacacatacggactggatacagaccttgtgtaccagagacagtggaggaaaagcgcagtcaatgtggctagcatacaaaattacttgtcaaagattaagaaaagatcctgggtccttcacgaatgtctagagcgggtcccagaaaacgtggacgccgccaaagagctgctccagtacggcttgaaaggcaccgatcttgaggcactgctggctattgggaagggagctgatgatggtcggtttaccctgcccggggagatcgatatcgattctatctcctacgaggagctgagcccaccagatgaagagcccgctaaaaacaagaaggagaaagagttaaaaaagaggcaggaactgcttaaactggtcaatttcagcaaactgacactggagcaaaaggagctatgccggtgtcggcgcaagctcctgacttacctcgatcggctagcaacttacgaagagatattaggagtaccacacgccagcgagcagaggtacgatgccgagttttttaagaaattcagaaaccagaacattgtcctaagtgctcgcacatatgcccaggagagtaatgtgcaagccttggaaattctttttacttaccatggttctgatctgctgccacaccgtctggcaattctctccaacttcccagaaaccacctctcctcatgagtacagcgtgcttctccccgaagcttgcttcaatggagatagccttatgatcatcccttggcacgagcataagcatcgggccaaggactggtgtgaggaactggcatgcagaatggtggtagagcctaacctccaggacgagagtgaattcctctacgctgctcaaccggaattattgcggtttaggatgacccagcttacagtcgaaaaggtgatggattggtatcaaacaagagcagaagaaatagagcactatgcccgacaggtggattgcgcactctcactcataagactggggatggaacggaacatacctggcttgctggtcctgtgtgataatctggtcacactcgaaactctggtgtacgaagccaggtgtgacgttacacttacattaaaggagctgcagcagatgaaagatattgaaaagctgcggctgcttatgaattcctgttccgaggataagtatgtgacatctgcatatcaatggatggtgccatttttgcacaggtgtgagaagcagtctcccggcgtcgccaacgaattgctcaaggaatatcttgtcactctagcgaagggcgatttgaagtttccccttaagattttccagcattctaagcctgacctgcaacagaaaatcattccagaccaggaccagttaatggccatagcattggagtgtatctatacctgtgagcgaaatgaccagctgtgtctgtgctacgaccttctcgagtgcctgccagaaaggggctatggcgacaagaccgaagccactaccaagctacacgatatggtggaccagctggagcagattctgagcgtttcagagttgctcgaaaaacatggattggagaaaccaataagcttcgtgaagaacacacagtcatcaagcgaagaggcaaggaaactgatggtccgcctgacgcggcacactggacggaagcagccccccgtgtccgagagccattggcggaccctcctccaggatatgttgactatgcagcagaacgtctacacctgtctagattccgacgcatgttacgagatctttacggaatccctgttatgttcttcacgtctcgagaacatacacctcgccggccagatgatgcattgttccgcttgctctgaaaaccctccggcggggatagcacacaagggaaaaccgcactatcgcgttagctatgaaaagagcattgatctggtccttgccgcctcacgggaatatttcaattcgtcaactaacctgaccgattcatgtatggatctggcccggtgctgcctgcaactgatcaccgatcggccccccgctatacaggaggagctcgacctgattcaggcggtgggctgcttggaggagttcggggtgaaaatactaccacttcaggtaagactctgtccagatcgaatctccctaatcaaagaatgtatatcgcagagtcccacatgttacaagcaaagcactaaacttctaggcctagccgaactgctgcgcgtcgcaggggagaatcctgaggagcgcagaggacaagtgcttatcttgctcgtggagcaggccctgcgcttccatgactacaaggctgcgtctatgcactgccaggagctgatggcaaccggatatcctaaatcatgggacgtgtgtagccagttaggccaatcggagggctatcaggatctcgcgacgaggcaggagttgatggcgtttgctctgactcactgtccaccatcatcaatcgagctcctgctcgctgcgtccagctctcttcagaccgaaattctgtatcagcgggtgaactttcagatccaccacgaaggaggcgagaatataagcgcaagtccactcacatccaaggccgtccaggaggacgaggtgggcgtgcctgggagcaattctgcagacctgctgcgttggaccacggccaccactatgaaggtgctgtcaaatacgactactaccactaaggccgtactgcaggctgtctctgatggccagtggtggaagaaatcattaacttatctccggccccttcagggacagaaatgcggaggggcataccagatcgggaccaccgccaacgaagaccttgagaaacagggttgccacccattttacgagtcagtaatatcaaatccctttgttgcggaaagcgaaggcacttatgatacgtaccaacatgtgccagtcgaatcctttgccgaagtcctgctcagaaccgggaaacttgctgaagcgaagaataaaggcgaagtcttcccaacaacagaagtactcctccagctggcaagcgaggctctccccaatgacatgaccctggccttggcatatttgcttgctttgccacaagtattggacgcaaaccggtgtttcgagaagcagtccccttctgctctctctctccagctggccgcctattattactctctccaaatatacgctcggctggcaccatgctttcgggataagtgccatcccctctatcgggcggaccccaaagaattgattaagatggtgacccgtcacgtgactcgccacgaacacgaggcttggcctgaagacctgatcagcttgacaaagcagctgcattgttacaacgagcgccttctggacttcacgcaggctcagatcttgcagggccttagaaagggagttgatgttcagcgctttaccgccgatgatcagtacaagagagaaaccattctggggttagcagaaaccctggaagagagtgtgtattctatagccatctcccttgctcagcgatattcggtcagcagatgggaagtcttcatgacccacctcgagtttttgtttaccgattctgggttgtctaccctcgagattgaaaatcgggcccaggatttgcacctgttcgaaaccttaaaaaccgatccggaggccttccaccagcatatggttaagtacatttatcccactatcggaggatttgatcatgagagactgcaatactattttacactccttgaaaactgcggatgcgcagacctgggtaactgtgccataaagcccgaaactcacatccgtctcctgaaaaaatttaaggtggtggctagcggtttgaactacaagaagctgactgacgagaacatgtcacccctggaggctttggagcctgtgttatcatcccaaaatattctgtccatttctaagctcgtgccaaagattcccgaaaaggatggccagatgctttcgccctcatcactgtacaccatttggctgcagaaactgttctggaccggtgatccccacctgatcaaacaggtgccagggtcgtcccccgagtggctacacgcttacgatgtatgcatgaagtatttcgaccgactgcaccccggcgacctgatcaccgttgtcgatgccgtcacattttccccaaaagcagtgacgaaactttccgtcgaagcccggaaggagatgacaaggaaagccatcaagactgtcaagcacttcatcgaaaagcctcgcaagcggaatagcgaggacgaggctcaggaggcaaaggattcaaaggtgacctacgcggacaccctcaatcaccttgagaaatcactagcccacttagagacactctctcacagttttatcctgagtctgaagaactcggagcaggaaaccctacagaagtatagtcatctctatgatctatcaagatctgagaaagagaagctgcacgatgaagccgtggccatctgcttggacggccagccccttgcgatgatacagcagctccttgaagttgccgtaggtccgctggatatttcccctaaggacatcgtccagtcagctatcatgaaaatcattagcgcactgtctggtggctccgctgatttgggagggcctcgggaccctctcaaggttctggaaggagtagtcgctgccgtccatgcaagcgtggataaaggggaagaactcgtgagcccagaggacctgctggaatggttgcggcccttctgcgcagatgatgcctggcccgtgcggcctagaatacacgtcctccaaatcttaggccagagtttccatctcaccgaggaggactctaagctgctagtcttctttagaaccgaggcgatcctcaaggcatcctggccccagaggcaggttgacatcgcagacatcgaaaatgaggagaaccggtactgcttgtttatggaattgttagaaagctcccaccacgaggccgagttccagcacctcgtgctgctgctccaggcctggccacctatgaaaagtgaatatgtgatcacgaataacccctgggtcaggcttgctacagtgatgctgacgagatgcaccatggagaacaaggagggtttggggaatgaggttctcaagatgtgcaggtccctatataacactaaacagatgctgcccgccgagggggttaaagaactgtgtctcttactgttaaatcagagtctgcttctgccctctctcaaactgctccttgaatccagggacgaacaccttcacgagatggctctggaacagataaccgcggtgaccactgtaaatgactctaactgcgaccaggagctgctcagcctccttctggacgccaagctcctggtcaaatgtgtgagcaccccattttacccaaggatcgttgatcacctgctggctagtctccagcaggggcggtgggatgccgaagaactgggcaggcacttacgggaggctggccacgaagccgaggctggctccttgcttctcgcagtcaggggcacccatcaggcgtttcgaaccttctccaccgccctgagagccgcccagcactgggtatag

SEQ ID NO: 188373 - DNA, 7281 bp, Artificial Sequence
  derived and/or modified sequence
ctccgctgcctgagtcctcggcgaacatggcggcccccgagtcagggccggctttgagtccaggcactgcagagggtgaggaggagacgattctctatgacttgttggtcaacaccgagtggccaccggagactgaagtacagcctagaggcaaccaaaaacatggtgcatcctttatcatcacgaaagcaattcgagatcgtttattatttttacgccaatacatctggtacagcccggcaccttttttgctccctgatggactggttcgcttggttaataaacagataaactggcatttggtacttgcaagcaatggaaagcttttggctgctgttcaagatcagtgtgtggaaatcaggtctgcaaaagatgattttacatccattattgggaaatgtcaagttccgaaagacccgaaaccccagtggagacgggtagcatggagttacgattgtaccctactggcctatgccgaaagcacaggaactgtgagggtgtttgatctcatgggaagtgaactctttgtcatttccccggcatctagttttataggtgacttaagctatgccattgctgggttgatatttttagaatataaagcaagtgcacagtggtctgcagaactcctggtcatcaattaccgaggagaacttagaagttaccttgtaagtgttggaacaaatcagagctaccaagaaagtcactgtttcagcttcagtagtcattatcctcatggaatcaacacagctatttaccaccctggtcacagacttttacttgttggtggatgtgaaactgctgaagtaggcatgtcaaaagcttctagctgtggcctttctgcctggagagttctttcaggatcaccgtattataagcaggttactaatggtggagacggggttactgcagtaccgaagacactgggattattaaggatgttaagtgtcaagttttacagtcgccagggacaagaacaggatggaatttttaagatgagcctttctccagatgggatgctcctggcagccattcacttctcagggaaactgagcatctgggcgattccatctctgaagcaacaaggggaatggggtcaaaatgagcagccaggctatgatgaccttaatcctgattggaggctctctactgagaagagaaaaaaaatcaaagataaagagtccttttacccactgatagatgtcaattggtgggcagacagtgcagtgactttagctcgatgctctggtgctttaactgtttcatctgtgaaaactttgaagaatttactgggaaaatcctgtgaatggtttgaaccatcacctcaagtcactgctacccatgatgggggatttttaagtttggagtgtgagattaaacttgcccccaaacgatctcgtttggagactagagctggagaagaagatgaaggagaagaggattctgattctgattatgaaatatctgccaaggctcgctactttggttatataaaacagggcctttacttggtgactgaaatggagcgatttgcaccaccacggaaacgcccacgaaccattactaaaaactaccgccttgtgagtttgcgctccacgacaccagaggaactttatcagaggaagattgaaagtgaagagtatgaggaagccttgtccttggctcatacctacggcctggatactgaccttgtatatcagaggcagtggaggaagtcagcggtcaacgttgcttcaattcagaattatttgagtaaaataaagaagcgatcctgggttctccatgagtgtttggaaagagttcctgaaaatgtggatgctgcaaaagaactgcttcagtatggattaaaaggcacagacctggaggctcttttagcaatagggaaaggagcagatgatggcagatttacattacctggtgaaatagacattgacagtatctcctatgaagagctttcaccacctgatgaagagcctgccaagaataaaaaggaaaaggagctcaagaagagacaagaactactgaaattagtgaacttttccaagttgacactggaacaaaaggaactttgccgttgtagacggaagttattaacctacttagatcgacttgcaacatatgaggaaatcctaggagtgcctcatgcatctgaacagagatatgatgctgaattctttaagaaattcagaaatcagaatattgttctctcagcaagaacttatgctcaggaaagtaatgtacaagccctggaaattctgtttacttaccatggttccgacctgcttcctcatcgccttgcaattctgtccaactttccagagaccacttctccacatgaatattctgttttgctgcccgaagcttgttttaacggtgactccctgatgatcattccttggcatgaacataaacaccgagctaaagattggtgcgaggagttggcttgcagaatggttgttgagccgaatctccaagatgaaagtgaattcttgtatgctgcacagcctgagttactaaggttcaggatgacccagcttacggtggagaaggttatggactggtatcagaccagagcagaggaaatagagcattatgctcggcaggtggactgtgcattgtcacttattcgacttgggatggagcggaatattcctggtttgctggttctctgtgacaatttggttactctggaaacattggtttatgaagccaggtgtgatgtaactctaaccctgaaagaactccagcagatgaaagacattgaaaaactaagattactgatgaatagttgttctgaggataaatatgtgacaagtgcctaccagtggatggttccctttcttcatcgttgtgagaaacagtcgcctggtgtggctaatgagctattaaaagaatatttagtaactttagctaaaggggacttaaaatttcccctgaagatatttcagcattccaaaccagatctgcagcaaaaaattattcctgatcaggaccaactgatggcaatagcactagagtgcatctatacctgtgaacgaaatgatcaactctgtctttgctatgacctactagaatgtctgccagaaagaggatatggtgataagacagaggcaaccacaaagcttcatgacatggtagaccaactggaacaaattctcagtgtgtcagagcttttggaaaaacatggactcgagaaaccaatttcatttgttaaaaacactcaatctagctcagaagaggcacgcaagctgatggttagattgacgaggcacactggccggaagcagcctcctgtcagtgagtctcattggagaacgttgctgcaagacatgttaactatgcagcagaatgtatacacatgtctagattctgatgcctgctatgagatatttacagaaagccttctgtgctctagtcgccttgaaaacatccacctggctggacagatgatgcactgcagtgcttgttcagaaaatcctccagctggtatagcccataaagggaaaccccactacagggtcagctacgaaaagagtattgacttggttttggctgccagcagagagtacttcaattcttctaccaacctcactgatagctgcatggatctagccaggtgctgcttacaactgataacagacagaccccctgccattcaagaggagctagatcttatccaagccgttggatgtcttgaagaatttggggtaaagatcctgcctttgcaagtgcgattgtgccctgatcggatcagtctcatcaaggagtgtatttcccagtcccccacatgctataaacaatccaccaagcttctgggccttgctgagctgctgagggttgcaggtgagaacccagaagaaaggcggggacaggttctaatccttttagtggagcaggcacttcgcttccatgactacaaagcagccagtatgcattgtcaggagctgatggccacaggttatcctaaaagttgggatgtttgtagccagttaggacaatcagaaggttaccaggacttggccactcgtcaagagctcatggcttttgctttgacacattgccctcctagcagcattgaacttcttttggcagctagcagctctctgcagacagaaattctttatcaaagagtgaatttccagatccatcatgaaggaggggaaaatatcagtgcttcaccattaactagtaaagcagtacaagaggatgaagtaggtgttccaggtagcaattcagctgacctattgcgctggaccactgctaccaccatgaaagtcctttccaacaccacaaccaccaccaaagcggtgctgcaggccgtcagtgatgggcagtggtggaagaagtctttaacttaccttcgaccccttcaggggcaaaaatgtggtggtgcatatcaaatcggaactacagccaatgaagatctagagaaacaagggtgtcatcctttttatgaatctgtcatctcaaatccttttgtcgctgagtctgaagggacctatgacacctatcagcatgttccagtggaaagctttgcagaagtattgctgagaactggaaaattggcagaggctaaaaataaaggagaagtatttccaacaactgaagttctcttgcaactagcaagtgaagccttgccaaatgacatgaccttggctcttgcttaccttcttgccttaccacaagtgttagatgctaaccggtgctttgaaaagcagtccccctctgcattatctctccagctggcagcgtattactatagcctccagatctatgcccgattggccccatgtttcagggacaagtgccatcctctttacagggctgatcccaaagaactaatcaagatggtcaccaggcatgtgactcgacatgagcacgaagcctggcctgaagaccttatttcactgaccaagcagttacactgctacaatgaacgtctcctggatttcactcaggcgcagatccttcagggccttcggaagggtgtggacgtgcagcggtttactgcagatgaccagtataaaagggaaactatccttggtctggcagaaactctagaggaaagcgtctacagcattgctatttctctggcacaacgttacagtgtctcccgctgggaagtttttatgacccatttggagttcctcttcacggacagtggtttgtccacactagaaattgaaaatagagcccaagaccttcatctctttgagactttgaagactgatccagaagcctttcaccagcacatggtcaagtatatttaccctactattggtggctttgatcacgaaaggctgcagtattatttcactcttctggaaaactgtggctgtgcagatttggggaactgtgccattaaaccagaaacccacattcgactgctgaagaagtttaaggttgttgcatcaggtcttaattacaaaaagctgacagatgaaaacatgagtcctcttgaagcattggagccagttctttcaagtcaaaatatcttgtctatttccaaacttgttcccaaaatccctgaaaaggatggacagatgctttccccaagctctctgtacaccatctggttacagaagttgttctggactggagaccctcatctcattaaacaagtcccaggctcttcaccggagtggcttcatgcctatgatgtctgcatgaagtactttgatcgtctccacccaggtgacctcatcactgtggtagatgcagttacattttctccaaaagctgtgaccaagctgtctgtggaagcccgtaaagagatgactagaaaggctattaagacagtcaaacattttattgagaagccaaggaaaagaaactcagaagacgaagctcaagaagctaaggattctaaagttacctatgcagatactttgaatcatctggagaaatcacttgcccacctggaaaccctgagccacagcttcatcctttctctgaagaatagtgagcaggaaacactgcaaaaatacagtcacctctatgatctgtcccgatcagaaaaagagaaacttcatgatgaagctgtggctatttgtttagatggtcagcctctagcaatgattcagcagctgctagaggtggcagttggccctcttgacatctcacccaaggatatagtgcagagtgcaatcatgaaaataatttctgcattgagtggtggcagtgctgaccttggtgggccaagggacccactgaaggtcctggaaggtgttgttgcagcagtccacgccagtgtggacaagggtgaggagctggtttcacctgaggacctgctggagtggctgcggcctttctgtgctgatgacgcctggccggtgcggccccgcattcacgtgctgcagattttggggcaatcatttcacctgactgaggaggacagcaagctcctcgtgttctttagaactgaagccattctcaaagcctcctggccccagagacaggtagacatagctgacattgagaatgaagagaaccgctactgtctattcatggaactcctggaatctagtcaccacgaggctgaatttcagcacttggttttacttttgcaagcttggccacctatgaaaagtgaatatgtcataaccaataatccatgggtgagactagctacagtgatgctaaccagatgtacgatggagaacaaggaaggattggggaatgaagttttgaaaatgtgtcgctctttgtataacaccaagcagatgctgcctgcagagggtgtgaaggagctgtgtctgctgctgcttaaccagtccctcctgcttccatctctgaaacttctcctcgagagccgagatgagcatctgcacgagatggcactggagcaaatcacggcagtcactacggtgaatgattccaattgtgaccaagaacttctttccctgctcctggatgccaagctgctggtgaagtgtgtctccactcccttctatccacgtattgttgaccacctcttggctagcctccagcaagggcgctgggatgcagaggagctgggcagacacctgcgggaggccggccatgaagccgaagccgggtctctccttctggccgtgagggggactcaccaggccttcagaaccttcagtacagccctccgcgcagcacagcactgggtgtgagggccacctgtggccctgctccttagcagaaaaagcatctggagttgaatgctgttcccagaagcaacatgtgtatctgccgattgttctccatggttccaacaaattgcaaataaaactgtatggaaacgatgagcaa

SEQ ID NO: 188374 - DNA, 7116 bp, Artificial Sequence
  derived and/or modified sequence
atggccgcaccagagagtggcccagccctgagtcctggcacggccgagggagaagaagagaccatcctatatgatctcctcgttaatactgagtggccccctgagactgaggtacagccgcgaggtaatcagaaacacggggcaagttttataattacgaaagccattagagatagacttctctttctgaggcaatacatttggtatagtcctgctcctttcctgctgccagatggcctggtgaggctggttaataaacaaatcaattggcacctggtgctcgcgtcaaacggcaaactgctggcagccgtacaagaccagtgtgtggagatccgttctgccaaggacgacttcacgtctatcataggaaagtgccaggtaccaaaggacccaaaaccccagtggcgacgagtggcatggtcttatgattgcaccctcctggcatacgcagaatccactggaactgtgcgcgtcttcgatctaatgggctctgagctttttgttatctcacccgcatcctcctttatcggcgacctctcctatgcgatagcagggctgatcttcctcgaatacaaggcctcagcgcagtggtccgcagagctacttgttattaactatcgaggagagctgcgaagttatcttgtttctgtcggcaccaaccagtcttatcaggaatcgcactgtttttccttttcctctcattaccctcacgggatcaacaccgccatttatcacccaggacaccgcctgctgttggttggaggttgtgagaccgcggaggtggggatgtcaaaggcaagtagctgtgggctgtctgcatggagagttctatcaggctccccctattacaaacaagtgactaacgggggagatggagtcactgccgttcctaaaaccctcggattactgcggatgctttccgtgaagttctacagccgacagggtcaggagcaggacgggatcttcaaaatgtctttaagccctgatggcatgctgctggcggctatccacttcagtggaaagctatctatctgggcaattccatcccttaaacagcagggtgagtggggccagaatgagcaacctggctatgacgatctgaaccccgactggaggttgtccaccgagaagcggaaaaaaattaaggacaaagagagtttctatccactaatcgacgtaaattggtgggccgactcagcggtaactttggcccgatgctctggcgctttgactgtgagcagtgtgaaaacgctaaagaacctcctgggcaaaagctgtgaatggttcgaacccagcccccaggtgactgccacacacgatggcggattcttgtcgcttgagtgtgagatcaagctagctccaaagcggtcgaggctcgaaaccagggctggggaggaggacgaaggggaagaggatagcgattctgattacgaaatctcagccaaggcccgatattttggatatattaaacagggcctgtatctggtcaccgagatggagcgttttgctcctccacgtaaacgccctagaaccattacaaagaattacagattggtctccctgcgctccacaacaccagaagagctgtatcagcgaaagatcgagagcgaagagtatgaggaggccctctctctggcgcatacatatggtctcgataccgacctggtgtaccaacgacagtggcggaaatccgctgtgaatgtggcctcaatccagaattaccttagcaaaatcaaaaaaagatcttgggtcctgcacgagtgcctggagcgtgtgccagagaacgtggacgctgccaaagagctgttacagtatgggctcaagggaacagacttggaggcactcctggccatcggcaagggtgccgacgatggacggttcaccctgcctggcgagattgatatcgattcaattagttacgaagagttgtctccgcctgatgaagaaccagccaagaataagaaggaaaaagaattaaagaagaggcaggagctgctgaaacttgttaacttttcaaaacttactttggagcagaaagagctttgcagatgccgtcgcaagttgctgacctacttggaccgcctcgctacttacgaggagattctgggggtacctcatgcatcggaacagagatatgacgcagagttctttaaaaagttcagaaaccagaacatcgtactgtcggccagaacatacgcgcaagagagtaacgtgcaagccctggagatcctgttcacataccatggcagtgatcttcttccacacaggcttgctatactttctaacttccctgagaccacctcaccccatgagtactcagtgctcttgccagaggcttgtttcaacggggattcccttatgattatcccttggcacgaacataagcacagagccaaagactggtgcgaggagctggcttgccggatggtagtcgagcccaatctgcaggacgagagcgagtttctttacgcagcccaacctgagttacttcggttccgaatgactcaactgaccgtcgagaaggtgatggattggtatcaaactcgggctgaagagattgagcactatgcacggcaagtggactgtgctctcagtctcatcagactcgggatggagcggaacatccctggtttgctggtactgtgtgataatttagtgacactggagactctggtgtacgaagcacgctgcgatgtgaccttgaccctcaaagagctgcagcagatgaaggatatcgagaagttgagactcctaatgaattcctgttcagaggataagtacgtgacctctgcgtatcaatggatggtgcctttcctgcatagatgtgaaaagcaatctcccggtgtggctaatgaattactgaaggagtacctggttactctggccaagggggacctcaaatttccactgaagatcttccagcactccaagcccgatctgcagcagaaaatcataccagaccaagaccaactgatggctatcgccctggagtgtatatacacctgtgagcgcaacgatcagctctgcttatgctatgacctgcttgagtgcctacctgaacgcggttatggggacaagaccgaggccacaactaaactccacgatatggtggatcagctcgagcagatcctcagcgtgtctgagctgcttgagaagcacggtctcgagaagcccatcagcttcgtgaagaatacacagtcatcctccgaagaagcccgaaaactgatggtgcgacttacccggcacaccggcagaaaacaacccccagtgtctgagagccactggaggacactgttacaagacatgctgaccatgcagcagaatgtctatacttgcctggattctgatgcgtgctatgagatcttcacggaaagcctactctgttcttctcgtctggagaacattcatctcgctggtcagatgatgcattgttccgcctgtagtgaaaatccacccgctggcattgcccacaagggtaaaccacactaccgcgtctcctacgaaaagagcatcgacctggttctcgcagccagtcgcgaatactttaacagcagcactaacttgactgactcatgcatggatctggctagatgctgtttgcaactaattaccgatcgaccgcctgctattcaggaggaactggacctgattcaggccgtgggttgtctggaggagtttggagtcaaaatcctgcctctgcaggtgaggctttgccccgacagaatctctctaattaaagagtgcatctctcagagccctacatgttacaaacaatcgacaaagctcctgggcctggcggaattgctgcgggttgccggagagaatcccgaagagcggagaggccaggtgctgatcctcttggtggaacaggcccttcgcttccacgactataaagctgcctccatgcattgccaagagctcatggcgactgggtatcccaaaagctgggatgtgtgttcccaactgggacagtcggagggataccaggacctagccacaaggcaggaactcatggcattcgcactgacacattgccccccatcttctatcgaacttctgctcgccgcaagctcgagcctccagaccgagatcctgtatcagagagtgaattttcagatacaccacgaaggaggggagaatatttccgcctctccactcacgtcaaaagccgtccaggaggatgaggttggggtcccaggctccaactctgcggatcttctaaggtggaccaccgccactactatgaaggtgttgtctaataccactacaacaaccaaggctgtgctgcaggccgtatccgatggccagtggtggaagaagtcccttacttacctgcggccactccagggtcagaagtgcggtggtgcctatcaaatcgggactaccgctaacgaggatctagagaaacaggggtgtcatcctttttatgaatctgttatttcaaatccttttgtggctgagtctgagggcacctatgatacatatcagcacgtcccagtggagtcctttgctgaggtacttctgcggacgggcaaattagcagaggcaaagaacaagggagaggtttttcccacaactgaggtactgctgcaattggcctcggaggccctgccgaatgatatgaccctggcattggcttatcttctggcgttaccccaggtgttagatgccaataggtgttttgagaagcaaagcccttccgccctgtcactccagttggctgcctactactattccttgcagatttatgcccgacttgcaccgtgttttcgggataagtgccaccccctttacagagctgacccaaaggaattgatcaaaatggtgaccaggcatgtaacaaggcatgaacatgaggcttggccagaggatctgatctccctcacaaaacagctccattgttataacgagagacttctggacttcactcaggcccagattctgcaggggctcaggaaaggtgtggacgttcagcgattcaccgccgacgaccagtataagagggagacaattctcgggcttgctgagacccttgaagagtctgtatacagcattgccatctctctcgctcaaagatactcagtgagccggtgggaggtcttcatgacgcacctagagtttctattcacagatagcggcctgtcaacgctggagatagagaatcgcgcacaggacctacatctgtttgagacattaaaaacggaccctgaagcctttcaccagcacatggtcaagtatatctaccctactattggcggatttgaccacgagcgtctgcagtactactttactttacttgagaactgcggttgcgccgacctgggtaattgcgccatcaagccagagacacatatcagactactgaaaaaattcaaggttgtggccagcggtcttaactataagaaacttactgacgagaacatgagccccttagaagcattggaacctgttctgagttcacagaacatacttagtataagtaagctggttccgaagattcccgaaaaagatggccaaatgcttagcccgtcctcgctttacacgatctggctgcagaagctcttttggacgggggatcctcacctgatcaagcaagtcccgggatcatcccccgagtggcttcacgcctatgacgtatgtatgaagtactttgacagactgcacccaggcgacctgattaccgtggtcgatgccgtgacattcagccccaaagccgtaaccaaactgtcagtggaagccagaaaagagatgacaagaaaggcaatcaagaccgtcaagcactttattgagaagcccagaaaaaggaatagtgaagatgaagcccaggaggcaaaggactctaaggttacctacgctgatacactcaaccacctcgaaaaatctcttgcccacttggagacactctcccactcctttattttatcactcaagaactcagaacaagaaaccctacagaagtattcccacttgtatgatctgtcacggtctgagaaggaaaagctgcatgatgaggccgtcgccatctgtctggacgggcaacccctcgccatgatccagcaactcctcgaggtcgccgtgggccctttagacattagccctaaagacatagtccagagtgcgatcatgaagattatcagcgccttgtcaggtggcagcgctgacttggggggaccaagggatcccctgaaggtcctcgagggcgtggtggccgcagtccatgcctcagtggataaaggagaggaactcgttagccctgaggacttgcttgaatggttgcgtccattttgtgccgacgatgcttggccggtgcggcctagaatccacgtattgcaaattctggggcaaagttttcatctgaccgaagaggatagtaagcttctagtatttttcaggaccgaggccattctaaaggccagttggccacagaggcaggtagatattgccgatatcgagaatgaagaaaatcgctattgtctgttcatggagttgctggaaagcagccatcatgaggcagagttccaacaccttgttctgttgcttcaggcttggcctcccatgaaatctgaatacgtcattactaataatccctgggtgcgattagcgacagttatgctgactaggtgtacaatggagaataaagaaggtcttggaaacgaggtgctgaagatgtgcaggagtctctacaatactaaacagatgctccccgcagagggcgtgaaggaattatgcctcctcctattgaaccagtcactccttctccctagccttaagctcctcctggagtcacgcgatgagcatctgcacgagatggcgctcgagcaaattaccgccgtaacgactgtgaatgattctaattgcgatcaggagctccttagcctgcttctggatgctaaacttctggtgaaatgcgtgtcaacccccttctatccacgcatagtggatcatttgctggcaagcctgcagcaaggtagatgggatgcagaggagttgggacgccatctacgggaggctggacacgaggcagaagcaggaagtctactgctcgcagttcgcggtacccatcaggcctttagaaccttctctacagctctgcgggctgcacaacattgggtctag

SEQ ID NO: 188375 - DNA, 7116 bp, Artificial Sequence
  derived and/or modified sequence
atggccgcccccgagagcggccccgccctgagccccggcaccgccgagggcgaggaggagaccatcctgtacgacctgctggtgaacaccgagtggccccccgagaccgaggtgcagcccagaggcaaccagaagcacggcgccagcttcatcatcaccaaggccatcagagacagactgctgttcctgagacagtacatctggtacagccccgcccccttcctgctgcccgacggcctggtgagactggtgaacaagcagatcaactggcacctggtgctggccagcaacggcaagctgctggccgccgtgcaggaccagtgcgtggagatcagaagcgccaaggacgacttcaccagcatcatcggcaagtgccaggtgcccaaggaccccaagccccagtggagaagagtggcctggagctacgactgcaccctgctggcctacgccgagagcaccggcaccgtgagagtgttcgacctgatgggcagcgagctgttcgtgatcagccccgccagcagcttcatcggcgacctgagctacgccatcgccggcctgatcttcctggagtacaaggccagcgcccagtggagcgccgagctgctggtgatcaactacagaggcgagctgagaagctacctggtgagcgtgggcaccaaccagagctaccaggagagccactgcttcagcttcagcagccactacccccacggcatcaacaccgccatctaccaccccggccacagactgctgctggtgggcggctgcgagaccgccgaggtgggcatgagcaaggccagcagctgcggcctgagcgcctggagagtgctgagcggcagcccctactacaagcaggtgaccaacggcggcgacggcgtgaccgccgtgcccaagaccctgggcctgctgagaatgctgagcgtgaagttctacagcagacagggccaggagcaggacggcatcttcaagatgagcctgagccccgacggcatgctgctggccgccatccacttcagcggcaagctgagcatctgggccatccccagcctgaagcagcagggcgagtggggccagaacgagcagcccggctacgacgacctgaaccccgactggagactgagcaccgagaagagaaagaagatcaaggacaaggagagcttctaccccctgatcgacgtgaactggtgggccgacagcgccgtgaccctggccagatgcagcggcgccctgaccgtgagcagcgtgaagaccctgaagaacctgctgggcaagagctgcgagtggttcgagcccagcccccaggtgaccgccacccacgacggcggcttcctgagcctggagtgcgagatcaagctggcccccaagagaagcagactggagaccagagccggcgaggaggacgagggcgaggaggacagcgacagcgactacgagatcagcgccaaggccagatacttcggctacatcaagcagggcctgtacctggtgaccgagatggagagattcgccccccccagaaagagacccagaaccatcaccaagaactacagactggtgagcctgagaagcaccacccccgaggagctgtaccagagaaagatcgagagcgaggagtacgaggaggccctgagcctggcccacacctacggcctggacaccgacctggtgtaccagagacagtggagaaagagcgccgtgaacgtggccagcatccagaactacctgagcaagatcaagaagagaagctgggtgctgcacgagtgcctggagagagtgcccgagaacgtggacgccgccaaggagctgctgcagtacggcctgaagggcaccgacctggaggccctgctggccatcggcaagggcgccgacgacggcagattcaccctgcccggcgagatcgacatcgacagcatcagctacgaggagctgagcccccccgacgaggagcccgccaagaacaagaaggagaaggagctgaagaagagacaggagctgctgaagctggtgaacttcagcaagctgaccctggagcagaaggagctgtgcagatgcagaagaaagctgctgacctacctggacagactggccacctacgaggagatcctgggcgtgccccacgccagcgagcagagatacgacgccgagttcttcaagaagttcagaaaccagaacatcgtgctgagcgccagaacctacgcccaggagagcaacgtgcaggccctggagatcctgttcacctaccacggcagcgacctgctgccccacagactggccatcctgagcaacttccccgagaccaccagcccccacgagtacagcgtgctgctgcccgaggcctgcttcaacggcgacagcctgatgatcatcccctggcacgagcacaagcacagagccaaggactggtgcgaggagctggcctgcagaatggtggtggagcccaacctgcaggacgagagcgagttcctgtacgccgcccagcccgagctgctgagattcagaatgacccagctgaccgtggagaaggtgatggactggtaccagaccagagccgaggagatcgagcactacgccagacaggtggactgcgccctgagcctgatcagactgggcatggagagaaacatccccggcctgctggtgctgtgcgacaacctggtgaccctggagaccctggtgtacgaggccagatgcgacgtgaccctgaccctgaaggagctgcagcagatgaaggacatcgagaagctgagactgctgatgaacagctgcagcgaggacaagtacgtgaccagcgcctaccagtggatggtgcccttcctgcacagatgcgagaagcagagccccggcgtggccaacgagctgctgaaggagtacctggtgaccctggccaagggcgacctgaagttccccctgaagatcttccagcacagcaagcccgacctgcagcagaagatcatccccgaccaggaccagctgatggccatcgccctggagtgcatctacacctgcgagagaaacgaccagctgtgcctgtgctacgacctgctggagtgcctgcccgagagaggctacggcgacaagaccgaggccaccaccaagctgcacgacatggtggaccagctggagcagatcctgagcgtgagcgagctgctggagaagcacggcctggagaagcccatcagcttcgtgaagaacacccagagcagcagcgaggaggccagaaagctgatggtgagactgaccagacacaccggcagaaagcagccccccgtgagcgagagccactggagaaccctgctgcaggacatgctgaccatgcagcagaacgtgtacacctgcctggacagcgacgcctgctacgagatcttcaccgagagcctgctgtgcagcagcagactggagaacatccacctggccggccagatgatgcactgcagcgcctgcagcgagaacccccccgccggcatcgcccacaagggcaagccccactacagagtgagctacgagaagagcatcgacctggtgctggccgccagcagagagtacttcaacagcagcaccaacctgaccgacagctgcatggacctggccagatgctgcctgcagctgatcaccgacagaccccccgccatccaggaggagctggacctgatccaggccgtgggctgcctggaggagttcggcgtgaagatcctgcccctgcaggtgagactgtgccccgacagaatcagcctgatcaaggagtgcatcagccagagccccacctgctacaagcagagcaccaagctgctgggcctggccgagctgctgagagtggccggcgagaaccccgaggagagaagaggccaggtgctgatcctgctggtggagcaggccctgagattccacgactacaaggccgccagcatgcactgccaggagctgatggccaccggctaccccaagagctgggacgtgtgcagccagctgggccagagcgagggctaccaggacctggccaccagacaggagctgatggccttcgccctgacccactgcccccccagcagcatcgagctgctgctggccgccagcagcagcctgcagaccgagatcctgtaccagagagtgaacttccagatccaccacgagggcggcgagaacatcagcgccagccccctgaccagcaaggccgtgcaggaggacgaggtgggcgtgcccggcagcaacagcgccgacctgctgagatggaccaccgccaccaccatgaaggtgctgagcaacaccaccaccaccaccaaggccgtgctgcaggccgtgagcgacggccagtggtggaagaagagcctgacctacctgagacccctgcagggccagaagtgcggcggcgcctaccagatcggcaccaccgccaacgaggacctggagaagcagggctgccaccccttctacgagagcgtgatcagcaaccccttcgtggccgagagcgagggcacctacgacacctaccagcacgtgcccgtggagagcttcgccgaggtgctgctgagaaccggcaagctggccgaggccaagaacaagggcgaggtgttccccaccaccgaggtgctgctgcagctggccagcgaggccctgcccaacgacatgaccctggccctggcctacctgctggccctgccccaggtgctggacgccaacagatgcttcgagaagcagagccccagcgccctgagcctgcagctggccgcctactactacagcctgcagatctacgccagactggccccctgcttcagagacaagtgccaccccctgtacagagccgaccccaaggagctgatcaagatggtgaccagacacgtgaccagacacgagcacgaggcctggcccgaggacctgatcagcctgaccaagcagctgcactgctacaacgagagactgctggacttcacccaggcccagatcctgcagggcctgagaaagggcgtggacgtgcagagattcaccgccgacgaccagtacaagagagagaccatcctgggcctggccgagaccctggaggagagcgtgtacagcatcgccatcagcctggcccagagatacagcgtgagcagatgggaggtgttcatgacccacctggagttcctgttcaccgacagcggcctgagcaccctggagatcgagaacagagcccaggacctgcacctgttcgagaccctgaagaccgaccccgaggccttccaccagcacatggtgaagtacatctaccccaccatcggcggcttcgaccacgagagactgcagtactacttcaccctgctggagaactgcggctgcgccgacctgggcaactgcgccatcaagcccgagacccacatcagactgctgaagaagttcaaggtggtggccagcggcctgaactacaagaagctgaccgacgagaacatgagccccctggaggccctggagcccgtgctgagcagccagaacatcctgagcatcagcaagctggtgcccaagatccccgagaaggacggccagatgctgagccccagcagcctgtacaccatctggctgcagaagctgttctggaccggcgacccccacctgatcaagcaggtgcccggcagcagccccgagtggctgcacgcctacgacgtgtgcatgaagtacttcgacagactgcaccccggcgacctgatcaccgtggtggacgccgtgaccttcagccccaaggccgtgaccaagctgagcgtggaggccagaaaggagatgaccagaaaggccatcaagaccgtgaagcacttcatcgagaagcccagaaagagaaacagcgaggacgaggcccaggaggccaaggacagcaaggtgacctacgccgacaccctgaaccacctggagaagagcctggcccacctggagaccctgagccacagcttcatcctgagcctgaagaacagcgagcaggagaccctgcagaagtacagccacctgtacgacctgagcagaagcgagaaggagaagctgcacgacgaggccgtggccatctgcctggacggccagcccctggccatgatccagcagctgctggaggtggccgtgggccccctggacatcagccccaaggacatcgtgcagagcgccatcatgaagatcatcagcgccctgagcggcggcagcgccgacctgggcggccccagagaccccctgaaggtgctggagggcgtggtggccgccgtgcacgccagcgtggacaagggcgaggagctggtgagccccgaggacctgctggagtggctgagacccttctgcgccgacgacgcctggcccgtgagacccagaatccacgtgctgcagatcctgggccagagcttccacctgaccgaggaggacagcaagctgctggtgttcttcagaaccgaggccatcctgaaggccagctggccccagagacaggtggacatcgccgacatcgagaacgaggagaacagatactgcctgttcatggagctgctggagagcagccaccacgaggccgagttccagcacctggtgctgctgctgcaggcctggccccccatgaagagcgagtacgtgatcaccaacaacccctgggtgagactggccaccgtgatgctgaccagatgcaccatggagaacaaggagggcctgggcaacgaggtgctgaagatgtgcagaagcctgtacaacaccaagcagatgctgcccgccgagggcgtgaaggagctgtgcctgctgctgctgaaccagagcctgctgctgcccagcctgaagctgctgctggagagcagagacgagcacctgcacgagatggccctggagcagatcaccgccgtgaccaccgtgaacgacagcaactgcgaccaggagctgctgagcctgctgctggacgccaagctgctggtgaagtgcgtgagcacccccttctaccccagaatcgtggaccacctgctggccagcctgcagcagggcagatgggacgccgaggagctgggcagacacctgagagaggccggccacgaggccgaggccggcagcctgctgctggccgtgagaggcacccaccaggccttcagaaccttcagcaccgccctgagagccgcccagcactgggtgtag

SEQ ID NO: 188376 - protein, 746 aa, Artificial Sequence
  derived and/or modified sequence
MRREFCWDAYSKAAGSRASSPLPRQDRDSFCHQMSFCLTELHLWSLKNTLHIADRDIGIYQYYDKKDPPATEHGNLEKKQKLAESRDYPWTLKNRRPEKLRDSLKELEELMQNSRCVLSKWKNKYVCQLLFGSGVLVSLSLSGPQLEKVVIDRSLVGKLISDTISDALLTDSFIILSFLAQNKLCFIQFTKKMESSDVNKRLEKLSALDYKIFYYEIPGPINKTTERHLAINCVHDRVVCWWPLVNDDAWPWAPISSEKDRANLLLLGYAQGRLEVLSSVRTEWDPLDVRFGTKQPYQVFTVEHSVSVDKEPMADSCIYECIRNKIQCVSVTRIPLKSKAISCCRNVTEDKLILGCEDSSLILYETHRRVTLLAQTELLPSLISCHPSGAILLVGSNQGELQIFDMALSPINIQLLAEDRLPRETLQFSKLFDASSSLVQMQWIAPQVVSQKGEGSDIYDLLFLRFERGPLGVLLFKLGVFTRGQLGLIDIIFQYIHCDEIYEAINILSSMNWDTLGHQCFISMSAIVNHLLRQKLTPEREAQLETSLGTFYAPTRPLLDSTILEYRDQISKYARRFFHHLLRYQRFEKAFLLAVDVGARDLFMDIHYLALDKGELALAEVARKRASDIDAESITSGVELLGPLDRGDMLNEAFIGLSLAPQGEDSFPDNLPPSCPTHRHILQQRILNGSSNRQIIDRRNELEKDICSGFLMTNTCNAEDGELREDGREQEIRDGGSLKMIHFGLV

SEQ ID NO: 188377 - DNA, 2241 bp, Artificial Sequence
  derived and/or modified sequence
atgagaagagagttctgctgggacgcctacagcaaggccgccggcagcagagccagcagccccctgcccagacaggacagagacagcttctgccaccagatgagcttctgcctgaccgagctgcacctgtggagcctgaagaacaccctgcacatcgccgacagagacatcggcatctaccagtactacgacaagaaggacccccccgccaccgagcacggcaacctggagaagaagcagaagctggccgagagcagagactacccctggaccctgaagaacagaagacccgagaagctgagagacagcctgaaggagctggaggagctgatgcagaacagcagatgcgtgctgagcaagtggaagaacaagtacgtgtgccagctgctgttcggcagcggcgtgctggtgagcctgagcctgagcggcccccagctggagaaggtggtgatcgacagaagcctggtgggcaagctgatcagcgacaccatcagcgacgccctgctgaccgacagcttcatcatcctgagcttcctggcccagaacaagctgtgcttcatccagttcaccaagaagatggagagcagcgacgtgaacaagagactggagaagctgagcgccctggactacaagatcttctactacgagatccccggccccatcaacaagaccaccgagagacacctggccatcaactgcgtgcacgacagagtggtgtgctggtggcccctggtgaacgacgacgcctggccctgggcccccatcagcagcgagaaggacagagccaacctgctgctgctgggctacgcccagggcagactggaggtgctgagcagcgtgagaaccgagtgggaccccctggacgtgagattcggcaccaagcagccctaccaggtgttcaccgtggagcacagcgtgagcgtggacaaggagcccatggccgacagctgcatctacgagtgcatcagaaacaagatccagtgcgtgagcgtgaccagaatccccctgaagagcaaggccatcagctgctgcagaaacgtgaccgaggacaagctgatcctgggctgcgaggacagcagcctgatcctgtacgagacccacagaagagtgaccctgctggcccagaccgagctgctgcccagcctgatcagctgccaccccagcggcgccatcctgctggtgggcagcaaccagggcgagctgcagatcttcgacatggccctgagccccatcaacatccagctgctggccgaggacagactgcccagagagaccctgcagttcagcaagctgttcgacgccagcagcagcctggtgcagatgcagtggatcgccccccaggtggtgagccagaagggcgagggcagcgacatctacgacctgctgttcctgagattcgagagaggccccctgggcgtgctgctgttcaagctgggcgtgttcaccagaggccagctgggcctgatcgacatcatcttccagtacatccactgcgacgagatctacgaggccatcaacatcctgagcagcatgaactgggacaccctgggccaccagtgcttcatcagcatgagcgccatcgtgaaccacctgctgagacagaagctgacccccgagagagaggcccagctggagaccagcctgggcaccttctacgcccccaccagacccctgctggacagcaccatcctggagtacagagaccagatcagcaagtacgccagaagattcttccaccacctgctgagataccagagattcgagaaggccttcctgctggccgtggacgtgggcgccagagacctgttcatggacatccactacctggccctggacaagggcgagctggccctggccgaggtggccagaaagagagccagcgacatcgacgccgagagcatcaccagcggcgtggagctgctgggccccctggacagaggcgacatgctgaacgaggccttcatcggcctgagcctggccccccagggcgaggacagcttccccgacaacctgccccccagctgccccacccacagacacatcctgcagcagagaatcctgaacggcagcagcaacagacagatcatcgacagaagaaacgagctggagaaggacatctgcagcggcttcctgatgaccaacacctgcaacgccgaggacggcgagctgagagaggacggcagagagcaggagatcagagacggcggcagcctgaagatgatccacttcggcctggtgtag

SEQ ID NO: 188378 - DNA, 2241 bp, Artificial Sequence
  derived and/or modified sequence
atgcgacgggagttttgctgggacgcttattcaaaggccgcaggatcgcgggcctcaagtcctttacctaggcaggatcgggacagcttctgccaccagatgtccttttgtctgactgagctccacctttggagtctgaaaaatacgctgcacatcgccgaccgcgacattggtatctatcagtattacgataaaaaggacccccctgcaaccgaacatggaaatctggagaaaaagcaaaagcttgccgaaagccgcgactatccctggacccttaagaatcggcggccagaaaaactgcgggacagtcttaaagagctagaagagctcatgcagaactcgagatgtgtcctgtcaaaatggaagaataaatatgtttgtcaactgctctttggctctggtgtcctggtgtccctctccttgtccggcccacaactagagaaggtagttatcgatagatctcttgttggcaaacttatctccgacaccatatccgacgcacttctcactgactcattcattatcctatcttttcttgcgcagaataagctgtgctttattcagtttacaaagaaaatggaaagtagcgatgtgaacaagcgcctggaaaaactttccgcattggattacaagatcttttattacgagatcccgggcccgatcaacaaaaccaccgaaaggcaccttgccatcaattgcgttcatgatagagtagtctgttggtggccactagttaacgatgatgcttggccttgggccccgatctcttcagagaaggatcgcgccaatctcttactgctggggtacgcccaggggcgattagaagtacttagctccgtgaggacagagtgggaccctttggatgtccgatttggaaccaagcagccttaccaagttttcacagttgaacacagtgtctctgtggacaaggaacccatggccgacagctgcatatatgaatgtatccgtaacaaaattcaatgtgtctccgtgacgagaataccccttaagtcaaaggcaatatcctgctgccgcaatgtcacagaagataagctgatcctggggtgcgaggatagttctctcatcctgtacgaaactcacaggcgggtcactttactggcacaaacggaacttctcccatctctcattagctgtcacccttccggcgcaatcctgctggttggatcaaaccaaggtgagctccagatctttgacatggccctaagcccaataaatattcagctcctcgctgaagataggttgcctagggaaacactgcaattttccaaattatttgacgcctcctcatcactagtgcagatgcagtggatcgccccacaggtcgtctctcagaaaggagagggtagtgacatttatgatctgctcttcctgcgctttgaaagagggccgttgggtgtgctcctgttcaaactaggggtgttcacacgcgggcaactggggctcatagacattatcttccaatacatccattgtgatgagatctatgaagcaatcaatatcctttcatcaatgaattgggacacactgggccatcagtgttttatcagcatgagtgccattgttaatcacctactgcgacagaagcttactcctgagcgagaggcccaactcgaaacctccctgggaacattttacgcacccaccagacccctgttggattctaccatcctcgaataccgcgaccagatatccaaatatgcaagaagattctttcatcaccttctgaggtatcaacggttcgaaaaagccttcctcctcgccgtggacgtcggcgccagagacctgttcatggacatccattacttagccctagataaaggtgagctggcgctggcagaggttgctcggaagagggcatctgatatcgatgccgagtcgattacttctggagtcgagctgctcggtcctctagacagaggcgacatgttaaacgaggccttcattgggctgtctctggctccacaaggcgaggattcgttcccagacaatctgccaccctcctgccctacgcatcgtcacatactccagcaacgaatcttgaatggctcttctaatagacaaataattgaccggaggaatgaacttgaaaaagacatctgttcggggtttctaatgacgaatacctgcaacgcggaagacggagagttgagagaagatggtcgcgagcaagagattcgtgacggagggtctttgaagatgattcattttgggctggtgtag

SEQ ID NO: 188379 - DNA, 2241 bp, Artificial Sequence
  derived and/or modified sequence
atgaggcgggagttctgctgggatgcctacagcaaggccgccggcagccgggccagcagccccctgccccggcaggaccgggacagcttctgccaccagatgtccttctgcctgacagagctgcacctgtggagcctgaagaacaccctgcacatcgctgaccgggacatcggcatctaccagtactatgacaagaaggaccccccagccacagaacatggcaacctggagaagaagcagaagctggccgagagccgggactacccctggaccctgaagaacagaagacctgagaagctgcgggacagcctgaaggagctggaggagctgatgcagaacagccgctgtgtgctgagcaagtggaagaacaagtatgtgtgccagctgctgtttggaagtggagtgctggtgtccctgagcctgagcggcccccagctggagaaggtggtgattgacaggagcctggtgggcaagctgatcagtgacaccatcagtgatgccctgctgacagacagcttcatcatcctgtccttcctggcccagaacaagctgtgcttcatccagttcaccaagaagatggagagcagtgatgtgaacaagaggctggagaagctgagcgccctggactacaagatcttctactatgagatccctggccccatcaacaagaccacagagcggcacctggccatcaactgtgtgcatgacagagtggtgtgctggtggcccctggtgaatgatgatgcctggccctgggcccccatcagcagcgagaaggaccgggccaacctgctgctgctgggctacgcccagggccgcctggaggtgctgagctctgtgaggacagagtgggaccccctggatgtgcgcttcggcaccaagcagccctaccaggtgttcaccgtggagcacagcgtgtctgtggacaaggagcccatggctgacagctgcatctatgagtgcatccggaacaagatccagtgtgtgtctgtgacccgcatccccctgaagagcaaggccatcagctgctgcagaaatgtgacagaggacaagctgatcctgggctgtgaggacagcagcctcatcctgtatgagacccaccggcgggtgaccctgctggcccagacagagctgctgcccagcctcatcagctgccaccccagcggggccatcctgctggtgggcagcaaccagggcgagctgcagatctttgacatggccctgagccccatcaacatccagctgctggccgaggaccggctgccccgggagaccctgcagttcagcaagctgtttgatgccagcagcagcctggtgcagatgcagtggatcgccccccaggtggtgtcccagaagggggagggcagtgacatctatgacctgctcttcctgcgctttgagcggggccccctgggcgtgctgctcttcaagctgggcgtcttcacccggggccagctgggcctgattgacatcatcttccagtacatccactgtgatgagatctatgaggccatcaacatcctgagctccatgaactgggacaccctgggccaccagtgcttcatctccatgtctgccatcgtgaaccacctgctgcggcagaagctgaccccagagcgggaggcccagctggagaccagcctgggcaccttctacgcccccacccggcccctgctggacagcaccatcctggagtacagagaccagatcagcaaatatgcccggcgcttcttccaccacctgctgcgctaccagagatttgagaaggccttcctgctggccgtggatgtgggcgcccgggacctcttcatggacatccactacctggccctggacaagggggagctggccctggccgaggtggccaggaagagggccagtgacattgatgctgagagcatcaccagcggcgtggagctgctgggccccctggacagaggagacatgctgaatgaggccttcatcggcctgagcctggccccccagggcgaggacagcttcccagacaacctgccccccagctgccccacccaccgccacatcctgcagcagaggatcctgaatggcagcagcaaccggcagatcatcgacagaagaaatgagctggagaaggacatctgcagcggcttcctgatgaccaacacctgcaatgcagaagatggagagctgagagaagatggccgggagcaggagatcagagatggcggcagcctgaagatgatccacttcggcctggtgtag

SEQ ID NO: 188380 - DNA, 2241 bp, Artificial Sequence
  derived and/or modified sequence
atgcggcgggagttctgctgggacgcctacagcaaggccgccggctccagggcttccagcccgctaccccgtcaggaccgcgactctttctgccaccaaatgtcgttctgtctgaccgagctccacctgtggagccttaaaaatactctccatatcgccgatcgggatatagggatttatcagtactacgataaaaaggacccacccgcaacagagcatggcaatctcgagaaaaagcagaagctcgccgagagcagagactacccatggacgctgaagaacagacggcctgagaaacttcgcgactcgctaaaggagctggaggagctgatgcagaatagccggtgtgtgttgtccaaatggaagaataaatacgtgtgtcaactgctgtttggtagtggtgttttggtatcactctcactgagcggaccccagctcgagaaggtagtgatcgaccgtagcctcgtgggcaagctgatcagcgatacaatcagcgatgccctcctcaccgactctttcatcatcctctcattcctagcacagaataagttatgctttatccagtttactaagaagatggagagttctgacgtcaacaagaggctcgaaaaactgtccgctctcgattacaagattttctattatgaaatccctggccctatcaataaaacaacagaacgtcatctcgctattaactgcgtgcacgacagagtggtctgttggtggccactcgtgaatgatgacgcatggccttgggccccaatctcaagcgagaaggaccgcgctaacctcctgctgctggggtacgcacagggacgcctagaagtcctcagctcagttcggaccgagtgggatccactggacgtaaggtttggtactaagcagccgtaccaggttttcacagtggagcactcagtctctgttgacaaagagcccatggccgattcttgtatctatgaatgcataagaaataaaatacaatgtgtgagtgtcacgaggattcctctgaaatccaaggccatttcttgctgcaggaatgtgaccgaagacaagctgattctgggatgcgaggattcaagcctgattttgtatgagactcaccgaagagtgactttgctcgctcagacggaactattgccgtccttgatcagttgccatccctctggggccattttacttgttggatcgaaccagggcgagctgcagatcttcgacatggccctgagtccaattaacattcagcttctggctgaggaccggctgccccgcgagacactccagtttagcaagctctttgacgctagctcgtcccttgtgcagatgcagtggatcgcacctcaggtcgttagccaaaagggagaggggagcgacatttacgacttgctgttcctgaggttcgaacgggggccactgggcgtattgctatttaagctcggcgtgtttacgaggggacagctgggcctgattgatatcatcttccagtacatacactgcgatgagatttacgaagcgattaacatcctaagtagcatgaactgggacacattggggcaccaatgcttcatttcgatgtccgccattgtgaatcacttacttcgtcagaaactaacacccgagcgggaggcccagttagagaccagcctggggacattttacgctcccaccaggccactccttgattctaccattttagagtaccgtgatcagatctcaaaatatgctcgacggttttttcatcatctgctgcgataccagcgatttgagaaagcctttctgttggcggtcgacgtcggggctcgcgacctgtttatggatattcattatctcgctctggacaagggcgaacttgcccttgctgaggtcgcacggaagagagcaagcgatatcgacgctgagtctattactagcggcgtggagctgcttgggcccctggatagaggtgatatgctcaatgaggcctttatcggtctatctctagctccacaaggcgaggattctttccccgataacctgcctccgtcttgccccacacatcgtcatatcctgcagcaaaggatcctaaatgggtctagtaatcgccaaatcattgataggagaaatgagctggagaaggatatttgtagtggcttcctcatgaccaacacctgtaacgcagaggacggggaacttagagaagacggcagagagcaagaaattagggatggggggtcgctgaagatgatccattttggcctggtttag

SEQ ID NO: 188381 - DNA, 2241 bp, Artificial Sequence
  derived and/or modified sequence
atgcgcagggagttctgttgggatgcctattctaaggcagccggaagcagggctagcagtccacttccacgacaggacagagatagcttctgccatcagatgtctttttgtctgacagagctacatctctggtcgctcaaaaatactctgcatatcgcagaccgagacattggaatctaccagtattatgacaaaaaagaccctcccgctactgagcacggcaacctggaaaaaaaacagaagctggctgaatccagagactacccttggaccctgaagaatcggaggcccgaaaaactcagagattcactcaaggagctggaagagctcatgcaaaacagccgctgtgtcctgagcaagtggaagaataagtacgtgtgtcagctgctgttcggatccggagttctggtgtcactgtcactgtctgggccacagctggagaaagtcgtgattgacagatctttggtgggaaagctcatctctgacactatatcagacgctttgctgaccgactcttttataattctctcttttctggcacagaataagctgtgtttcatccagtttaccaaaaagatggaatcctccgacgtaaataaacgcttggagaaattgagcgcactcgattataagattttctactacgaaattcctgggccaatcaacaaaaccactgagcggcatctggctataaactgtgtacacgaccgggtagtgtgttggtggccacttgtcaatgacgacgcctggccttgggcaccaatctctagtgagaaggaccgggcaaacttgttgctgttaggctacgcccaaggccgtttagaagtgctctctagcgtgcggactgaatgggatcccctcgacgtgcggtttgggacaaagcagccgtatcaagtcttcacagtcgaacattccgtgtccgtggacaaggagcccatggccgactcatgtatttacgagtgtatcaggaataaaattcagtgcgtatctgttactaggatcccactgaaaagcaaggccatcagttgctgccggaacgtcaccgaggacaagctgatcttgggatgcgaggacagctccctaatactgtacgagactcatcgccgtgtcacccttttggcccagaccgagttgctgccctccttgatcagctgtcacccgtctggcgcaattctgctggtcggcagcaatcagggtgagctccaaattttcgatatggctttatccccaatcaacatccagctactcgcagaagaccggctgccacgcgagacgcttcagtttagcaagcttttcgacgcctcttctagtctcgtgcagatgcagtggattgcccctcaggtcgtgtctcagaaaggcgaaggatcagatatttacgacctcctttttctgcggttcgaaagagggcctcttggagtcttgttattcaagctaggtgttttcacgcgcggtcagcttggtctcattgatatcatttttcagtacatccattgtgatgaaatctacgaagctattaacatactgtccagtatgaactgggacacgctgggccatcagtgctttatctcaatgtctgctatcgtgaaccatctcctgagacagaaattgacacctgagagagaggcacagttggaaactagtctaggtacattctatgcccctacccgtccccttctcgattctacaattttagaataccgagaccaaattagtaagtatgctaggcgtttttttcatcatctcctgcggtatcagcgatttgaaaaagctttcctgctcgctgtagacgtgggagcgagagatttatttatggacatccattatttagcactggacaaaggcgaattggcactggctgaggttgctagaaagcgggcaagtgacatcgacgccgaatctattacttcgggggttgagttgctgggccctctggataggggcgacatgctaaacgaggctttcatcggcttatccttggcccctcagggcgaagacagtttccctgacaatttgccgcctagctgtcccacccacaggcatattctgcagcagcgaatactgaacgggtcttccaacagacagattatcgacagaagaaatgagctggaaaaggatatctgttccggtttccttatgaccaacacgtgcaacgctgaagatggtgagttgagggaggacggcagagaacaggaaattagagacgggggatccttgaagatgattcattttggactcgtgtag

SEQ ID NO: 188382 - DNA, 3392 bp, Artificial Sequence
  derived and/or modified sequence
actgcgctctgcgccgattgcaaagtagtccctgaggatgagcccctgtgattggaggacgacaacaaacggatggtttgggctcaggaggaaaggacctgcctgatggagcccggcaattggcgggagagatagcgtgtgtaactctagggaggggagaatcaccccttagcgacatcacccccacgcgcgtgactgagactgcatcctcccatgagggtaaacgtgggaggtaaagagaccttccgctgcgtaaagctggatcgacccggaaacaaaatcttttaaaaaacgattgacactctggaggggcgggggaattgataagttgggacgaccggacagcttctcaggttgctaagcgacgaggcgggagcgcacgcacaccctggctgctttgtagcacctgaggaaactgtggcggcggcggcggcgtcctggagacccaagagaccaagcgagcgtgtcgctccctctcgggtccgaggacctagcctaggaaccttctgcccggggtagtgtctggtgatgaggcgagagttttgctgggacgcctactccaaagcggccgggagtcgcgcttcttccccactcccgagacaggatagagattccttctgccatcagatgtctttctgcttgactgaactgcacctgtggtctttgaagaataccttacacattgcggatagagacattgggatctaccagtattatgacaagaaagatccaccagcgacagagcatggtaacttagaaaagaagcagaagctggcagagtcacgagattatccttggacgctcaaaaacagacgcccagaaaaactccgagactcgctcaaagagttggaggagctgatgcaaaacagtcggtgtgtgctgagcaaatggaagaacaaatatgtctgtcagctcctttttggttcaggtgtgctggtgtctctaagcctttctgggccgcagctggagaaagtggtgattgacagaagcctggtggggaagctcatctcagacaccatcagtgatgctcttctcacagacagttttatcatcttatcatttttggcacaaaacaaactatgttttattcagtttaccaagaagatggagtcttctgatgtaaacaaaagactggaaaaactctcagccttggattataagattttctattatgaaatacccggcccaataaacaagacaacagagcgacatctagctatcaactgtgttcatgatagagttgtttgctggtggccactggtcaacgatgatgcttggccttgggcccccatttcttctgagaaggacagagccaatctactcctcctgggttatgctcaaggaagactagaggttctgagttctgtccgcacagaatgggacccactggatgttcgctttggcaccaaacagccttatcaggtgttcacagtggagcactccgtaagtgtagacaaagagcccatggctgacagctgcatctatgaatgcattcggaataaaatccagtgtgtgtcagtcaccagaataccactaaagtcaaaggccatcagctgctgcaggaatgttactgaagacaaactgattctgggctgtgaagattcttcgctaattctttatgaaactcaccgtagagtgactctcttagcacagactgaacttttgccttcattaataagctgccacccaagtggtgccattctgctagttggcagcaaccaaggggagttgcaaatttttgatatggctctatcccctattaacatccaactgttggctgaagaccgcttacccagggagactctgcaattcagtaaattatttgatgcctccagcagtcttgttcaaatgcaatggatagctcctcaggttgtttctcagaagggtgaaggtagtgatatctatgatctcctcttcctcaggtttgaaagaggacctttgggtgtgctgttgtttaaactaggcgtcttcactcgaggacagctgggcctgatagacatcatcttccagtacattcactgtgatgagatctatgaggcaataaacatcctgagcagcatgaactgggacactctgggccaccagtgctttatcagcatgagcgccattgtaaaccatcttcttagacagaagctcactccagagagagaagcacagcttgagacaagccttggaaccttctatgctccaacaagaccacttctggattccactatattggaatatagagatcaaatcagcaaatatgcaaggagattcttccatcacttgctcaggtaccagaggtttgaaaaggcatttctcctagctgttgacgttggtgctcgtgacctctttatggatattcattaccttgcactagataaaggtgaattggcactagctgaagtggcaagaaaaagagctagtgacattgatgcagaatcaataacctctggggttgaactcctgggacccttggacagaggggatatgctaaatgaagcatttattggcctgtctttagcacctcaaggagaagactcatttccagataacctccctccctcttgcccaacccacagacatattttacaacaaagaatactgaatggctcttctaacagacaaataattgacagaaggaatgaacttgaaaaagacatctgttctggatttttgatgactaatacctgtaatgcagaagacggagaactgagagaagacggcagagaacaggaaatcagagatggtggttctctcaaaatgattcactttggtctggtgtaaacattaagaaaaaaagaaaactgccttcttcatatctaaacttttcatggcctgatacagacttaaaatcccccgtgtggatttttaacaagagacagtatgaatcatataaattagttaagagttttgagttgagtgtttgttttcaaaataaagttttattatttcaaaaacatgcagcataacagcaaagtgatcgtaagtaaaagtcttcaacctacttattttcaataatgtaaaattttgaaagtgtcttaaattgtatgttaattaggtgctacaaaaatagaatatttaaactttgttctcccaggtactttaaaaaaggggcagtagggggcaggcatagtgctcatgcctgtagtcccagtgctttaggaggccaaggctgaaggatcacttgagcccaggagttcaagactagcctgtgcaacatagtgaaacgctgtctctagaaaaaattttaaaaattagccaggcatggtggtacatgcttgtgaagctgaggcagaagaattgcttgagcccaggagttcaaggctacagtgagctgtgatcgcgccactgcactctaacctgggcaacagagagtgaccctgtctccaaaaaaaaaaaaaaaaaaa

SEQ ID NO: 188383 - protein, 1406 aa, Artificial Sequence
  derived and/or modified sequence
MSEIQGTVEFSVELHKFYNVDLFQRGYYQIRVTLKVSSRIPHRLSASIAGQTESSSLHSACVHDSTVHSRVFQILYRNEEVPINDAVVFRVHLLLGGERMEDALSEVDFQLKVDLHFTDSEQQLRDVAGAPMVSSRTLGLHFHPRNGLHHQVPVMFDYFHLSVISVTVHAALVALQQPLISFTRPGRGSWLGKGGPDTGQEQSIISLENLVFGAGYCKPTSSEGSFYITSENCMQHAHKWHRDLCLLLLHAYRGLRLHFLVIMRDIPELPHTELEALAVEETLSQLCSELQMLNNPEKIAEQISKDLAWLTSHMMTLWTQFLDTVTLHSQVTTYLTQEHHTLRVRRFSEAFFYMEHQKLAVLTFQENLIQTHSQLSLDIRNSEYLTSMPPLPAECLDIDGDWNTLPVIFEDRYVDCPATGHNLSVYPNFDVPVTSPTIMNLKDKEDNCMVNSNLSFREDLVLSTIKPSQMDSDEEVIRCPEPGENVATQNHMDMCSESQVYISIGEFQNKAGVPEDECWTGQTSDAGTYPVADVDTSRRSPGPEDGQAPVLTYIDVKSSNKNPSRAEPLVAFNAQHESRSSRDKYGLDRTGLSKVVVGGSHQNAISSDKTTLHELSTLGKGIDQEGKMVLLSLKLTPSEPCDPLSSTLREPLDIRSSLKDSHTEEQEELSVLSGVIKRSSSIISDSGIESEPSSVAWSEARSRALELPSDREVLHPFVRRHALHRNSLEGGHTESNTSLPSGIQASLTSISSLPFEEDEREVALTKLTKSVSAPHISSPEEAAEDADTKQQDGGFAEPSDMHSKSQGSPGSCSQLCGDSGTDAGADHPLVEIVLDADNQQGPGYIDIPKGKGKQFDAQGHCLPDGRTENTPGVETKGLNLKIPRVIALENPRTRSLHRALEETPKGMPKDLNVGQQALSNSGISEVEGLSQHQVPELSCTSAADAINRNSTGQQSQSGSPCIMDDTAFNRGVNAFPEAKHKAGTVCPTVTHSVHSQVLKNQELKAGTSIMGSHLTSAETFTLDSLKAVEVVNLSVSCTATCLPFSSVPKETPARAGFSSKQTLFPITHQPLGSFGVVSTHSSTLDEEVSERMFSFYQAKEKFKKELKIEGFLYSDLTVLASDIPYFPPEEEEENLEDGIHLVVCVHGLDGNSADLRLVKTFIELGLPGGKLDFLMSEKNQMDTFADFDTMTDRLLDEIIQHIQLYNLSISRISFIGHSLGNIIIRSVLTRPRFRYYLNKLHTFLSLSGPHLGTLYNNSTLVSTGLWLMQKLKKSGSLLQLTFRDNADLRKCFLYQLSQKTGLQYFKNVVLVASPQDRYVPFHSARIEMCKTALKDRHTGPVYAEMINNLLGPLVEAKDCTLIRHNVFHALPNTANTLIGRAAHIAVLDSELFLEKFFLVAGLNYFK

SEQ ID NO: 188384 - DNA, 4221 bp, Artificial Sequence
  derived and/or modified sequence
atgagcgagatccagggcaccgtggagttcagcgtggagctgcacaagttctacaacgtggacctgttccagagaggctactaccagatcagagtgaccctgaaggtgagcagcagaatcccccacagactgagcgccagcatcgccggccagaccgagagcagcagcctgcacagcgcctgcgtgcacgacagcaccgtgcacagcagagtgttccagatcctgtacagaaacgaggaggtgcccatcaacgacgccgtggtgttcagagtgcacctgctgctgggcggcgagagaatggaggacgccctgagcgaggtggacttccagctgaaggtggacctgcacttcaccgacagcgagcagcagctgagagacgtggccggcgcccccatggtgagcagcagaaccctgggcctgcacttccaccccagaaacggcctgcaccaccaggtgcccgtgatgttcgactacttccacctgagcgtgatcagcgtgaccgtgcacgccgccctggtggccctgcagcagcccctgatcagcttcaccagacccggcagaggcagctggctgggcaagggcggccccgacaccggccaggagcagagcatcatcagcctggagaacctggtgttcggcgccggctactgcaagcccaccagcagcgagggcagcttctacatcaccagcgagaactgcatgcagcacgcccacaagtggcacagagacctgtgcctgctgctgctgcacgcctacagaggcctgagactgcacttcctggtgatcatgagagacatccccgagctgccccacaccgagctggaggccctggccgtggaggagaccctgagccagctgtgcagcgagctgcagatgctgaacaaccccgagaagatcgccgagcagatcagcaaggacctggcctggctgaccagccacatgatgaccctgtggacccagttcctggacaccgtgaccctgcacagccaggtgaccacctacctgacccaggagcaccacaccctgagagtgagaagattcagcgaggccttcttctacatggagcaccagaagctggccgtgctgaccttccaggagaacctgatccagacccacagccagctgagcctggacatcagaaacagcgagtacctgaccagcatgccccccctgcccgccgagtgcctggacatcgacggcgactggaacaccctgcccgtgatcttcgaggacagatacgtggactgccccgccaccggccacaacctgagcgtgtaccccaacttcgacgtgcccgtgaccagccccaccatcatgaacctgaaggacaaggaggacaactgcatggtgaacagcaacctgagcttcagagaggacctggtgctgagcaccatcaagcccagccagatggacagcgacgaggaggtgatcagatgccccgagcccggcgagaacgtggccacccagaaccacatggacatgtgcagcgagagccaggtgtacatcagcatcggcgagttccagaacaaggccggcgtgcccgaggacgagtgctggaccggccagaccagcgacgccggcacctaccccgtggccgacgtggacaccagcagaagaagccccggccccgaggacggccaggcccccgtgctgacctacatcgacgtgaagagcagcaacaagaaccccagcagagccgagcccctggtggccttcaacgcccagcacgagagcagaagcagcagagacaagtacggcctggacagaaccggcctgagcaaggtggtggtgggcggcagccaccagaacgccatcagcagcgacaagaccaccctgcacgagctgagcaccctgggcaagggcatcgaccaggagggcaagatggtgctgctgagcctgaagctgacccccagcgagccctgcgaccccctgagcagcaccctgagagagcccctggacatcagaagcagcctgaaggacagccacaccgaggagcaggaggagctgagcgtgctgagcggcgtgatcaagagaagcagcagcatcatcagcgacagcggcatcgagagcgagcccagcagcgtggcctggagcgaggccagaagcagagccctggagctgcccagcgacagagaggtgctgcaccccttcgtgagaagacacgccctgcacagaaacagcctggagggcggccacaccgagagcaacaccagcctgcccagcggcatccaggccagcctgaccagcatcagcagcctgcccttcgaggaggacgagagagaggtggccctgaccaagctgaccaagagcgtgagcgccccccacatcagcagccccgaggaggccgccgaggacgccgacaccaagcagcaggacggcggcttcgccgagcccagcgacatgcacagcaagagccagggcagccccggcagctgcagccagctgtgcggcgacagcggcaccgacgccggcgccgaccaccccctggtggagatcgtgctggacgccgacaaccagcagggccccggctacatcgacatccccaagggcaagggcaagcagttcgacgcccagggccactgcctgcccgacggcagaaccgagaacacccccggcgtggagaccaagggcctgaacctgaagatccccagagtgatcgccctggagaaccccagaaccagaagcctgcacagagccctggaggagacccccaagggcatgcccaaggacctgaacgtgggccagcaggccctgagcaacagcggcatcagcgaggtggagggcctgagccagcaccaggtgcccgagctgagctgcaccagcgccgccgacgccatcaacagaaacagcaccggccagcagagccagagcggcagcccctgcatcatggacgacaccgccttcaacagaggcgtgaacgccttccccgaggccaagcacaaggccggcaccgtgtgccccaccgtgacccacagcgtgcacagccaggtgctgaagaaccaggagctgaaggccggcaccagcatcatgggcagccacctgaccagcgccgagaccttcaccctggacagcctgaaggccgtggaggtggtgaacctgagcgtgagctgcaccgccacctgcctgcccttcagcagcgtgcccaaggagacccccgccagagccggcttcagcagcaagcagaccctgttccccatcacccaccagcccctgggcagcttcggcgtggtgagcacccacagcagcaccctggacgaggaggtgagcgagagaatgttcagcttctaccaggccaaggagaagttcaagaaggagctgaagatcgagggcttcctgtacagcgacctgaccgtgctggccagcgacatcccctacttcccccccgaggaggaggaggagaacctggaggacggcatccacctggtggtgtgcgtgcacggcctggacggcaacagcgccgacctgagactggtgaagaccttcatcgagctgggcctgcccggcggcaagctggacttcctgatgagcgagaagaaccagatggacaccttcgccgacttcgacaccatgaccgacagactgctggacgagatcatccagcacatccagctgtacaacctgagcatcagcagaatcagcttcatcggccacagcctgggcaacatcatcatcagaagcgtgctgaccagacccagattcagatactacctgaacaagctgcacaccttcctgagcctgagcggcccccacctgggcaccctgtacaacaacagcaccctggtgagcaccggcctgtggctgatgcagaagctgaagaagagcggcagcctgctgcagctgaccttcagagacaacgccgacctgagaaagtgcttcctgtaccagctgagccagaagaccggcctgcagtacttcaagaacgtggtgctggtggccagcccccaggacagatacgtgcccttccacagcgccagaatcgagatgtgcaagaccgccctgaaggacagacacaccggccccgtgtacgccgagatgatcaacaacctgctgggccccctggtggaggccaaggactgcaccctgatcagacacaacgtgttccacgccctgcccaacaccgccaacaccctgatcggcagagccgcccacatcgccgtgctggacagcgagctgttcctggagaagttcttcctggtggccggcctgaactacttcaagtag

SEQ ID NO: 188385 - DNA, 6962 bp, Artificial Sequence
  derived and/or modified sequence
aacaccagctcgcaggtgctgcggactccccagtccgcccgccgccgccgccgccgcaactgttggcggccagagacggcgaaagaggagagagagggacccaggagcgcggcccccgggggagagagaggggagccctgcagtggagacaggtaatgagccaaaaagatcatgtctgaaatacaaggaacggttgagttttcggtagagctacataaattttataatgtggatctctttcagagagggtattaccagatccgagtgaccttgaaggtgtcttcaaggatcccccacagactgagtgcctccatcgctgggcagacagagagcagcagcctgcattcagcctgtgtccatgacagcaccgtgcacagccgggtctttcagatcttataccggaatgaagaggtacccataaatgatgctgtggtcttccgagttcatttactcttgggtggtgaaaggatggaagacgcactgagtgaagtagattttcaactcaaggtggatctgcactttacggacagtgaacagcagttgagggatgtggctggggcaccgatggtcagcagccgaacgcttggcctgcacttccacccccggaatggtctgcaccaccaggtcccggtcatgttcgactatttccacctgtctgtgatctcggtgaccgtccatgctgccctggtggctctgcagcagccattgatcagttttactcgtccaggaagaggctcctggcttggtaaaggtggcccagacaccggacaagaacagtctatcatttctctggaaaacttggtctttggagctgggtactgcaagccgacttcctcagagggaagcttctacatcacctctgagaactgcatgcagcacgcacacaagtggcaccgagacctgtgcctgttgctcctccacgcttaccggggtctccgtctccacttcctggtgatcatgcgggacatcccagagctgccacacacggagctggaggcccttgctgttgaagaaacactttctcagctgtgctcagagctacagatgttgaacaatccagagaagatcgctgagcagataagcaaggatctggcctggctcacgtcccacatgatgactctgtggacccagttcctggacacagtcactctgcactcccaagtgaccacttatctcacccaggaacaccacaccctgagggtccgaaggttttctgaggccttcttttacatggagcaccaaaaacttgcagtcctgacatttcaggagaatctgatacagacgcacagccagctgtccctggatatccggaactcggagtacctcactagcatgcccccgctgcctgcagagtgcctggacatcgacggcgattggaacaccctgccggtgatctttgaggacagatacgtggactgccctgcgacagggcataacttgagtgtttatcctaattttgatgttccagtgacaagtcctacaataatgaatctgaaagacaaggaagataactgtatggtaaatagcaatttatcttttagggaagaccttgtcttgtctaccataaaaccatcccaaatggattctgatgaagaagttataaggtgtccagagccaggtgagaatgtggccacacaaaatcatatggacatgtgctctgaatctcaggtgtatatatcaattggtgaatttcaaaacaaagcaggtgtgcctgaagatgaatgttggactggccaaacatctgatgctgggacatatccagtggcagatgtggatacttctagaaggagtccaggtccagaggatggacaggccccagtgctgacctacattgacgtaaaatctagcaataagaacccctccagagctgaacccctggtggccttcaatgctcagcatgagagtaggagctctagagataagtatggattagacaggactgggctaagcaaagtggtagtaggtggaagccaccaaaatgccatctcttcagacaaaacaactctccatgaattaagtactctaggaaagggaatagatcaagaggggaagatggtgctgctaagcttgaaactcaccccctctgagccctgtgatccactaagttctaccctgagggagcccttagatattaggtcttccctaaaggactctcacacagaagagcaggaggaactctcagtgctatccggggtcatcaagagatcttcatccatcatatctgattcaggcattgagagtgagccaagctccgtcgcctggtcagaggcccgaagcagggctctggagttgcccagtgatcgggaagtcttgcacccgtttgttcgaagacatgccctccaccggaactccctagagggtggacacacagaaagtaacacaagtttgccaagcggcatccaggcttctctcacctccattagctctttaccttttgaggaggatgagcgggaggtggcactcactaagttaaccaagtctgtatctgctccccacatcagtagcccagaggaggctgctgaagatgcggacaccaagcagcaagatggaggttttgctgaaccttcagatatgcacagcaagagccaaggttccccaggatcttgctctcaactttgtggtgactctggaacagatgctggagcagaccatcccctggtggagatagttttagatgctgacaaccagcagggccccggatacatagacatccccaaagggaaagggaagcagtttgatgctcaaggacactgtcttcctgatggcaggactgagaacactccaggtgttgaaaccaaaggtcttaatttaaaaataccacgcgtcatagcacttgaaaaccccaggaccagatctcttcatagagcacttgaggaaaccccaaagggcatgcctaaagacttgaatgtgggtcagcaagctctttccaacagtggcatctcagaggttgagggtctctctcaacatcaggtgcctgaattgagctgtacgtcagctgctgatgccatcaacaggaactcaacaggccagcaaagccaaagcggttcaccttgcattatggatgacacagcatttaatagaggagtgaatgccttcccggaggctaaacataaagcaggcactgtgtgccccactgtgacccattccgttcattcccaggttttgaaaaaccaagagctgaaggcaggcacttccatcatggggtcccatctgacttctgcagagacctttactctggacagcctgaaggctgtggaggttgtgaacttatctgtgtcttgcactgccacctgtctccctttctcatctgtgcccaaggagacccctgccagggctggattctcttccaaacagaccctgtttcccatcacccatcagcctttgggatcctttggagttgtttctacccattccagcacgttggatgaggaagtcagtgagaggatgtttagtttttatcaggccaaagaaaaatttaaaaaagaactgaagattgaaggatttctgtacagtgacttaactgtactagcttctgatataccatatttcccaccagaggaagaggaagaaaatttggaagatggaattcacctggttgtctgtgtccatggcctggatgggaacagtgcagacctccggctggtaaagactttcatagaactggggctccctggaggaaaactggacttcctaatgtctgaaaagaatcagatggacacatttgcagattttgatactatgacggatcggttattggatgaaatcattcaacacattcagttgtacaacctctccatatcccgaattagcttcattggccattctcttggcaacatcatcatccgatcggtcctcacacggccccggttccggtattacctcaacaaactccacacgttcctgtcactctctgggcctcacctgggaaccctgtacaacaacagcaccctggttagtacaggcttatggctcatgcagaaactgaagaaatccgggtctctactgcagctgaccttcagggataatgctgatttgcgcaaatgtttcctctaccaactaagccaaaaaacagggctgcagtattttaaaaacgtcgtgctggttgcttctccccaagaccgttatgtgccatttcattcagccaggattgaaatgtgtaaaactgccctcaaagacagacacacagggccagtttatgcagaaatgatcaacaacctcctgggccctctggttgaagccaaggactgcactttaatccgacacaacgtgttccacgccctgcccaacactgccaacaccctgatcggccgagccgctcacatcgctgtgctggattcagaactcttcctggagaagtttttcttggtggcaggactcaactacttcaagtagtggctttgagggagcaggtctttggtaatgcttacgatcggtggagagctttagctgagacctgcttttacagacctcaccatttcagaatgaagcttcaacagcattgggggacggaggctcgggtggaacctgacatgagaggtgcttttgttttggagattcgagaaagctgagcaaatagactaaatgacaacaaactttgcttgaatttgtatagttacctggagtgtcattcaagatgttttctaggaaaaatatgagagaataaacagaatacttgggagttggtgagctccccttgctagccactactggcttactgagagattactccaatttaactagacttgccgaatatgttactagcttatagctttatcatttctgattaagtgcacacaagcatttcagaactcaggttaatctctgtgcagcagtggaacatatttgtgtaaatagaatcctcaatagattcaaatgtgtcagttgttcaagaaaatgtgatgcccatattcatattctctcctcatgttttctaaacaagggagcaaggaatgtgttacaaatcccagttctatttcataacagcagtgagcagggtgacttaaggtaaagagggataaaggtgacactattggtaaatacaagtttgttacaaagaaacatgactctagggacatactgaactatgaatagttgctccacctacttccccagaattcttctatgcagagccctgatccacaaattattttagtgattgcttacatctttgtctgtagtagggaacactgagtgagactaacctagcagaagggggcactgagatgaatgcacacacgtgtgaagctcctgctgatacacttccaaagacatgctatgttagcatttgatgcaattgcaaaaaattaaatccattaaagtggccagctgcttctcctctccatggaaggaggaaaacatctaaatggaggagtgctggattaaaacctcaggggagctctaagaagggtgctggctatctttcaatagaaatgtcttcttgccttaggaaaataaagggctaggaaaggtcactgcgttgataaaaaccaatagacgacagggacaaaagtgagatcagataggaggagaacaaccagactgaagactcaacataagctgttattggtaagtgactcaaaggggagttttgaaaattaccaggatgtttaatagtcaggtctcaaagactgagtatgttgtatgggctaaagtaagcctaaagaatcatttcgttgtatggaagagatgaatgaacctggacagtagggataagtaagacaggagcctaatcttttggagatgaaagctcctgcttctgcaaaaatcccttctgaagtgtggaaacgcatctaggaccagggttctcaatacctagaccatgactctaggtcactgatgccatggtaacaaaaccaagtaaatctaagctcatttgagaattttagatcctcttatgttaacaatgtgactttgaaaaataaaagcagaccatgggaatgagtccagatgggcagctttgcaggagtgtagacatgtggtattcttttgaagaaagagagggtcgttgagggagagttgaatgtcttgcaaaggcagagttccacacaatggatttagggtttctcagtgagtcctttctaaatgcttgttatatcctggtcataatgcatatgggttcactgagtcctctggtcactttccactggggatttttatctgagctcccgagtcagagctgggcatagactctggttcttcatgaggagtgctgtatttgctctgtaacctgggagacatttgttccctagtcgtgcagcacatggtattgtgtttcctgacctaggcaagtgcccatgctcagtacagaaccataagttggtagcagcttctcctttctggccaaatgatgggccctgtccctctgatgagtgcatttcatgttgtgtttccaattttcatcagcaatgttcgtcattccctggtcctttgaaagactgtgtagcccgcggttatggagccgggatgaatctgatgatcatcatcttctccaataaccagatgccatttttaacttcaatatgctgtctggacatagtgagaactaatggcaataaacgtccagctgcatggtgcacctcttttttataggggtgctctgctgtctttgtaaaccctctctggcctctgagcatctattataattgtgtagaaagtacatctctatattgtaaataagagtgtcgagtgttgcgtgtcatgcctcatttgaaaaggcttttttatgtctctttctattgaaatatagatatcgaatatataaatatatatacataaaatatatataaatatatattatgtaaaacagggacattctattattgattgtaaaaattataaacaaaatgcctgccaagataatggtcttgtatgtcttcattctctgcgtaatttttgtttttgtttttatgatttgttgtttcccaaaatgagttagaaataaaaatgcccaatattgagattaa

SEQ ID NO: 188386 - DNA, 4221 bp, Artificial Sequence
  derived and/or modified sequence
atgtccgagattcagggcacggtggagttcagcgtcgaattgcacaaattctacaacgtcgacttattccagcgggggtactaccagattagggtgaccctgaaagtctcttcgcgcataccacatcggttatctgcctccattgcaggacagacagaaagctcaagtctccattccgcctgcgtccacgattcaacggtgcattctcgagtgtttcagattctctatagaaatgaggaggtccctatcaacgacgccgtggtgttccgtgtacacctgttgctcggtggggagcggatggaggatgcgttgagcgaagtcgattttcagcttaaggttgacctgcacttcactgactctgaacaacagctaagggacgtggctggtgccccaatggtgtcatccagaaccctgggcctgcacttccacccgcgcaatggactacaccatcaggtccccgttatgtttgactactttcatctctcagtgatcagtgtcaccgtgcacgctgcactggtggcgcttcagcagccccttatatctttcacgagaccaggccgagggtcctggctgggcaaaggaggcccggataccgggcaggagcaatctatcatctcgttggagaatctggtcttcggggctggttattgcaaacccacttcaagtgaagggtcattctacattaccagcgagaactgcatgcaacacgcccataagtggcatagagacctctgccttctgttgctccatgcctacaggggcttacgactgcacttcttagttatcatgagagacatcccggagcttccacacacagagctggaagccctagctgtcgaagagactctgtcacagctctgctctgaactgcaaatgttaaacaaccctgaaaagatcgcagagcagattagcaaagatctggcatggcttaccagccacatgatgaccctgtggacccagttccttgacactgtgactttgcactcccaagtgacgacatatcttactcaagaacaccacacactccgcgtgcggcgcttcagcgaagcctttttctatatggaacatcaaaaactggctgtgttgacatttcaggaaaatctgatccagacacatagccagttgagcctggacatcagaaattccgagtaccttacgagtatgcccccattacccgccgagtgcttggatatagacggggattggaacacgttacccgtcatcttcgaagatcgctatgttgactgccctgccactgggcacaacctgtccgtttacccaaatttcgacgtgcctgtgacaagtcctacaataatgaacctgaaggacaaagaggataactgtatggtgaacagtaacctgtcgttccgggaagatctagtgctgtccacgataaaaccttctcagatggactctgacgaggaggtgatcaggtgtcctgagcctggtgagaatgtcgctacccagaaccacatggatatgtgtagtgaatctcaggtgtacatcagcatcggagaattccagaacaaggcaggggtgccggaggacgagtgctggacaggccagactagcgatgcaggcacctacccagtggccgacgtggacacctcgagaaggagcccaggcccagaggacgggcaggcccccgtgctgacctatatagatgtgaagtcctccaataagaaccctagcagggcggaaccactagtggctttcaatgctcaacacgaatctcggtcctcccgcgataaatacgggttggataggaccgggctcagcaaggtggtcgtgggcgggagtcaccaaaacgctatctcctctgataagacaacactgcacgagctcagtaccctcggaaaggggatcgaccaggaaggaaagatggtgctattgtccctgaagctaaccccaagcgagccttgcgatccactctcgtctactctgcgcgagccactggatatccggagttcgctcaaggattcacacactgaagagcaggaagagttatctgtactgtcaggagttatcaaacgaagttcatccatcatttcagactcaggtattgaatctgaaccatcgagtgttgcgtggagcgaagccagaagcagagcgttggagctgcctagcgatagggaagtgctgcatccattcgttcggcggcacgcattacaccgcaacagcctcgaaggaggacatactgaatcaaatacaagcttgcctagcggaattcaagcgtcactgacgtctatatcttccctcccgttcgaggaggacgagagggaagtcgctctgaccaagctgacaaagtctgtgtcggccccccacatcagtagccccgaagaggctgccgaggatgctgataccaaacagcaggatgggggcttcgctgaaccttccgacatgcattctaaatcacagggctcaccaggtagttgttctcagctgtgtggggactccgggactgacgcgggcgctgaccatcccctagtggagatagtgttagacgccgacaaccagcaagggcctggctacatagatatccccaaagggaaaggtaagcagtttgatgctcagggccattgtctcccagatggacgcactgagaatactcctggtgtggaaacaaagggtctgaatctgaagatacccagagtcatagccctggaaaacccccgaacccggtccctccaccgggccctggaggagacacctaagggtatgcctaaagaccttaacgtcggccagcaggcattaagcaactctgggatctccgaagtggaaggattaagtcagcaccaggtgcctgagctatcctgtaccagcgcagcagacgctatcaatcgaaatagcaccggtcagcagtcacagtctggttcgccctgtatcatggacgacaccgcctttaaccgcggagtgaatgcgttccccgaagccaaacataaggccggcacagtgtgtcccaccgttacccactccgtccattcccaggtgctgaaaaaccaggaactcaaagctgggacgagtattatgggaagtcatctaacttctgccgagacgtttaccctggacagcctgaaggccgtggaagtagtaaatctgagcgtaagttgcaccgccacctgcttgcctttttcaagcgttccaaaggaaacccccgccagggccgggttttcatccaagcagacacttttccctataactcaccagcctctgggctctttcggcgtggtgagtactcactccagtactctggacgaggaggtctctgaacgcatgttctccttttaccaggccaaggaaaagtttaaaaaggaactgaagatcgagggattcttgtactctgacctgacagtgttggccagcgacattccatacttcccaccagaggaggaggaagaaaatctggaagacggcattcatcttgttgtgtgcgtccatggactggatggcaactctgcagacctccgactcgtcaaaacatttattgagctgggacttcctggcggtaagctcgactttctaatgtcagagaagaatcagatggacacattcgccgattttgacactatgaccgatcggctgctcgatgagatcatccagcacatccagctgtacaatttgagcatttcgcgcatttcctttataggccacagtcttggtaatattattatacgatcggtcctcacgcggccaagattcagatactatctgaataagttacatactttcctctctttgtccggcccacacctgggtactctgtacaacaattccacccttgtaagcacaggactatggttgatgcagaagctgaaaaagtccggcagcttactgcagctgactttccgggataacgctgatctgagaaagtgtttcctgtaccaactcagccaaaagaccggattgcagtattttaagaacgtggtgctggtggcatctcctcaggatcgatacgtaccattccatagcgctaggatcgagatgtgcaagactgcgctgaaggatcgccacactggtccggtgtatgcagagatgatcaacaaccttctgggccctcttgtggaggccaaagactgtactctgatacgacataacgtgtttcacgctctacccaacaccgccaataccctgatcgggagagccgcccatatagcggtgctggatagcgaactatttctcgaaaagttcttccttgtcgcagggcttaactatttcaagtag

SEQ ID NO: 188387 - DNA, 4221 bp, Artificial Sequence
  derived and/or modified sequence
atgtctgagatccagggcaccgtggagttctctgtggagctgcacaagttctacaacgtggacctcttccagaggggctactaccagatccgggtgaccctgaaggtgagcagccgcatcccccaccggctgagcgccagcattgctggccagacagagagcagcagcctgcacagcgcctgtgtgcatgacagcacagtgcacagcagggtcttccagatcctgtacagaaatgaggaggtgcccatcaatgatgctgtggtgttccgggtgcacctgctgctgggcggggagaggatggaggatgccctgtctgaggtggacttccagctgaaggtggacctgcacttcacagacagcgagcagcagctgagagatgtggccggggcccccatggtgagcagcaggaccctgggcctgcacttccaccccagaaatggcctgcaccaccaggtgcctgtgatgtttgactacttccacctgagcgtcatctctgtgacagtgcacgccgccctggtggccctgcagcagcccctcatctccttcaccaggcctggccggggctcctggctgggcaaaggaggccctgacaccggccaggagcagagcatcatcagcctggagaacctggtgtttggagctggctactgcaagcccaccagcagcgagggcagcttctacatcaccagcgagaactgcatgcagcacgcccacaagtggcaccgggacctgtgcctgctgctgctgcacgcctaccggggcctgcggctgcacttcctggtgatcatgagggacatccctgagctgccccacacagagctggaggccctggccgtggaggagaccctgagccagctgtgcagcgagctgcagatgctgaacaaccctgagaagattgctgagcagatcagcaaggacctggcctggctgaccagccacatgatgaccctgtggacccagttcctggacacagtgaccctgcacagccaggtgaccacctacctgacccaggagcaccacaccctgcgggtgcggcgcttcagcgaggccttcttctacatggagcaccagaagctggccgtgctgaccttccaggagaacctgatccagacccacagccagctgagcctggacatccggaacagcgagtacctgacctccatgccacccctgcctgctgagtgcctggacattgatggagactggaacaccctgcccgtcatctttgaggacagatatgtggactgcccagccaccggccacaacctgtctgtgtaccccaactttgatgtgcctgtgaccagccccaccatcatgaacctgaaggacaaggaggacaactgcatggtgaacagcaacctgtccttccgggaggacctggtgctgagcaccatcaagcccagccagatggacagtgatgaggaggtgatccgctgcccagagcccggggagaatgtggccacccagaaccacatggacatgtgcagcgagagccaggtgtacatcagcatcggggagttccagaacaaggccggcgtgcctgaagatgagtgctggacaggccagaccagtgatgctggcacctaccctgtggctgatgtggacaccagccgccgcagccctggcccagaagatggccaggcccctgtgctgacctacattgatgtgaagagcagcaacaagaaccccagcagagctgagcccctggtggccttcaatgcccagcacgagagccgcagcagccgggacaagtatggcctggacagaacaggcctgagcaaggtggtggtgggcggcagccaccagaatgccatcagcagtgacaagaccaccctgcacgagctgagcaccctgggcaagggcatcgaccaggagggcaagatggtgctgctgagcctgaagctgacccccagcgagccctgtgaccccctgagcagcaccctgcgggagcccctggacatccgcagcagcctgaaggacagccacacagaggagcaggaggagctgtctgtgctgtctggagtcatcaagaggagcagcagcatcatcagtgacagcggcatcgagagcgagcccagctctgtggcctggagcgaggcccggagccgggccctggagctgcccagcgaccgggaggtgctgcacccctttgtgagaagacatgccctgcacaggaacagcctggagggcggccacacagagagcaacaccagcctgcccagcggcatccaggccagcctgaccagcatcagcagcctgccctttgaagaagatgagcgggaggtggccctgaccaagctgaccaagtctgtgtctgccccccacatcagcagccctgaggaggccgcagaagatgctgacaccaagcagcaggacggcggctttgctgagcccagcgacatgcacagcaagagccagggcagccctggcagctgcagccagctgtgtggggacagcggcacagatgctggagctgaccaccccctggtggagatcgtgctggatgctgacaaccagcagggccctggctacatcgacatccccaagggcaagggcaagcagtttgatgcccagggccactgcctgcctgatggccgcacagagaacaccccaggagtggagaccaagggcctgaacctgaagatccccagggtcatcgccctggagaaccccaggaccaggagcctgcaccgggccctggaggagacccccaagggcatgcccaaggacctgaatgtgggccagcaggccctgagcaacagcggcatcagcgaggtggagggcctgagccagcaccaggtgcctgagctgagctgcaccagcgctgctgatgccatcaacagaaacagcacaggccagcagagccagagcggcagcccctgcatcatggatgacacagccttcaacagaggagtgaatgccttccctgaggccaagcacaaggccggcaccgtgtgccccaccgtgacccacagcgtgcacagccaggtgctgaagaaccaggagctgaaggccggcaccagcatcatgggcagccacctgaccagcgctgagaccttcaccctggacagcctgaaggctgtggaggtggtgaacctgtctgtgtcctgcacagccacctgcctgcccttcagctctgtgcccaaggagaccccagcccgggccggcttcagcagcaagcagaccctcttccccatcacccaccagcccctgggcagctttggagtggtgtccacccacagcagcaccctggatgaggaggtgtctgagaggatgttctccttctaccaggccaaggagaagttcaagaaggagctgaagattgagggcttcctgtacagcgacctgactgtgctggccagtgacatcccctacttccccccagaggaggaggaggagaacctggaggatggcatccacctggtggtgtgtgtgcacggcctggatggcaacagcgctgacctgcggctggtgaagaccttcatcgagctgggcctgcccggcggcaagctggacttcctgatgtctgagaagaaccagatggacacctttgctgactttgacaccatgacagaccggctgctggatgagatcatccagcacatccagctgtacaacctgagcatcagccgcatctccttcatcggccacagcctgggcaacatcatcatccgctctgtgctgacccggccccgcttccgctactacctgaacaagctgcacaccttcctgagcctgagcggcccccacctgggcaccctgtacaacaacagcaccctggtgtccacaggcctgtggctgatgcagaagctgaagaagagcggcagcctgctgcagctgaccttccgggacaatgctgacctgaggaagtgcttcctgtaccagctgagccagaagacaggcctgcagtacttcaagaatgtggtgctggtggccagcccccaggaccgctacgtgcccttccacagcgcccgcatcgagatgtgcaagacagccctgaaggacagacacacaggccctgtgtatgcagagatgatcaacaacctgctgggccccctggtggaggccaaggactgcaccctcatccgccacaacgtgttccacgccctgcccaacacagccaacaccctcatcggccgggccgcccacatcgctgtgctggacagcgagctgttcctggagaagttcttcctggtggccggcctgaactacttcaagtag

SEQ ID NO: 188388 - DNA, 4221 bp, Artificial Sequence
  derived and/or modified sequence
atgagcgagatccagggcaccgtggagttcagcgtggagctgcacaagttttacaacgtggatctcttccagcggggctactatcagattcgtgtgactctcaaggtctcatccaggatcccccaccgtctgtctgcatctattgcggggcagaccgagagctccagcctgcactccgcatgcgtgcacgatagcacagtacactctcgggtctttcagatcctgtatcggaacgaggaggtccctataaacgacgctgtggtctttcgcgtgcacctgcttctaggaggagaaagaatggaggacgccctttccgaggtagacttccagctgaaggtggacctgcattttacagattccgaacagcagctgcgggatgtcgcaggagccccgatggtgagttctaggactcttggattacatttccacccccgcaatgggttgcatcatcaggtaccggttatgtttgattatttccacttatccgttattagcgtcacagttcacgcagcacttgtggcgctgcagcaacccttgatttcattcactcggccaggtaggggaagctggcttggaaagggcggacccgacaccggacaggagcaatctataattagtctggaaaatcttgtttttggcgcaggatactgcaagcctacaagctcagaaggttctttctacataacaagcgagaactgcatgcaacacgcacataaatggcatagagatttgtgcttgttgcttcttcacgcctaccgtgggctgcgactacacttcctggttatcatgcgcgatatccctgaactgcctcatacagagctcgaggcgctggccgtagaggagacactatctcagctttgcagtgagctacaaatgttaaataatcccgaaaagatcgcggagcagatcagcaaggatttagcgtggcttacttcccatatgatgacactgtggacccagttccttgacaccgtgaccctccattcacaagtcacgacctacttgacacaagagcaccataccctgagggtgcgacggttctctgaagcgtttttttacatggaacatcagaagcttgctgtcctgacttttcaagagaatttgatccagacgcactctcaactttcattagacatccggaattcagaatacctgactagcatgcctcccttgcctgcagagtgtctcgatatcgacggcgattggaatactcttcctgtgatcttcgaggacaggtacgttgactgccctgcgacgggtcacaacttgagcgtgtacccaaacttcgatgttccagttaccagtcccaccatcatgaatctcaaagacaaggaggataattgcatggtgaactccaacctgagcttccgggaggacctcgtcctgtccacgattaagccctcacagatggactccgatgaagaggtgataagatgccctgagcccggggagaatgtggctacccaaaaccatatggatatgtgctctgagtcccaagtgtatattagcatcggcgagtttcagaacaaagccggtgtcccagaggatgaatgctggacaggacaaacatctgatgccggaacatatcctgtcgcagacgtcgatacaagtcggagatcccccggccctgaggacgggcaggcaccagtcttgacgtacatagatgtgaagtctagtaataagaatccctcgcgggccgaaccgctggtagccttcaatgctcaacatgaaagcaggagtagtcgagataagtacggtctcgacaggacggggttgtcgaaagtggtggtgggggggtcacatcagaacgcgatatctagcgacaagacaactcttcacgagctttctacccttggcaaaggaatcgaccaggaagggaagatggtgcttctgagcctaaagctgacaccatctgagccttgcgatcctttaagcagcacgctgcgtgaaccactggacatacgctcgtccctaaaagattcacacaccgaggagcaggaagagctaagtgtgctctccggagttatcaagcggtctagttctatcatcagtgatagtggcatagagtcagaacctagctcagttgcctggtccgaggcgaggtcgcgcgcactggagctccccagtgatagggaagttctccacccttttgtgcggcgtcacgccttgcaccgcaattcactggaggggggacacaccgagtctaataccagtttgccttccggcatacaggctagtttgacttctatttcctctttaccttttgaagaggatgaacgcgaggtggcactgacgaaactgacgaaatcagtgtcagccccccatatctcatccccagaggaggctgcggaggacgctgacacaaagcagcaagacggcgggtttgctgagcccagtgacatgcatagtaaatcacaggggagcccaggatcatgcagccagctctgcggagactccggcaccgacgcaggggccgatcacccccttgtcgaaatcgtgctagatgccgacaaccagcagggcccaggctatattgatatcccaaaaggaaagggtaaacagtttgacgcacagggacactgcctgcctgacggacgtactgagaataccccaggagtagaaactaaggggctgaaccttaaaatcccacgtgtgatcgcgctggaaaaccctcggacacgaagtctgcacagggcactggaggagacacctaagggcatgccaaaggacctcaatgtgggacagcaggccctgagcaatagtggcatttcagaggtcgaaggcttgagccaacaccaggtgccggaactgagctgcacgtcagctgccgatgcaataaacaggaactctacggggcaacagtctcaatctggcagcccttgtataatggacgacacagctttcaacaggggcgtcaatgctttcccagaggctaaacacaaagcaggaaccgtgtgcccaacagtcactcactccgtgcatagccaggtgctgaagaatcaggaactgaaagccggcacctccattatggggtcacacttgacgagtgctgagacctttacgttagactccctcaaagccgtggaagtcgtgaaccttagcgtgtcatgtaccgccacatgccttccgttttcaagtgtcccgaaggaaacccccgcacgggctgggttttcatccaaacaaacactcttccccatcacccaccaacccctagggagctttggcgtggtatcaacccatagcagcactctggatgaagaggtatccgaacggatgttctctttttaccaggctaaggaaaagttcaagaaagagctgaagatagaaggctttctgtacagtgatctgaccgtactggctagcgacatcccctattttccacccgaggaagaggaggagaacctggaggacgggattcacctggtcgtatgtgtccatggcctcgatggtaactccgccgacctgagactggtgaaaacttttatcgagctggggttgccaggggggaagcttgacttcctaatgagcgagaagaaccagatggatacttttgcagattttgacacaatgaccgaccgacttctggacgagatcattcagcacattcagctctacaacctctcaataagccggatctccttcataggccatagtttgggcaacatcattatcagatctgtcctgacccgaccacggttcaggtattatttaaataaactccacacatttctctctctgtctgggcctcacctcggcactctctataacaactccacgctcgtgtctacaggtttatggttgatgcagaaactgaaaaagtctgggtccctgctgcagctgacctttagagacaacgcagacctgcgtaagtgcttcctttaccaactgtcccagaaaaccggactgcaatacttcaagaacgttgtgctggtagctagcccccaggatcggtatgtgccatttcacagcgcccgcattgagatgtgcaagacagctctcaaggacaggcatactggtccagtgtatgccgagatgataaacaatcttctaggaccccttgtggaggcaaaagactgtacgctaattagacacaacgtgttccatgcactgccaaatactgctaacacactgatcggaagagctgcacacattgccgtgctcgacagtgaactctttctggagaagtttttcctggtcgctgggttgaactattttaaatag

SEQ ID NO: 188389 - DNA, 4221 bp, Artificial Sequence
  derived and/or modified sequence
atgtctgaaattcaaggcaccgtcgagttctctgtggaacttcataaattttataatgttgatctgtttcagaggggatattatcaaattagagtcacgttaaaagtttccagtcgcatccctcatagactgtcggcctccattgcaggacaaaccgaatcttcatcccttcacagcgcttgcgtccacgattctacagtgcattcgcgggtcttccagattctgtaccggaacgaggaggttcccattaatgatgccgtagtgttccgcgttcatctgctgctgggcggagagaggatggaggacgcgctgtccgaggtggacttccagctcaaggtggatcttcacttcaccgattccgagcagcagctgcgggacgtggccggagccccaatggtatccagccggacactcggcctgcacttccatccacggaacggcctgcaccaccaggtcccggttatgttcgattattttcacctcagcgttatctccgttacagtgcacgccgctcttgttgcactccagcagccactcatttcgtttactaggccaggaaggggatcctggcttggcaaaggcggaccggacaccggccaggaacagagtatcatctccttagagaacctggtctttggcgctgggtactgtaagcccactagcagtgaaggctcgttttacattaccagcgaaaattgtatgcagcatgctcataaatggcaccgagatttatgcctgctactgttgcacgcttatcgtggcctgaggctccatttcttagtgatcatgcgcgacatccccgaactgcctcacacagagctggaggcccttgctgtggaggagaccctaagccagctctgtagtgagctccaaatgttgaacaaccctgaaaagattgcagaacagatctcaaaagatcttgcctggcttacaagccacatgatgacgctctggacgcagttcctggacaccgtgactctccactctcaagtgacgacttatctcactcaggagcatcacacgctcagagtccggaggttttcagaggcttttttctatatggagcaccagaaacttgcagtgcttacatttcaggaaaaccttattcaaacgcatagccagctttcgctggacatccgcaattccgagtacctgacctccatgcctccgttgccagctgagtgcctggacatcgatggggactggaatactctgcctgtgatctttgaggacaggtatgtagactgccccgctacaggccacaatctgtctgtttacccaaacttcgatgtaccggtcactagccccacaataatgaacctaaaagataaagaagataattgcatggtgaattctaatctgtccttccgcgaggacctagtgttatccacaatcaagcctagccaaatggactcagatgaggaggttatcagatgcccagaacccggagagaatgtcgctacccaaaaccacatggatatgtgctccgaatcgcaggtttatatatccattggtgagttccagaacaaggcaggtgtccccgaggacgagtgttggacagggcagacatctgatgccggtacctatccggttgccgacgttgacaccagccgcagaagcccagggcctgaggatgggcaggcaccagtgctgacttacatcgatgtcaaaagcagcaataagaacccctcacgcgctgaaccactggtcgcatttaatgctcaacatgagagcaggagtagccgtgataagtatggactcgatcgaaccggcctgtccaaggtggtcgtgggaggctctcaccagaacgcaattagtagcgataagacaacactgcacgagctgtccacactgggaaagggaattgaccaggagggaaagatggttttactgagcttaaaactcacaccctccgagccttgcgatcccttaagctccacgctcagagaacccctggatatccggagctcattaaaggattcccacaccgaggaacaagaggagttgagcgtgctgtccggggtcataaagcgctcttctagtatcatttccgacagcgggatcgagtccgagccctcatctgtagcctggtccgaggcccgtagcagggctctggagttgccctccgacagagaggttctccatccttttgtgaggcgacatgccctgcatcggaatagcctagagggcggacacactgaaagcaatacctctcttccctccgggatccaagcatccttaacctccatcagctcccttcccttcgaggaagatgagagggaggtcgcactcaccaagttgaccaaatccgtatccgccccacatatttcaagccccgaagaagcggctgaggacgccgacactaagcagcaggacggcggttttgcagaaccctctgacatgcattccaagtcacagggtagtcctgggtcctgttcccagttatgtggcgattccggtaccgacgcaggggcagaccatccattagtggaaatagtgttggacgccgataatcagcaaggtcccggatacattgatatccccaagggaaaggggaaacagtttgatgcccaagggcactgccttccggatggtagaacagagaacactccgggagtggaaaccaaaggcctgaacctgaaaatcccaagggtgatagctttagaaaatccccgtactcgcagccttcaccgggcactggaagagactccaaagggcatgcccaaggatctgaatgttggacaacaggcgctttcaaactctgggatcagtgaagtggaaggcctgtcccagcaccaggtgccggagttgtcatgcacgagcgccgcagatgctatcaacaggaattccaccggccaacagtctcagtctggatcaccctgtatcatggacgacaccgcattcaataggggggtgaacgcgttccccgaggccaaacacaaagccggtaccgtttgtcctactgtgactcacagcgtccatagccaggtgctcaagaaccaggaactgaaggcaggcacctcaattatgggcagccatctaacctctgccgagacattcactctagacagcctgaaagccgtggaggtggtcaacctgagtgtttcttgtacggctacttgtctaccctttagcagcgtaccaaaagagacacccgctcgggcaggcttcagttcgaagcaaactttgttcccgattacccatcagccgttgggcagtttcggagtggtttctactcacagcagcacactcgatgaagaggttagcgaacgtatgttttcgttttaccaagccaaagagaaatttaaaaaagagctcaaaattgaaggattcctgtactcggatctcactgttctggcaagcgacattccatactttcctcctgaagaggaggaggaaaacctggaagacgggatccacttggtcgtttgtgtgcatgggttggacggcaattccgcagatcttcggctggttaaaaccttcattgagcttgggctgcctggcggaaaactggacttcctgatgtccgaaaagaaccagatggacacattcgctgactttgataccatgacagaccgccttctggacgagattatacagcacatccaattgtacaacctttctatttccagaatcagcttcatcggccattccttgggcaatatcatcattcggagcgtactgactagaccccgattccggtattacttgaacaagctgcacacattcttaagcctgagcggcccacatctgggaacgctctataacaattcaactctcgtgtccaccggactttggctgatgcagaagctgaaaaagtcagggagtctgctccaattgacgttccgcgataatgccgatctacgcaagtgttttctctatcagctctcccagaaaacaggactgcagtatttcaaaaacgtagtgcttgtcgccagccctcaggacagatatgttccatttcattccgcccgaatcgaaatgtgtaaaaccgccctcaaggatcggcacacgggccctgtgtacgccgaaatgatcaataatctgttagggccactggtagaagcgaaggattgcaccctgatccgacataatgtcttccatgccctacctaacacagctaacacgctaatcgggagagcagcacacatagccgtcctggacagcgaactgtttttggagaagtttttcttagtagcaggcctaaactacttcaagtag

SEQ ID NO: 188390 - protein, 558 aa, Artificial Sequence
  derived and/or modified sequence
MAKNRRDRNSWGGFSEKTYEWSSEEEEPVKKAGPVQVLIVKDDHSFELDETALNRILLSEAVRDKEVVAVSVAGAFRKGKSFLMDFMLRYMYNQESVDWVGDYNEPLTGFSWRGGSERETTGIQIWSEIFLINKPDGKKVAVLLMDTQGTFDSQSTLRDSATVFALSTMISSIQVYNLSQNVQEDDLQHLQLFTEYGRLAMEETFLKPFQSLIFLVRDWSFPYEFSYGADGGAKFLEKRLKVSGNQHEELQNVRKHIHSCFTNISCFLLPHPGLKVATNPNFDGKLKEIDDEFIKNLKILIPWLLSPESLDIKEINGNKITCRGLVEYFKAYIKIYQGEELPHPKSMLQATAEANNLAAVATAKDTYNKKMEEICGGDKPFLAPNDLQTKHLQLKEESVKLFRGVKKMGGEEFSRRYLQQLESEIDELYIQYIKHNDSKNIFHAARTPATLFVVIFITYVIAGVTGFIGLDIIASLCNMIMGLTLITLCTWAYIRYSGEYRELGAVIDQVAAALWDQGPSHQALYKLYSAAATHRHLYHQAFPTPKSESTEQSEKKKM

SEQ ID NO: 188391 - protein, 558 aa, Artificial Sequence
  derived and/or modified sequence
MAKNRRDRNSWGGFSEKTYEWSSEEEEPVKKAGPVQVLIVKDDHSFELDETALNRILLSEAVRDKEVVAVSVAGAFRKGKSFLMDFMLRYMYNQESVDWVGDYNEPLTGFSWRGGSERETTGIQIWSEIFLINKPDGKKVAVLLMDTQGTFDSQSTLRDSATVFALSTMISSIQVYNLSQNVQEDDLQHLQLFTEYGRLAMEETFLKPFQSLIFLVRDWSFPYEFSYGADGGAKFLEKRLKVSGNQHEELQNVRKHIHSCFTNISCFLLPHPGLKVATNPNFDGKLKEIDDEFIKNLKILIPWLLSPESLDIKEINGNKITCRGLVEYFKAYIKIYQGEELPHPKSMLQATAEANNLAAVATAKDTYNKKMEEICGGDKPFLAPNDLQTKHLQLKEESVKLFRGVKKMGGEEFSRRYLQQLESEIDELYIQYIKHNDSKNIFHAARTPATLFVVIFITYVIAGVTGFIGLDIIASLCNMIMGLTLITLCTWAYIRYSGEYRELGAVIDQVAAALWDQGSTNEALYKLYSAAATHRHLYHQAFPTPKSESTEQSEKKKM

SEQ ID NO: 188392 - DNA, 1677 bp, Artificial Sequence
  derived and/or modified sequence
atggccaagaaccgccgagaccgcaattcttggggaggtttcagcgagaagacatacgaatggagctcagaggaagaggaacctgtgaagaaagctggaccggtccaggtgctcattgtaaaagatgaccatagcttcgagctcgatgaaacggcacttaaccggattctcctgtccgaagcagtgagagacaaggaagttgtcgccgtgtccgttgcaggggcctttagaaagggcaaaagcttcctcatggactttatgctgaggtatatgtataatcaggaaagcgtggattgggtgggagattacaatgagccattaaccggattctcatggagaggtggatccgaaagggagaccaccggtattcagatttggtctgagatctttctgatcaataagccagatggcaaaaaggtggccgtgctgctaatggatacacaaggcaccttcgacagtcagtctacccttcgcgattcagcaacagtttttgctttaagtaccatgatttcctcgattcaagtatataatctatcacagaatgtacaagaagacgacctacagcatttacaactgtttacggagtacgggcggttggcgatggaggaaacatttttgaaaccattccagagtctgatctttctggtgcgggactggagcttcccatacgaattttcttatggtgccgatggtggcgcaaagtttctggagaagaggctgaaagtgtctggaaatcaacacgaagagctgcaaaacgtccgcaaacatatccattcgtgttttaccaacatttcttgcttcctcctgccacatccgggattgaaagtagcgactaatccaaatttcgatggtaagctcaaggaaatcgacgatgaattcataaagaacctaaaaatcctaattccctggctgctcagtcctgagtccctggacattaaggaaattaatgggaacaagatcacctgtcgcggacttgtggaatattttaaagcctacatcaaaatctaccagggggaggagctcccacacccgaagagcatgctgcaggctacagcagaagccaacaacctggctgcggtcgcgacggcgaaagacacctataataaaaagatggaggaaatatgtggaggagacaagccctttctggccccaaatgatcttcagacgaaacacttacaactgaaggaggagtccgtgaaattgttcaggggagtgaagaaaatgggcggcgaggagtttagtagacgctacctgcagcaactagaaagcgagatcgatgagctgtatattcagtatatcaagcacaatgattccaagaacatttttcatgccgcgagaacgcccgccacactgttcgtcgtgattttcattacctacgtgatcgcaggcgttacaggctttatcggccttgatatcatcgcttccttgtgcaacatgatcatgggccttaccctaatcacactttgcacctgggcctatattcgctactccggcgagtatcgagagctcggtgcagtgatcgaccaggtcgccgccgcattgtgggaccaggggccatcccaccaagccttgtataaactgtattctgccgctgcaactcaccgccacctctatcaccaggcgttccctacccccaagtccgaaagtaccgaacagtccgagaagaaaaagatgtag

SEQ ID NO: 188393 - DNA, 1677 bp, Artificial Sequence
  derived and/or modified sequence
atggccaagaacagacgggaccggaacagctggggcggcttttctgagaaaacttacgaatggtcttctgaggaggaagaacctgtgaagaaggccggccccgttcaggtactgatcgtcaaggatgaccacagtttcgagctagatgagactgctctcaacaggattctgcttagcgaagcggtccgggacaaagaagtcgtggcagtgagtgttgccggggccttcagaaaggggaagagtttcctgatggactttatgctgcgatacatgtataaccaggagtcagtcgactgggtgggggattacaatgaaccgttaaccggcttctcatggcgcggcggaagcgaaagagagactacgggaatccagatctggagcgaaatttttctgataaataagcctgacgggaaaaaagttgccgttctgctaatggacactcagggcacgttcgatagtcaatcaaccctgagagactcagctactgtgtttgccttgtctacaatgatttcttcaattcaggtgtataatctctctcagaacgtacaagaggatgatctgcaacacctacagctctttactgagtatggccgattagctatggaagaaactttcctcaagccattccaatcactgatattcctcgtcagggattggagcttcccatacgagtttagctatggagctgacggcggggccaaattcttagagaagcggctgaaagtgtcaggcaatcagcacgaggagctgcagaatgtccgcaagcacattcactcttgcttcacaaacatttcttgcttccttcttccgcacccgggactgaaagttgcgactaatcccaatttcgatggtaaactaaaagaaatcgacgacgagttcatcaagaatctgaagatactgattccctggttgctgtccccagaatcactagacatcaaagaaataaacggaaacaagataacctgccgcggtctcgtggagtactttaaggcctatatcaaaatttatcaaggtgaagagttgccacatccaaagtctatgctgcaggccacagcagaagccaataatctggctgccgtggccactgccaaggatacgtataataagaagatggaggagatttgtggaggcgacaagccatttctggcaccaaatgatctgcaaacaaagcacctacagctgaaggaggagagcgtgaagctgttcagaggagtaaagaagatgggcggggaggagttctcccggcgttatctacaacagctagaatcagagatcgacgagctgtacatccagtatattaagcataatgatagtaagaatatatttcatgctgctagaacacccgccaccctgttcgtagtcattttcatcacctacgtgattgcaggggtaacaggatttatcggactggacatcatcgcttcactgtgtaatatgataatgggactgacactaatcaccctctgtacatgggcgtacattcgctactcaggagagtatcgcgagctgggtgccgtcatcgaccaggtggccgctgccctgtgggaccagggctccacaaatgaggcgctctacaagctgtactctgcggcagcaacccacaggcacctttaccaccaggccttccctactccgaaatccgaaagtacagaacagagcgagaagaagaagatgtag

SEQ ID NO: 188394 - DNA, 90 bp, Artificial Sequence
  derived and/or modified sequence
atggccaagaaccggcgtgaccggaacagctgggggggcttcagcgagaaaacttacgaatggagttctgaggaggaggagcccgtttag

SEQ ID NO: 188395 - DNA, 1677 bp, Artificial Sequence
  derived and/or modified sequence
atggccaagaacagaagagacaggaacagctggggcggcttcagcgagaagacctatgagtggagcagcgaggaggaggagcctgtgaagaaggccggccctgtgcaggtgctgattgtgaaggatgaccacagctttgagctggatgaaacagccctgaaccgcatcctgctgtctgaggccgtgcgggacaaggaggtggtggccgtgtctgtggccggggccttcaggaagggcaagagcttcctgatggacttcatgctgcgctacatgtacaaccaggagagcgtggactgggtgggggactacaatgagcccctgaccggcttctcctggaggggcggcagcgagcgggagaccaccggcatccagatctggagcgagatcttcctgatcaacaagccagatggcaagaaggtggccgtgctgctgatggacacccagggcacctttgacagccagagcaccctgcgggacagcgccaccgtgtttgccctgagcaccatgatcagcagcatccaggtgtacaacctgagccagaatgtgcaggaggatgacctgcagcacctgcagctgttcacagaatatggccgcctggccatggaggagaccttcctgaagcccttccagagcctcatcttcctggtgcgggactggagcttcccctatgagttctcctatggagcagatggaggagccaagttcctggagaagaggctgaaggtgtctggcaaccagcacgaggagctgcagaatgtgaggaagcacatccacagctgcttcaccaacatcagctgcttcctgctgccccaccctggcctgaaggtggccaccaaccccaactttgatggcaagctgaaggagattgatgatgagttcatcaagaacctgaagatcctgatcccctggctgctgagccctgagagcctggacatcaaggagatcaatggaaacaagatcacctgccggggcctggtggagtacttcaaggcctacatcaagatctaccagggcgaggagctgccccaccccaagtccatgctgcaggccacagctgaggccaacaacctggccgctgtggccacagccaaggacacctacaacaagaagatggaggagatctgtggcggggacaagcccttcctggccccaaatgacctgcagaccaagcacctgcagctgaaggaggagagcgtgaagctgttccggggcgtgaagaagatgggcggggaggagttcagccgccgctacctgcagcagctggagagcgagattgatgagctgtacatccagtacatcaagcacaatgacagcaagaacatcttccacgccgcccggaccccagccaccctgtttgtggtgatcttcatcacctacgtgattgctggggtgacaggcttcatcggcctggacatcatcgccagcctgtgcaacatgatcatgggcctgaccctcatcaccctgtgcacctgggcctacatccgctacagcggggagtaccgggagctgggcgctgtgattgaccaggtggccgccgccctgtgggaccagggccccagccaccaggccctgtacaagctgtacagcgctgctgccacccaccgccacctgtaccaccaggccttccccacccccaagtctgagagcacagagcagagcgagaagaagaagatgtag

SEQ ID NO: 188396 - DNA, 1677 bp, Artificial Sequence
  derived and/or modified sequence
atggccaagaacagaagagacaggaacagctggggcggcttcagcgagaagacctatgagtggagcagcgaggaggaggagcctgtgaagaaggccggccctgtgcaggtgctgattgtgaaggatgaccacagctttgagctggatgaaacagccctgaaccgcatcctgctgtctgaggccgtgcgggacaaggaggtggtggccgtgtctgtggccggggccttcaggaagggcaagagcttcctgatggacttcatgctgcgctacatgtacaaccaggagagcgtggactgggtgggggactacaatgagcccctgaccggcttctcctggaggggcggcagcgagcgggagaccaccggcatccagatctggagcgagatcttcctgatcaacaagccagatggcaagaaggtggccgtgctgctgatggacacccagggcacctttgacagccagagcaccctgcgggacagcgccaccgtgtttgccctgagcaccatgatcagcagcatccaggtgtacaacctgagccagaatgtgcaggaggatgacctgcagcacctgcagctgttcacagaatatggccgcctggccatggaggagaccttcctgaagcccttccagagcctcatcttcctggtgcgggactggagcttcccctatgagttctcctatggagcagatggaggagccaagttcctggagaagaggctgaaggtgtctggcaaccagcacgaggagctgcagaatgtgaggaagcacatccacagctgcttcaccaacatcagctgcttcctgctgccccaccctggcctgaaggtggccaccaaccccaactttgatggcaagctgaaggagattgatgatgagttcatcaagaacctgaagatcctgatcccctggctgctgagccctgagagcctggacatcaaggagatcaatggaaacaagatcacctgccggggcctggtggagtacttcaaggcctacatcaagatctaccagggcgaggagctgccccaccccaagtccatgctgcaggccacagctgaggccaacaacctggccgctgtggccacagccaaggacacctacaacaagaagatggaggagatctgtggcggggacaagcccttcctggccccaaatgacctgcagaccaagcacctgcagctgaaggaggagagcgtgaagctgttccggggcgtgaagaagatgggcggggaggagttcagccgccgctacctgcagcagctggagagcgagattgatgagctgtacatccagtacatcaagcacaatgacagcaagaacatcttccacgccgcccggaccccagccaccctgtttgtggtgatcttcatcacctacgtgattgctggggtgacaggcttcatcggcctggacatcatcgccagcctgtgcaacatgatcatgggcctgaccctcatcaccctgtgcacctgggcctacatccgctacagcggggagtaccgggagctgggcgctgtgattgaccaggtggccgccgccctgtgggaccagggcagcaccaatgaggccctgtacaagctgtacagcgctgctgccacccaccgccacctgtaccaccaggccttccccacccccaagtctgagagcacagagcagagcgagaagaagaagatgtag

SEQ ID NO: 188397 - DNA, 90 bp, Artificial Sequence
  derived and/or modified sequence
atggccaagaacagaagagacaggaacagctggggcggcttcagcgagaagacctatgagtggagcagcgaggaggaggagcctgtgtag

SEQ ID NO: 188398 - DNA, 1677 bp, Artificial Sequence
  derived and/or modified sequence
atggccaagaaccggcgggaccggaacagctggggcggcttcagcgagaaaacttacgaatggtctagcgaggaggaagaaccagtgaaaaaggccggccccgtccaggtcttgatcgtgaaggacgaccactctttcgagctggatgaaacagccctgaatcggatcctccttagtgaggccgtgcgtgacaaggaagtcgtagcagttagtgtggcaggggccttccgaaagggaaagagtttcctgatggacttcatgttacggtacatgtacaatcaggagtccgtcgactgggtgggtgattacaatgagcccctaacagggttttcttggaggggcggctccgaacgcgagaccaccgggattcaaatttggagcgagatcttcttgatcaataagcctgacggtaagaaagtggccgttcttctcatggacactcagggcacgttcgactctcagtcaaccctgcgggactccgctactgtgtttgcccttagcactatgatttcatccatccaagtttacaacctgagccagaatgtccaggaagatgacctgcagcatctgcaactgtttacagaatatgggcggttggcaatggaagagacctttctgaagccctttcagagcctcatatttctcgtcagggattggtccttcccgtacgagttcagctacggtgctgatggaggtgccaagttcctagaaaaacgactgaaggtatctgggaaccagcacgaggaactgcagaatgtgaggaaacacattcacagttgtttcaccaacatatcttgttttctgctccctcaccctgggctgaaggtggccaccaatcccaactttgatggtaagctgaaagaaattgatgatgagtttattaaaaacctgaagatcctgataccctggctgttaagtccagagtccctggatattaaagagataaatggcaacaagattacctgccgagggctagtggaatacttcaaggcttatattaaaatctatcagggagaggaactcccccatccgaagagtatgcttcaggctacagcagaggccaataatctagctgcagtggcgaccgccaaggacacctacaacaagaagatggaggaaatttgcggaggggacaaaccctttctggcaccaaacgatctgcaaaccaagcatcttcagctcaaagaggagtctgtgaaactgttccgcggtgtcaagaaaatgggcggagaggagttctctcgacggtatctgcaacagctggagagtgagattgatgagctctacattcagtacatcaagcacaatgacagcaaaaatatctttcacgccgctagaactcctgcgacgttgtttgttgtcatcttcatcacttatgtgatcgccggcgttacaggattcataggtctggatattatcgcatcactgtgtaacatgataatgggccttaccctgatcactctctgcacctgggcttatattcgctattctggggaatatcgagagttgggggccgtgattgaccaggtggcagccgccttgtgggatcagggaccaagtcatcaggccctgtataagctctactccgccgcagccacccatcgccatctgtatcaccaagctttccccacgcccaagtctgaatccaccgaacagagcgagaagaagaagatgtag

SEQ ID NO: 188399 - DNA, 1677 bp, Artificial Sequence
  derived and/or modified sequence
atggccaagaaccggcgggaccggaacagctggggcggcttcagcgagaaaacctatgaatggtcaagtgaagaggaggaacccgttaaaaaagccggccctgttcaagtcctgatcgtcaaggacgatcattcttttgagctggatgagaccgcactcaatcgcatcctgctttccgaagcagtgcgcgataaggaagtcgtcgctgtgagcgtggctggtgcgttccgaaaggggaagagttttcttatggatttcatgctgagatatatgtacaatcaagagagcgtggactgggtgggggattacaatgagcccctgaccggattctcctggagaggtggatccgagagggagactacagggatccagatttggagcgaaattttccttatcaacaagccagatgggaaaaaagtggcagtgctgctaatggacacacagggaacttttgattctcaaagcactctgcgggattccgccactgtctttgcactgtcgactatgatcagctccattcaagtgtataacttgagccagaacgtccaagaggatgacttgcagcatcttcagctcttcacagaatacggaagactggccatggaggaaaccttcctgaagccgtttcaaagcctgatatttctcgtgcgggactggtccttcccatacgagttcagctatggcgccgatggaggtgcaaagtttctggagaagcgcctgaaagtttcgggcaaccaacacgaggaactacaaaacgtgagaaagcacatccactcttgtttcaccaatatctcgtgttttttgctgccacacccaggcctgaaagtggctacaaatcccaactttgacgggaagctcaaggaaatcgatgatgagtttattaagaatctaaaaattctgatcccatggctcctatcccccgaaagcctagacattaaggagattaatggaaacaagattacttgtagagggcttgtggagtactttaaagcttacatcaagatctaccagggagaggaattgccccatcccaaatcaatgctgcaggccacagctgaagctaacaatctggccgccgtcgccacggcaaaagacacctacaacaagaaaatggaggaaatctgcggtggagacaagcccttccttgcaccgaacgatttgcagaccaaacacctgcagctgaaggaagaaagcgttaaactctttcgtggcgtaaagaagatgggcggcgaggagttctcacgaaggtacctgcagcagttagaaagcgaaattgacgagttgtacatccagtatatcaaacataacgacagcaagaacatctttcacgcggcgcggacaccagccacattattcgtggtcatttttatcacttacgtgattgcaggggtgacgggatttatcggtctagatatcattgcttccctttgcaacatgatcatgggcctgaccttaatcaccctgtgtacatgggcttacattcgctacagtggtgaatatcgggagctgggcgcagtaatcgaccaggtggctgccgccctctgggatcagggttccacgaatgaagcattgtacaagctttacagtgctgccgcgacccaccgccacctttaccatcaggccttccccacccccaagtcagaatccacagagcagtctgaaaaaaagaagatgtag

SEQ ID NO: 188400 - DNA, 90 bp, Artificial Sequence
  derived and/or modified sequence
atggccaagaaccggcgggaccggaacagctggggcggcttcagcgaaaagacctacgaatggtcctcagaggaagaggaaccggtgtag

SEQ ID NO: 188401 - DNA, 1677 bp, Artificial Sequence
  derived and/or modified sequence
atggcgaagaatcggagggatagaaatagctgggggggtttttctgaaaagacctacgagtggtctagcgaagaagaggaacccgtcaagaaagccggtcctgtgcaggtgttaattgttaaagacgaccatagctttgaattggacgagacggccctcaacagaatcctgctgagtgaggccgttcgcgataaagaggttgtcgccgtgagcgtggcaggggctttcagaaaaggcaaaagtttccttatggactttatgcttagatatatgtacaaccaggaatcagtggactgggtgggcgattataacgaacctctcaccggcttcagttggcgaggtggctcagagagggaaacgactggaattcagatctggagcgagatcttcctgatcaacaaaccagacggaaagaaggtggccgtcctcctcatggatacacaggggacgtttgactcgcaatcaaccctgagagattccgcaaccgtgtttgctctgtccaccatgattagcagcatccaagtctacaatttatcgcagaatgtgcaggaagacgacctgcagcatctgcaactgttcacagagtatggtagactcgctatggaagaaactttcctcaagccgttccagtcgcttatctttctagttagggactggtcattcccctatgagttcagctatggagccgacggaggagccaagttcttagagaagcggttgaaggtttcaggtaatcagcacgaagaattgcagaatgtgcggaaacacatccatagctgtttcacaaacatctcatgcttcttgctgccccatcctgggctgaaagtggctactaatccaaactttgacggaaagcttaaggaaatagatgacgaattcatcaaaaacctgaagattcttataccatggctgttgtcccctgagagcttggatattaaggaaatcaatggcaacaagatcacatgcagaggcctggttgaatactttaaagcatatattaaaatttaccagggagaggaacttccccacccaaagtccatgctccaggccacagcggaggctaacaatctggcagctgttgccaccgccaaagacacgtataacaaaaagatggaagaaatatgtgggggagacaagccgtttctcgcgcctaatgacttacagactaagcatctgcaactgaaagaggagtccgtcaaactgtttagaggtgttaagaagatgggaggtgaggagtttagtcgcagatacctacagcagctggaatcagagattgatgagctctatattcagtacattaagcacaacgacagtaagaacattttccacgcagctaggacacccgctacactcttcgttgtgatattcatcacttatgttattgccggagttactggattcataggcctcgacattatcgcaagcctgtgcaacatgataatgggcctcacactaataactctttgcacatgggcatatatcaggtattccggcgaatacagggaattgggggctgtgatagaccaagttgccgctgcactgtgggaccagggcccttctcatcaggcattgtacaaattatactccgcggctgccacacaccgccacctgtatcatcaagcctttcccactccaaaatctgagtctaccgaacagagcgagaaaaagaagatgtag

SEQ ID NO: 188402 - DNA, 1677 bp, Artificial Sequence
  derived and/or modified sequence
atggcgaaaaaccgtagagaccgcaactcctgggggggattttcagagaaaacatatgagtggtccagtgaagaggaggaacctgtaaaaaaggcaggccctgttcaggtccttatcgtcaaggatgatcactctttcgagctcgatgaaacggcactcaaccgcatcctgttgtctgaggccgtgcgagacaaggaagtggtcgcagtcagcgtggcaggcgctttcagaaagggaaaatccttcttgatggactttatgctccggtacatgtataaccaggagtctgtggactgggtcggcgattacaacgagcccctgaccggattctcttggcgcggaggatcagagcgagaaacaacagggattcagatctggtctgaaatctttctgataaataagcccgatggcaaaaaagtggccgtgctgctgatggatactcaggggaccttcgactctcagtcaaccttgcgggactctgccacagtgttcgcgctatccaccatgatctcgagtattcaggtttataacctgagccaaaacgtgcaggaagatgatttgcagcacttgcagctgttcactgaatatgggagactggccatggaggaaacttttctcaaacctttccaaagtcttatctttctggtgcgcgattggtcatttccctacgagttttcctacggcgctgatgggggtgcgaaatttctcgaaaagagacttaaggtgtctggaaaccagcacgaagagcttcagaatgtccgcaagcacatacattcttgcttcacgaatatttcctgcttccttctcccacatcccggtttgaaggttgcgaccaaccccaatttcgacggaaagctgaaggagatcgatgatgagttcatcaaaaacttaaagattctaatcccatggctactctcccccgagtctctggatattaaggagatcaacggtaacaaaattacttgtcggggtctggtagagtacttcaaggcatatataaagatttaccagggcgaagagctgccacatcccaaaagtatgctgcaagcgacagcggaagctaacaatctagccgcagtcgccacagccaaggacacatataacaagaagatggaggaaatctgcggtggggacaagccttttttggcccctaatgacttgcagaccaagcacctgcagctcaaggaggaaagcgtcaagttgttcaggggtgtcaagaaaatgggcggagaggaattctctcgcagatacctgcagcagcttgagtctgaaatcgacgaactatacatacaatatattaaacataatgactccaaaaatatctttcatgccgctagaacaccggcaactctcttcgtggtgattttcataacttacgttatcgcaggcgttacaggtttcatcggtctggatattatagcatcactatgtaatatgattatggggttgacactcataacattatgcacatgggcttacataagatactctggggaatacagggagctgggagccgttattgaccaggtggccgctgccctctgggatcagggaagtaccaatgaagcactgtacaaattatactccgcagcagccacacacagacacctgtaccaccaggccttccctacgcccaagtctgaaagcaccgagcagtcggaaaaaaaaaaaatgtag

SEQ ID NO: 188403 - DNA, 90 bp, Artificial Sequence
  derived and/or modified sequence
atggcaaaaaataggagggataggaattcctgggggggattttcggaaaaaacatacgagtggtcttccgaagaagaggagcctgtgtag

SEQ ID NO: 188404 - DNA, 2643 bp, Artificial Sequence
  derived and/or modified sequence
agggagggtgtgacgctggtatctgtgtgaactcgggcttgtgatgctgagcttggttcatctgctttctcctcccttttcctccccactccttcccaccagcgccacagcaacatcctcagagtctgagcgaactgcgcccagcgcgggcacggagcctcccaccgccagcaacctgcggccccggagaaggcagcgagcgcagtgacagcgcctcaccgccaccagctcctggaccaccatggccaagaaccgcagggacagaaacagttggggtggattttcggaaaagacatatgaatggagctcagaagaggaggagccagtgaaaaaggcaggaccagtccaagtcctcattgtcaaagatgaccattcctttgagttagatgaaactgcattaaatcggatccttctctcggaggctgtcagagacaaggaggttgttgctgtatctgttgctggagcatttagaaaaggaaaatcattcctgatggacttcatgttgagatacatgtacaaccaggaatcagttgattgggttggagactacaatgaaccattgactggtttttcatggagaggtggatctgagcgagagaccacaggaattcagatatggagtgaaatcttccttatcaataaacctgatggtaaaaaggttgcagtgttattgatggatactcagggaacctttgatagtcagtcaactttgagagattcagccacagtatttgcccttagcacaatgatcagctcaatacaggtatataacttatcccaaaatgtccaggaggatgatcttcagcacctccagcttttcactgagtatggcagactggcaatggaggaaacattcctgaagccatttcagagtctgatatttcttgttcgagactggagtttcccatacgaattttcatatggagccgatggtggtgccaaattcttggaaaaacgcctcaaggtctcagggaaccagcatgaagaactacagaacgtcagaaaacacatccattcctgtttcaccaacatttcctgttttctgctacctcatcctggcttaaaagtagctaccaatccaaactttgatggaaaattgaaagaaatagatgatgaattcatcaaaaacttgaaaatactgattccttggctacttagtcccgagagcctagatattaaagagatcaatgggaataaaatcacctgccggggtctggtggagtacttcaaggcttatataaagatctatcaaggtgaagaattaccacatcccaaatccatgttacaggccacagcagaagctaacaatttagcagccgtggcaactgccaaggacacatacaacaaaaaaatggaagagatttgtggtggtgacaaaccatttctggccccaaatgacttgcagaccaaacacctgcaacttaaggaagaatctgtgaagctattccgaggggtgaagaagatgggtggggaagaatttagccggcgttacctgcagcagttggagagtgaaatagatgaactttacatccaatatatcaagcacaatgatagcaaaaatatcttccatgcagctcgtaccccagccacactgtttgtagtcatctttatcacatatgtgattgctggtgtgactggattcattggtttggacatcatagctagcctatgcaatatgataatgggactgacccttatcaccctgtgcacttgggcatatatccggtactctggagaataccgagagctgggagctgtaatagaccaggtggctgcagctctgtgggaccagggccccagtcatcaagctttgtacaagctttacagtgcagcagcaacccacagacatctgtatcatcaagctttccctacaccaaagtcggaatctactgaacaatcagaaaagaaaaaaatgtaatgcaaattttaagaaatacaggtgcatgaccaattgtcaattaaatattcagttttatgtctccatgcaaacattcaaagtgcttccatcagaacggagtaaaatactaaacacctctgaagactgcaaactggattagttcttttacttcagtgtttaataagcagatgtatgtatgcatggttatactattttgttaacatgtacaatttcctgatttttcttcaaaaatgctgttataaagtatttgtctatttatgataacagtacacgtgttctgcttgaatttactaaattctactactgggttataattaaatcatgtgatattccacgtttggatatgctcatttaatttctacagaaaaaattttaaattatttcacattagccatttgttaaaacacagcatcataactcagcaggctggatttaatctgtatcatcttatatatatcacaatcttatttttaagcacattttagagttccttagttgctttatcaaaaaccagatattgcttttacatggtttaatagaatataaacctcttgataaaaaatgcacaaaaaatcactttgtatatgtgagtttcactgcattgtatattttttcatttggtacacaaagaatgtattcttcataggtttattcttttaatatgtgaactattattaaagtttactctggttcctaagattaaaaacaaatgcttactgaatttg

SEQ ID NO: 188405 - DNA, 2647 bp, Artificial Sequence
  derived and/or modified sequence
agggagggtgtgacgctggtatctgtgtgaactcgggcttgtgatgctgagcttggttcatctgctttctcctcccttttcctccccactccttcccaccagcgccacagcaacatcctcagagtctgagcgaactgcgcccagcgcgggcacggagcctcccaccgccagcaacctgcggccccggagaaggcagcgagcgcagtgacagcgcctcaccgccaccagctcctggaccaccatggccaagaaccgcagggacagaaacagttggggtggattttcggaaaagacatatgaatggagctcagaagaggaggagccagtgaaaaaggcaggaccagtccaagtcctcattgtcaaagatgaccattcctttgagttagatgaaactgcattaaatcggatccttctctcggaggctgtcagagacaaggaggttgttgctgtatctgttgctggagcatttagaaaaggaaaatcattcctgatggacttcatgttgagatacatgtacaaccaggaatcagttgattgggttggagactacaatgaaccattgactggtttttcatggagaggtggatctgagcgagagaccacaggaattcagatatggagtgaaatcttccttatcaataaacctgatggtaaaaaggttgcagtgttattgatggatactcagggaacctttgatagtcagtcaactttgagagattcagccacagtatttgcccttagcacaatgatcagctcaatacaggtatataacttatcccaaaatgtccaggaggatgatcttcagcacctccagcttttcactgagtatggcagactggcaatggaggaaacattcctgaagccatttcagagtctgatatttcttgttcgagactggagtttcccatacgaattttcatatggagccgatggtggtgccaaattcttggaaaaacgcctcaaggtctcagggaaccagcatgaagaactacagaacgtcagaaaacacatccattcctgtttcaccaacatttcctgttttctgctacctcatcctggcttaaaagtagctaccaatccaaactttgatggaaaattgaaagaaatagatgatgaattcatcaaaaacttgaaaatactgattccttggctacttagtcccgagagcctagatattaaagagatcaatgggaataaaatcacctgccggggtctggtggagtacttcaaggcttatataaagatctatcaaggtgaagaattaccacatcccaaatccatgttacaggccacagcagaagctaacaatttagcagccgtggcaactgccaaggacacatacaacaaaaaaatggaagagatttgtggtggtgacaaaccatttctggccccaaatgacttgcagaccaaacacctgcaacttaaggaagaatctgtgaagctattccgaggggtgaagaagatgggtggggaagaatttagccggcgttacctgcagcagttggagagtgaaatagatgaactttacatccaatatatcaagcacaatgatagcaaaaatatcttccatgcagctcgtaccccagccacactgtttgtagtcatctttatcacatatgtgattgctggtgtgactggattcattggtttggacatcatagctagcctatgcaatatgataatgggactgacccttatcaccctgtgcacttgggcatatatccggtactctggagaataccgagagctgggagctgtaatagaccaggtggctgcagctctgtgggaccagggaagtacaaatgaggctttgtacaagctttacagtgcagcagcaacccacagacatctgtatcatcaagctttccctacaccaaagtcggaatctactgaacaatcagaaaagaaaaaaatgtaatgcaaattttaagaaatacaggtgcatgaccaattgtcaattaaatattcagttttatgtctccatgcaaacattcaaagtgcttccatcagaacggagtaaaatactaaacacctctgaagactgcaaactggattagttcttttacttcagtgtttaataagcagatgtatgtatgcatggttatactattttgttaacatgtacaatttcctgatttttcttcaaaaatgctgttataaagtatttgtctatttatgataacagtacacgtgttctgcttgaatttactaaattctactactgggttataattaaatcatgtgatattccacgtttggatatgctcatttaatttctacagaaaaaattttaaattatttcacattagccatttgttaaaacacagcatcataactcagcaggctggatttaatctgtatcatcttatatatatcacaatcttatttttaagcacattttagagttccttagttgctttatcaaaaaccagatattgcttttacatggtttaatagaatataaacctcttgataaaaaatgcacaaaaaatcactttgtatatgtgagtttcactgcattgtatattttttcatttggtacacaaagaatgtattcttcataggtttattcttttaatatgtgaactattattaaagtttactctggttcctaagattaaaaacaaatgcttactgaatttgaaaa

SEQ ID NO: 188406 - DNA, 1677 bp, Artificial Sequence
  derived and/or modified sequence
atggccaagaacagaagagacagaaacagctggggcggcttcagcgagaagacctacgagtggagcagcgaggaggaggagcccgtgaagaaggccggccccgtgcaggtgctgatcgtgaaggacgaccacagcttcgagctggacgagaccgccctgaacagaatcctgctgagcgaggccgtgagagacaaggaggtggtggccgtgagcgtggccggcgccttcagaaagggcaagagcttcctgatggacttcatgctgagatacatgtacaaccaggagagcgtggactgggtgggcgactacaacgagcccctgaccggcttcagctggagaggcggcagcgagagagagaccaccggcatccagatctggagcgagatcttcctgatcaacaagcccgacggcaagaaggtggccgtgctgctgatggacacccagggcaccttcgacagccagagcaccctgagagacagcgccaccgtgttcgccctgagcaccatgatcagcagcatccaggtgtacaacctgagccagaacgtgcaggaggacgacctgcagcacctgcagctgttcaccgagtacggcagactggccatggaggagaccttcctgaagcccttccagagcctgatcttcctggtgagagactggagcttcccctacgagttcagctacggcgccgacggcggcgccaagttcctggagaagagactgaaggtgagcggcaaccagcacgaggagctgcagaacgtgagaaagcacatccacagctgcttcaccaacatcagctgcttcctgctgccccaccccggcctgaaggtggccaccaaccccaacttcgacggcaagctgaaggagatcgacgacgagttcatcaagaacctgaagatcctgatcccctggctgctgagccccgagagcctggacatcaaggagatcaacggcaacaagatcacctgcagaggcctggtggagtacttcaaggcctacatcaagatctaccagggcgaggagctgccccaccccaagagcatgctgcaggccaccgccgaggccaacaacctggccgccgtggccaccgccaaggacacctacaacaagaagatggaggagatctgcggcggcgacaagcccttcctggcccccaacgacctgcagaccaagcacctgcagctgaaggaggagagcgtgaagctgttcagaggcgtgaagaagatgggcggcgaggagttcagcagaagatacctgcagcagctggagagcgagatcgacgagctgtacatccagtacatcaagcacaacgacagcaagaacatcttccacgccgccagaacccccgccaccctgttcgtggtgatcttcatcacctacgtgatcgccggcgtgaccggcttcatcggcctggacatcatcgccagcctgtgcaacatgatcatgggcctgaccctgatcaccctgtgcacctgggcctacatcagatacagcggcgagtacagagagctgggcgccgtgatcgaccaggtggccgccgccctgtgggaccagggccccagccaccaggccctgtacaagctgtacagcgccgccgccacccacagacacctgtaccaccaggccttccccacccccaagagcgagagcaccgagcagagcgagaagaagaagatgtag

SEQ ID NO: 188407 - DNA, 1677 bp, Artificial Sequence
  derived and/or modified sequence
atggccaagaacagaagagacagaaacagctggggcggcttcagcgagaagacctacgagtggagcagcgaggaggaggagcccgtgaagaaggccggccccgtgcaggtgctgatcgtgaaggacgaccacagcttcgagctggacgagaccgccctgaacagaatcctgctgagcgaggccgtgagagacaaggaggtggtggccgtgagcgtggccggcgccttcagaaagggcaagagcttcctgatggacttcatgctgagatacatgtacaaccaggagagcgtggactgggtgggcgactacaacgagcccctgaccggcttcagctggagaggcggcagcgagagagagaccaccggcatccagatctggagcgagatcttcctgatcaacaagcccgacggcaagaaggtggccgtgctgctgatggacacccagggcaccttcgacagccagagcaccctgagagacagcgccaccgtgttcgccctgagcaccatgatcagcagcatccaggtgtacaacctgagccagaacgtgcaggaggacgacctgcagcacctgcagctgttcaccgagtacggcagactggccatggaggagaccttcctgaagcccttccagagcctgatcttcctggtgagagactggagcttcccctacgagttcagctacggcgccgacggcggcgccaagttcctggagaagagactgaaggtgagcggcaaccagcacgaggagctgcagaacgtgagaaagcacatccacagctgcttcaccaacatcagctgcttcctgctgccccaccccggcctgaaggtggccaccaaccccaacttcgacggcaagctgaaggagatcgacgacgagttcatcaagaacctgaagatcctgatcccctggctgctgagccccgagagcctggacatcaaggagatcaacggcaacaagatcacctgcagaggcctggtggagtacttcaaggcctacatcaagatctaccagggcgaggagctgccccaccccaagagcatgctgcaggccaccgccgaggccaacaacctggccgccgtggccaccgccaaggacacctacaacaagaagatggaggagatctgcggcggcgacaagcccttcctggcccccaacgacctgcagaccaagcacctgcagctgaaggaggagagcgtgaagctgttcagaggcgtgaagaagatgggcggcgaggagttcagcagaagatacctgcagcagctggagagcgagatcgacgagctgtacatccagtacatcaagcacaacgacagcaagaacatcttccacgccgccagaacccccgccaccctgttcgtggtgatcttcatcacctacgtgatcgccggcgtgaccggcttcatcggcctggacatcatcgccagcctgtgcaacatgatcatgggcctgaccctgatcaccctgtgcacctgggcctacatcagatacagcggcgagtacagagagctgggcgccgtgatcgaccaggtggccgccgccctgtgggaccagggcagcaccaacgaggccctgtacaagctgtacagcgccgccgccacccacagacacctgtaccaccaggccttccccacccccaagagcgagagcaccgagcagagcgagaagaagaagatgtag

SEQ ID NO: 188408 - DNA, 90 bp, Artificial Sequence
  derived and/or modified sequence
atggccaagaacagaagagacagaaacagctggggcggcttcagcgagaagacctacgagtggagcagcgaggaggaggagcccgtgtag

SEQ ID NO: 188409 - protein, 226 aa, Artificial Sequence
  derived and/or modified sequence
MGPLPRTVELFYDVLSPYSWLGFEILCRYQNIWNINLQLRPSLITGIMKDSGNKPPGLLPRKGLYMANDLKLLRHHLQIPIHFPKDFLSVMLEKGSLSAMRFLTAVNLEHPEMLEKASRELWMRVWSRNEDITEPQSILAAAEKAGMSAEQAQGLLEKIATPKVKNQLKETTEAACRYGAFGLPITVAHVDGQTHMLFGSDRMELLAHLLGEKWMGPIPPAVNARL

SEQ ID NO: 188410 - protein, 190 aa, Artificial Sequence
  derived and/or modified sequence
MGPLPRTVELFYDVLSPYSWLGFEILCRYQNIWNINLQLRPSLITGIMKDSGNKPPGLLPRKGLYMANDLKLLRHHLQIPIHFPKDFLSVMLEKGSLSAMRFLTAVNLEHPEMLEKASRELWMRVWSRNEDITEPQSILAAAEKAGMSAEQAQGLLEKIATPKVKNQLKETTEAACRYGERSGWALYLQP

SEQ ID NO: 188411 - DNA, 681 bp, Artificial Sequence
  derived and/or modified sequence
atgggccccctgcccagaaccgtggagctgttctacgacgtgctgagcccctacagctggctgggcttcgagatcctgtgcagataccagaacatctggaacatcaacctgcagctgagacccagcctgatcaccggcatcatgaaggacagcggcaacaagccccccggcctgctgcccagaaagggcctgtacatggccaacgacctgaagctgctgagacaccacctgcagatccccatccacttccccaaggacttcctgagcgtgatgctggagaagggcagcctgagcgccatgagattcctgaccgccgtgaacctggagcaccccgagatgctggagaaggccagcagagagctgtggatgagagtgtggagcagaaacgaggacatcaccgagccccagagcatcctggccgccgccgagaaggccggcatgagcgccgagcaggcccagggcctgctggagaagatcgccacccccaaggtgaagaaccagctgaaggagaccaccgaggccgcctgcagatacggcgccttcggcctgcccatcaccgtggcccacgtggacggccagacccacatgctgttcggcagcgacagaatggagctgctggcccacctgctgggcgagaagtggatgggccccatcccccccgccgtgaacgccagactgtag

SEQ ID NO: 188412 - DNA, 573 bp, Artificial Sequence
  derived and/or modified sequence
atgggccccctgcccagaaccgtggagctgttctacgacgtgctgagcccctacagctggctgggcttcgagatcctgtgcagataccagaacatctggaacatcaacctgcagctgagacccagcctgatcaccggcatcatgaaggacagcggcaacaagccccccggcctgctgcccagaaagggcctgtacatggccaacgacctgaagctgctgagacaccacctgcagatccccatccacttccccaaggacttcctgagcgtgatgctggagaagggcagcctgagcgccatgagattcctgaccgccgtgaacctggagcaccccgagatgctggagaaggccagcagagagctgtggatgagagtgtggagcagaaacgaggacatcaccgagccccagagcatcctggccgccgccgagaaggccggcatgagcgccgagcaggcccagggcctgctggagaagatcgccacccccaaggtgaagaaccagctgaaggagaccaccgaggccgcctgcagatacggcgagagaagcggctgggccctgtacctgcagccctag

SEQ ID NO: 188413 - DNA, 1044 bp, Artificial Sequence
  derived and/or modified sequence
aagctgggcagcctctgccgggttccgggaaaaggagctcctgctgccactgctcttccggagcctgcagcatggggcccctgccgcgcaccgtggagctcttctatgacgtgctgtccccctactcctggctgggcttcgagatcctgtgccggtatcagaatatctggaacatcaacctgcagttgcggcccagcctcataacagggatcatgaaagacagtggaaacaagcctccaggtctgcttccccgcaaaggactatacatggcaaatgacttaaagctcctgagacaccatctccagattcccatccacttccccaaggatttcttgtctgtgatgcttgaaaaaggaagtttgtctgccatgcgtttcctcaccgccgtgaacttggagcatccagagatgctggagaaagcgtcccgggagctgtggatgcgcgtctggtcaaggaatgaagacatcaccgagccgcagagcatcctggcggctgcagagaaggctggtatgtctgcagaacaagcccagggacttctggaaaagatcgcaacgccaaaggtgaagaaccagctcaaggagaccactgaggcagcctgcagatacggagcctttgggctgcccatcaccgtggcccatgtggatggccaaacccacatgttatttggctctgaccggatggagctgctggcgcacctgctgggagagaagtggatgggccctatacctccagccgtgaatgccagactttaagattgcccggaggaagcaaactcttcgtataaaaaaagcaggccatctgcttaacccttggctccaccataaggcactgggactcggatttctctatctgatagaggtattttctgtggccctgggagctgtctgtctttcccctacccccaaggatgccaggaagacgtccaccattagccatgtggcaacctttacttctatgcctcacaagtgcctttcagagagccccaattctgctttcccacaaaataaacctaatgccatcaggcaaaacatttctgtgtctgta

SEQ ID NO: 188414 - DNA, 681 bp, Artificial Sequence
  derived and/or modified sequence
atgggaccacttccccgcacagtcgagctgttctacgacgtgctgtccccatacagctggctgggttttgaaatcctctgtaggtaccagaatatttggaacatcaacctgcagctgagacccagccttatcacaggcataatgaaggactccggaaataagcctcctgggcttctcccaagaaaaggcctttacatggctaatgatcttaagctgctccgacatcatttacagattcccattcattttccaaaagattttctgtctgtcatgctggagaaaggttccctctccgctatgcgattcctgacggccgtaaacttggagcatccagagatgctggaaaaagcatcccgtgaattgtggatgcgagtgtggagtcggaacgaggacattacagaaccgcaatctattctagctgccgccgaaaaggccggtatgtcagctgagcaggctcaggggctgctggaaaaaatcgcgacccctaaagttaaaaaccaactgaaggagactaccgaggcagcctgtaggtatggcgcattcggcctcccaatcacagtggcccacgttgatggacagactcacatgctgtttgggtcagatcgcatggagctcctggcacacctacttggggagaaatggatgggacctataccacccgctgtcaacgcaaggctctag

SEQ ID NO: 188415 - DNA, 573 bp, Artificial Sequence
  derived and/or modified sequence
atgggcccccttccccggacggttgagcttttctacgacgtgcttagcccctacagttggttaggatttgaaattttgtgtcggtaccagaacatctggaatatcaacttgcaactgcggccatccttgattacgggcattatgaaagatagcggcaataagcctcccgggttgcttccacgtaaaggactttacatggctaacgatttgaagctattgcgacaccacttgcagatccctatccactttcccaaagatttcctaagcgtgatgcttgagaaggggtcattgtcagcaatgagattcctcaccgctgttaatttggagcaccctgagatgcttgagaaagcatccagggagttatggatgagggtttggagcaggaatgaagacatcacagaacctcagtccatcctggcggccgccgagaaggccggcatgagtgcagagcaggcccagggcctgctggagaagattgctacccctaaagtaaaaaatcagctgaaggaaacgactgaagcagcatgcaggtatggagaacgatctggttgggcgctctacctgcagccctag

SEQ ID NO: 188416 - DNA, 681 bp, Artificial Sequence
  derived and/or modified sequence
atgggccccctgcccaggacagtggagctgttctatgatgtgctgagcccctacagctggctgggctttgagatcctgtgccgctaccagaacatctggaacatcaacctgcagctgcggcccagcctcatcaccggcatcatgaaggacagcggcaacaagcccccaggcctgctgcccaggaagggcctgtacatggccaatgacctgaagctgctgcggcaccacctgcagatccccatccacttccccaaggacttcctgtctgtgatgctggagaagggcagcctgagcgccatgaggttcctgacagctgtgaacctggagcaccctgagatgctggagaaggccagccgggagctgtggatgagggtgtggagcagaaatgaagacatcacagagccccagagcatcctggccgctgctgagaaggccggcatgtctgctgagcaggcccagggcctgctggagaagatcgccacccccaaggtgaagaaccagctgaaggagaccacagaggccgcctgccgctacggggccttcggcctgcccatcaccgtggcccacgtggatggccagacccacatgctgtttggaagtgacaggatggagctgctggcccacctgctgggggagaagtggatgggccccatccccccagctgtgaatgcccggctgtag

SEQ ID NO: 188417 - DNA, 573 bp, Artificial Sequence
  derived and/or modified sequence
atgggccccctgcccaggacagtggagctgttctatgatgtgctgagcccctacagctggctgggctttgagatcctgtgccgctaccagaacatctggaacatcaacctgcagctgcggcccagcctcatcaccggcatcatgaaggacagcggcaacaagcccccaggcctgctgcccaggaagggcctgtacatggccaatgacctgaagctgctgcggcaccacctgcagatccccatccacttccccaaggacttcctgtctgtgatgctggagaagggcagcctgagcgccatgaggttcctgacagctgtgaacctggagcaccctgagatgctggagaaggccagccgggagctgtggatgagggtgtggagcagaaatgaagacatcacagagccccagagcatcctggccgctgctgagaaggccggcatgtctgctgagcaggcccagggcctgctggagaagatcgccacccccaaggtgaagaaccagctgaaggagaccacagaggccgcctgccgctacggggagaggagcggctgggccctgtacctgcagccctag

SEQ ID NO: 188418 - DNA, 681 bp, Artificial Sequence
  derived and/or modified sequence
atgggccccctgccccggaccgtggagctgttctacgacgtgctgtcaccctatagttggctcggttttgaaatcctgtgtagatatcagaatatctggaatataaatctccagcttcggccctccctaattaccggcataatgaaggacagtggcaacaagccacccggcctcttaccacggaaggggctttacatggctaacgatttgaagcttctgcgtcatcacctgcagattccgattcattttcccaaggactttttatccgtgatgctcgagaaaggctccctcagcgccatgcgattcctgactgccgtcaatttggagcaccctgagatgctggagaaggccagccgagagctttggatgcgtgtctggagtcggaatgaggacataactgagccccagtctatcctggccgccgccgagaaggctggcatgtctgccgaacaggcacaaggcctgttagaaaagatagctacaccaaaagtgaagaatcagctgaaggagacaacagaggccgcctgcaggtacggcgcgttcggcctccctatcactgtggcccatgtggacggacagacccatatgctgtttggatctgacaggatggaactcctggctcacctgctgggagagaaatggatgggccccatcccgccagctgttaatgctagactctag

SEQ ID NO: 188419 - DNA, 573 bp, Artificial Sequence
  derived and/or modified sequence
atgggccccctgccccggaccgtggagctgttctacgacgtgctgtctccttatagttggctcggcttcgagatcttatgtagatatcagaatatctggaacatcaatctgcagttgcgtcccagtctgatcactggcatcatgaaggattccggcaacaaaccacccgggctgctgcccaggaaaggtctttacatggcgaacgacctgaaacttctgagacaccacttgcagatccccattcactttccaaaggacttcctttcagtgatgcttgagaagggctcactgtcagcaatgaggttcctgactgctgtgaacctagagcaccccgagatgttagagaaagcaagccgcgagttgtggatgagggtctggagtcgtaacgaggatatcacagagccacagtcaatcctggccgcagctgagaaggccggcatgagtgcagaacaggcgcagggcttgctcgagaaaatagctaccccgaaagtgaagaatcagttgaaagaaactaccgaagccgcctgtcgctatggagaacgttccggttgggcactgtaccttcagccatag

SEQ ID NO: 188420 - DNA, 681 bp, Artificial Sequence
  derived and/or modified sequence
atgggcccactacccaggactgtggaactgttctatgacgtcctgtcaccttattcctggttaggtttcgagatactgtgccggtaccagaacatttggaatatcaacttgcaactgagaccgtccctaataaccggcataatgaaggattcgggaaacaagccccctgggctgctaccgagaaaggggctctacatggctaatgacctgaagctcttacggcaccacttgcagatccctatccattttccgaaagatttcctcagcgtgatgctcgaaaaagggtctttgtctgccatgcgattccttactgcagtgaatctcgagcaccctgagatgctggagaaagccagtcgtgagctgtggatgagggtctggtcccggaacgaggacatcaccgagccacaatccatcctggccgcagccgagaaggctggaatgagtgccgagcaggcgcaggggttgttggaaaagatcgcaaccccgaaggtcaagaaccagttgaaagaaaccacggaagctgcttgcaggtatggtgccttcggattacccatcactgttgctcatgtggatggtcagacacacatgttattcggcagcgatagaatggagctgctcgctcaccttctcggcgagaaatggatgggcccaatccccccagctgtgaacgcccgactctag

SEQ ID NO: 188421 - DNA, 573 bp, Artificial Sequence
  derived and/or modified sequence
atgggcccactgccccgaaccgtggaacttttttatgacgtgctgagcccatattcatggcttggctttgagatactttgcagatatcagaatatctggaacatcaatctgcaactgcggccttcacttatcacgggtatcatgaaggactcaggcaataagcctcccggtctgcttcccaggaagggcctctatatggctaacgatttgaaactgctgagacatcatctccaaatccctattcacttcccaaaggactttctttctgttatgctggagaagggttctctatccgcaatgcggtttttgaccgccgtcaacctcgagcatcctgagatgctggagaaagcttcccgggagctatggatgcgcgtgtggagcaggaacgaggatattactgaacctcagtctatcctcgctgcagcagagaaggctggaatgagtgctgaacaggcccagggtcttctcgagaagattgctacccctaaggtcaagaatcagttgaaagaaaccacagaagccgcatgcaggtacggcgagagaagtggatgggcattgtaccttcaaccgtag

SEQ ID NO: 188422 - DNA, 2219 bp, Artificial Sequence
  derived and/or modified sequence
cagcctctgccgggttccgggaaaaggagctcctgctgccactgctcttccggagcctgcagcatggggcccctgccgcgcaccgtggagctcttctatgacgtgctgtccccctactcctggctgggcttcgagatcctgtgccggtatcagaatatctggaacatcaacctgcagttgcggcccagcctcataacagggatcatgaaagacagtggaaacaagcctccaggtctgcttccccgcaaaggactatacatggcaaatgacttaaagctcctgagacaccatctccagattcccatccacttccccaaggatttcttgtctgtgatgcttgaaaaaggaagtttgtctgccatgcgtttcctcaccgccgtgaacttggagcatccagagatgctggagaaagcgtcccgggagctgtggatgcgcgtctggtcaaggaatgaagacatcaccgagccgcagagcatcctggcggctgcagagaaggctggtatgtctgcagaacaagcccagggacttctggaaaagatcgcaacgccaaaggtgaagaaccagctcaaggagaccactgaggcagcctgcagatacggagagagaagtggatgggccctatacctccagccgtgaatgccagactttaagattgcccggaggaagcaaactcttcgtataaaaaaagcaggccatctgcttaacccttggctccaccataaggcactgggactcggatttctctatctgatagagaaactcccctggtctctctatcagcaacagaaaaccaagccagatggactttgcaactaatcaagtttgggatttactgtcttctgaccaaccacagtgactgagatggggctgggaccagaagcccagtgggagtgaacagccgagggaaccagagtctggctgagcttgtggccagatatttaaactgggtccagccacacctgcaaaaccagggcaaggcagtaccgggaaactggctggagttgctgcggtttggggaagttgcacaccctttcatagatacctcccttaaccctcagtgcagattctgagaaaactccaaggcttctctgcctaacctagtataacccctgttccctactacatacatataacttttccattcccccagtaattgacccaaagtccctgcctctagctgtgcccattgtgcaatgatcagaatcccttgtttcaatagtattttgacttctttaagaatactctgtatttggaagctgaaacctcacttggatccattgttgggaaccaagtacggagccttacatagcccggaggagtttcaggagcaatgccactttcccttccatccctccctctgggtctggctcttcccatagtccattttccccttttatctcccattaatttctgtcttcctctctcaccttttccatgtctctagcatcctccaggatttaaaatcatctttacccaacttatctgtgaagtaatggcaaaagaacatctccaaattaagtactccttttcttcaaaggagtttcatgggatgtacagctagtataaaataaaaatatgggaagatgtccaatcttaaaaaccataagggcaaattaagacaaaactaagctgcccagagcagggtgagtggaaccagttttatgaataaagatgcttgtctcagcactatatgtggatatcaaaaattgtgaacaacttgaacacctatcaggaggagaatactttaatcaattatggcacattcaggagataatgttttacagtcatcaaaaattgtatatgagggccagcacggtggctcacacctgtaatcccagcactttgggaggccaaggcaggcggatcacctgaggtcaggagttcgagaccagactggctaacatggtaaaaccctgtttctactaaaaatacaaaaaagtaaccgggtgtggtggcacgtgcctgtaatcccagctactcgggaggctgaggcaggagaatcgcttgaacccgggaggcagaggttgtggtgagctgagattgcactattgcactccagcttgggcaacaagagcgaaactctgtctcaaaaaaaaattgtatttctgaagaattgttaagaacattggaaattcttgagatataatattgattggaaaaagatgaaactatatggtatgatctcaatatgtcctgatgaataaaaacataatacagag

SEQ ID NO: 188423 - protein, 86 aa, Artificial Sequence
  derived and/or modified sequence
MVLSSDIDLLNPPAELEKTKHKRKRLVQSPNSFFMDVKCQGCFNITTVFSHSQTVVMCGSCSSVLCTPTGWPRRLTEGCSFRRKSD

SEQ ID NO: 188424 - protein, 84 aa, Artificial Sequence
  derived and/or modified sequence
MPLIEVDLLNPTAASEAKAHKMKRLVPTPNSYFLEIKCPKCGATTTTFSHAHRQILCQKCGQPLGQPTGGKLKLTQQCKFRIKK

SEQ ID NO: 188425 - protein, 62 aa, Artificial Sequence
  derived and/or modified sequence
MMELIPQPRTKFLRVQCPECNNEQIVFGSPATVVKCLTCGKVLVEPRGGKGKVKAKILEILG

SEQ ID NO: 188426 - protein, 84 aa, Artificial Sequence
  derived and/or modified sequence
MPLARDLLHPSLEEEKKKHKKKRLVQSPNSYFMDVKCPGCYKITTVFSHAQTVVLCVGCSTVLCQPTGGKARLTEGCSFRRKQH

SEQ ID NO: 188427 - protein, 52 aa, Artificial Sequence
  derived and/or modified sequence
MDVKCPGCYKITTVFSHAQTVVLCVGCSTVLCQPTGGKARLTEGCSFRRKQH

SEQ ID NO: 188428 - protein, 100 aa, Artificial Sequence
  derived and/or modified sequence
MCQRCGLKLIVIICFFVQLARDLLHPSLEEEKKKHKKKRLVQSPNSYFMDVKCPGCYKITTVFSHAQTVVLCVGCSTVLCQPTGGKARLTEGCSFRRKQH

SEQ ID NO: 188429 - DNA, 255 bp, Artificial Sequence
  derived and/or modified sequence
atgcccctggcgcgagatttgttgcacccctccctggaagaggaaaaaaagaaacacaaaaaaaaaaggctcgtacagtcacccaatagctatttcatggatgtcaagtgtccaggttgttataaaatcaccaccgttttcagccacgcccaaacagtcgtactctgcgttggttgcagcactgttttgtgtcagcctactggaggaaaagcaaggctgacagaaggatgttcttttcgcagaaagcagcactag

SEQ ID NO: 188430 - DNA, 159 bp, Artificial Sequence
  derived and/or modified sequence
atggacgtcaagtgtccaggctgttacaagattactaccgttttttcacatgcccaaaccgtcgtgttatgtgtgggctgctctactgttctgtgccaaccgaccgggggcaaggcccgactgactgagggatgctcattccgtcgaaagcagcattag

SEQ ID NO: 188431 - DNA, 159 bp, Artificial Sequence
  derived and/or modified sequence
atggacgtaaagtgtccaggatgctacaagataaccacggtgttctcccacgcacaaactgtcgtgctgtgtgtaggatgtagcactgtgctttgtcagccaacgggcggcaaggcccgcctcacggaggggtgttcctttagaaggaagcagcactag

SEQ ID NO: 188432 - DNA, 303 bp, Artificial Sequence
  derived and/or modified sequence
atgtgccagcggtgcggactgaagctgatcgttataatttgcttctttgtgcagctcgcccgtgatctgctccatccaagcctggaggaggagaagaagaaacataaaaaaaagcggctggttcagagccctaacagctactttatggacgtcaaatgccctggctgctacaaaatcaccacagttttttcacatgcccagactgtggtgctgtgcgtcggatgttcaactgtcttgtgccagcctaccggcgggaaagcccgcctcactgaaggttgtagcttcagacgcaagcagcattag

SEQ ID NO: 188433 - DNA, 255 bp, Artificial Sequence
  derived and/or modified sequence
atgcccctggcccgggacctgctgcaccccagcctggaggaggagaagaagaagcacaagaagaagaggctggtgcagagccccaacagctacttcatggatgtgaagtgccccggctgctacaagatcaccaccgtcttcagccacgcccagacagtggtgctgtgtgtgggctgcagcacagtgctgtgccagcccactggaggcaaggcccggctgacagagggctgcagcttccggaggaagcagcactag

SEQ ID NO: 188434 - DNA, 159 bp, Artificial Sequence
  derived and/or modified sequence
atggatgtgaagtgccccggctgctacaagatcaccaccgtcttcagccacgcccagacagtggtgctgtgtgtgggctgcagcacagtgctgtgccagcccactggaggcaaggcccggctgacagagggctgcagcttccggaggaagcagcactag

SEQ ID NO: 188435 - DNA, 303 bp, Artificial Sequence
  derived and/or modified sequence
atgtgccagagatgtggcctgaagctgattgtcatcatctgcttctttgtgcagctggcccgggacctgctgcaccccagcctggaggaggagaagaagaagcacaagaagaagaggctggtgcagagccccaacagctacttcatggatgtgaagtgccccggctgctacaagatcaccaccgtcttcagccacgcccagacagtggtgctgtgtgtgggctgcagcacagtgctgtgccagcccactggaggcaaggcccggctgacagagggctgcagcttccggaggaagcagcactag

SEQ ID NO: 188436 - DNA, 255 bp, Artificial Sequence
  derived and/or modified sequence
atgcccctggcccgggacctgctgcaccccagcctggaggaggagaaaaagaagcacaagaagaaacgcctggtccagtcaccaaatagctattttatggatgttaagtgcccaggatgttacaaaattacaactgtcttttcgcatgcccaaactgtggtgctatgcgtcggttgttctacagtgctttgccaacctacaggcggtaaggcccggcttaccgaggggtgttcattcaggcggaagcagcattag

SEQ ID NO: 188437 - DNA, 159 bp, Artificial Sequence
  derived and/or modified sequence
atggacgtgaagtgccccggctgctacaagatcaccaccgtgttctctcacgctcagacagtagtgctctgtgtgggctgttctacagtgctgtgccagcccacagggggaaaggctcgactaacagagggatgttccttccgccggaagcagcattag

SEQ ID NO: 188438 - DNA, 159 bp, Artificial Sequence
  derived and/or modified sequence
atggacgtgaagtgccccggctgctacaagatcaccaccgtgttctcacatgcacagaccgttgtgctctgcgtggggtgctcaactgtcctctgccagcctactgggggcaaggctcgcctgacagagggatgcagttttaggcgcaaacagcactag

SEQ ID NO: 188439 - DNA, 303 bp, Artificial Sequence
  derived and/or modified sequence
atgtgccagcggtgcggcctgaagctgatcgtgatcatctgcttcttcgtccagctagcaagggatttgcttcacccttctttggaggaggagaagaaaaagcacaagaagaaaagattggtgcagagtcctaacagctacttcatggatgtgaagtgtcccggttgctacaagatcaccactgtattttcgcatgctcagacggttgttctctgtgtgggatgttcaacggtgttgtgtcagccaaccgggggtaaggcccgcctcactgaggggtgttctttcaggcgaaagcaacattag

SEQ ID NO: 188440 - DNA, 255 bp, Artificial Sequence
  derived and/or modified sequence
atgcctcttgcccgagacttattgcacccttcactggaggaagaaaaaaagaaacacaaaaaaaaacgactcgtgcagtctcctaactcttatttcatggacgtgaaatgccccggatgctacaagattacgactgttttctcacatgcccagaccgttgtgctctgtgtggggtgcagtacagtcctgtgtcagcccacaggaggaaaagcccgactcaccgaggggtgctcctttcggcgtaagcagcattag

SEQ ID NO: 188441 - DNA, 159 bp, Artificial Sequence
  derived and/or modified sequence
atggatgtgaaatgccctggctgctacaagatcacaacagtttttagtcacgcccagacagtggtgctctgcgtgggctgctcaaccgtgctgtgccagcctactggcggaaaggctagactgactgagggatgctcatttcggaggaagcagcactag

SEQ ID NO: 188442 - DNA, 159 bp, Artificial Sequence
  derived and/or modified sequence
atggacgtgaagtgccctggatgctataaaataactaccgtcttttcccacgcccagacggtcgtcctatgtgtcgggtgttccaccgtactgtgccagccaactggaggtaaggccaggctgactgaagggtgttcctttcggaggaagcagcactag

SEQ ID NO: 188443 - DNA, 303 bp, Artificial Sequence
  derived and/or modified sequence
atgtgccagcgttgtggcctgaaactgatcgttatcatctgctttttcgtgcagctggccagagacctcctccacccctcactcgaggaagagaaaaaaaagcacaaaaagaagcgtctggtgcaaagcccaaattcttacttcatggatgtaaaatgcccaggctgctacaagattacaacagtattctcacatgcccagaccgttgtgctctgcgtcggttgttctactgtattatgtcaaccaacgggcggaaaagccagactcaccgaggggtgctccttccggaggaagcagcactag

SEQ ID NO: 188444 - DNA, 625 bp, Artificial Sequence
  derived and/or modified sequence
cctttccggcggtgacgacctacgcacacgagaacatgcctctcgcaaaggatctccttcatccctctccagaagaggagaagaggaaacacaagaagaaacgcctggtgcagagccccaattcctacttcatggatgtgaaatgcccaggtgaggagacggcttgctgtagtggggaaagcactggacctcaacagttggaaaatgttgtagtgttagctgtctcgtatccttgaagctgtgcagcagcttcagtttcttcgcctgtggaaaatattttccctgatactcttaaaatttgaatgtatgagactggcaaagttttgcatcttaggaggagtgattcatttcaccgtgatctctcatcacatttcacatacaacccctacgtttttttgtgttgggaaacaatgtaatggatgatgagttgggcataagtgcaggaaagacgggtgtaatagaggaaaaaaatgttatctgcttttctttcaggatgctataaaatcaccacggtctttagccatgcacaaacggtagttttgtgtgttggctgctccactgtcctctgccagcctacaggaggaaaagcaaggcttacagaaggtaaatggtttactaatgtgat

SEQ ID NO: 188445 - DNA, 1344 bp, Artificial Sequence
  derived and/or modified sequence
ccgggggctgagcggcccgccgggttccggggtggcgccggccccggtggccgcgggcgctccctcgccatggcctaagcccgaggccgctccccagccagattctggcctcaggcactgcagagcccgcggcgctcgccaacaagcccgttagacccacgggacttggcaccctggaacgctcaccatccccgggtcttccctgcgccctggacccgagtaccctgctgcggcgtccccctaccaccgagaggagggcctagagcagacaagcccgccccgccgctcctcccagcagcttctatcccggaagttgatgccgagcgcagatcgcttgcagcttgctagctgtgtgggctgggaggtctggtagggctgagcttgcaagaggatcaacatgcctttggctagagatttactacatccgtccttggaagaggaaaagaaaaaacataaaaagaaacgcctagtacaaagtccaaattcttactttatggatgtaaaatgtccaggttgctacaagatcaccacggttttcagccatgctcagacagtggttctttgtgtaggttgttcaacagtgttgtgccagcctacaggaggaaaggccagactcacagaagggtgttcatttagaagaaagcaacactaatgattcaaacagcttcctgaattttaattttgtgttgtctcacagaaagccttatcataaattccataattctaattaatttaccaagataatgtaattacatttggttttgtaaggtatacagcagtaatctcctattttggtgtcagtttttcaataaagttttgattatgggcaaatcccctctttttctttttttaaaatatatttgagtatgccatacatttatatatatggtgtatatgaatttggtttaaacattttaaaatttattctgattagtttgtgtctttttttttttttttgagagagagagtcctgctctgtcactcaagctggagtgcagtggtgcgatctcggctcactgcaacctccgcctcccaggtccaagcaattctcttgccttgtcctcccaagtagctgggattataggcacacaccaccatgcctggctaatttgtgtctcattttcaagagtagaaaccctaaatattttattttcattccttttccaaattgctatgaatgggattaaaggattacagatgtaaagtctattatttgtgaattctaaatgtagttctgctgttgtacctgtggaaacatcttaaagaagtacatattttgcacgtcctgcacgtgtaccccagaacttaaactataattaaaaagaatagtttcaaaaaaataca

SEQ ID NO: 188446 - DNA, 528 bp, Artificial Sequence
  derived and/or modified sequence
agaacaaagcaaacctaaggcacagccataccccgcagaaaacttcgaaatctgcgccttgaaaagggaagccaaaaggatacgagcctctttcataatctctctgttggctagagatttactacatccgtccttggaagaggaaaagaaaaaacataaaaagaaacgcctagtacaaagtccaaattcttactttatggatgtaaaatgtccaggttgctacaagatcaccacggttttcagccatgctcagacagtggttctttgtgtaggttgttcaacagtgttgtgccagcctacaggaggaaaggccagactcacagaagggtgttcatttagaagaaagcaacactaatgattcaaacagcttcctgaattttaattttgtgttgtctcacagaaagccttatcataaattccataattctaattaatttaccaagataatgtaattacatttggttttgtaaggtatacagcagtaatctcctattttggtgtcagtttttcaataaagttttgattatg

SEQ ID NO: 188447 - DNA, 923 bp, Artificial Sequence
  derived and/or modified sequence
aggttgcgcagcgtcttcgcgcgtggcgggcatgtagtgacttgcccggtcaccgcggcgcggctggccctgcaggggcgtgggctgcaattcagaggcggtggctgggaggggaacagttctctgtgtagcttatgagcggtcttggtctttgaggatgcccctgaggttgtgatctttgggtcttttggctttcccagtgattggtgtttctcgccccctctgccttctttcggaagcgatttcctacttgttttccttttttaaaaactgtcctcgttgttgccttatatattaattccgtcaaggacggtcgctcagcaagaattcctgtcagatcagctgttgagccacaggagcaaaaatcacccaggcgctgacgttgtctggtctacttcagcagtttctactctaagcgagtccacagtcggggtcactttctttgcttagcacctcgacttcgcgcagttttcatcgaagacagttcattacgcattggctagagatttactacatccgtccttggaagaggaaaagaaaaaacataaaaagaaacgcctagtacaaagtccaaattcttactttatggatgtaaaatgtccaggttgctacaagatcaccacggttttcagccatgctcagacagtggttctttgtgtaggttgttcaacagtgttgtgccagcctacaggaggaaaggccagactcacagaagggtgttcatttagaagaaagcaacactaatgattcaaacagcttcctgaattttaattttgtgttgtctcacagaaagccttatcataaattccataattctaattaatttaccaagataatgtaattacatttggttttgtaaggtatacagcagtaatctcctattttggtgtcagtttttcaataaagttttgattatgggcaaa

SEQ ID NO: 188448 - DNA, 681 bp, Artificial Sequence
  derived and/or modified sequence
aggacaaagtttgccttaccatatgtttcctgatcgtgcgaaagcccttttctagggacttggagaacacaagtattatgaaaagtactgatgaaagttattaacaggtttcgaaaaataactttactatctgacgtgttgcttctgccgaggatgaccgttattcctgtttttgcatgtatatttcacgtatggttaaatgtgccagcgttgtggtttaaaactaatagtaataatatgcttctttgttcagttggctagagatttactacatccgtccttggaagaggaaaagaaaaaacataaaaagaaacgcctagtacaaagtccaaattcttactttatggatgtaaaatgtccaggttgctacaagatcaccacggttttcagccatgctcagacagtggttctttgtgtaggttgttcaacagtgttgtgccagcctacaggaggaaaggccagactcacagaagggtgttcatttagaagaaagcaacactaatgattcaaacagcttcctgaattttaattttgtgttgtctcacagaaagccttatcataaattccataattctaattaatttaccaagataatgtaattacatttggttttgtaaggtatacagcagtaatctcctattttggtgtcagtttttcaataaagttttgattatgggcaaa

SEQ ID NO: 188449 - DNA, 255 bp, Artificial Sequence
  derived and/or modified sequence
atgcccctggccagagacctgctgcaccccagcctggaggaggagaagaagaagcacaagaagaagagactggtgcagagccccaacagctacttcatggacgtgaagtgccccggctgctacaagatcaccaccgtgttcagccacgcccagaccgtggtgctgtgcgtgggctgcagcaccgtgctgtgccagcccaccggcggcaaggccagactgaccgagggctgcagcttcagaagaaagcagcactag

SEQ ID NO: 188450 - DNA, 159 bp, Artificial Sequence
  derived and/or modified sequence
atggacgtgaagtgccccggctgctacaagatcaccaccgtgttcagccacgcccagaccgtggtgctgtgcgtgggctgcagcaccgtgctgtgccagcccaccggcggcaaggccagactgaccgagggctgcagcttcagaagaaagcagcactag

SEQ ID NO: 188451 - DNA, 303 bp, Artificial Sequence
  derived and/or modified sequence
atgtgccagagatgcggcctgaagctgatcgtgatcatctgcttcttcgtgcagctggccagagacctgctgcaccccagcctggaggaggagaagaagaagcacaagaagaagagactggtgcagagccccaacagctacttcatggacgtgaagtgccccggctgctacaagatcaccaccgtgttcagccacgcccagaccgtggtgctgtgcgtgggctgcagcaccgtgctgtgccagcccaccggcggcaaggccagactgaccgagggctgcagcttcagaagaaagcagcactag

SEQ ID NO: 188452 - protein, 630 aa, Artificial Sequence
  derived and/or modified sequence
MQQDGLGVGTRNGSGKGRSVHPSWPWCAPRPLRYFGRDARARRAQTAAMALLAGGLSRGLGSHPAAAGRDAVVFVWLLLSTWCTAPARAIQVTVSNPYHVVILFQPVTLPCTYQMTSTPTQPIVIWKYKSFCRDRIADAFSPASVDNQLNAQLAAGNPGYNPYVECQDSVRTVRVVATKQGNAVTLGDYYQGRRITITGNADLTFDQTAWGDSGVYYCSVVSAQDLQGNNEAYAELIVLDWLFVVVVCLAAFLIFLLLGICWCQCCPHTCCCYVRCPCCPDKCCCPEALYAAGKAATSGVPSIYAPSTYAHLSPAKTPPPPAMIPMGPAYNGYPGGYPGDVDRSSSAGGQGSYVPLLRDTDSSVASEVRSGYRIQASQQDDSMRVLYYMEKELANFDPSRPGPPSGRVERAMSEVTSLHEDDWRSRPSRGPALTPIRDEEWGGHSPRSPRGWDQEPAREQAGGGWRARRPRARSVDALDDLTPPSTAESGSRSPTSNGGRSRAYMPPRSRSRDDLYDQDDSRDFPRSRDPHYDDFRSRERPPADPRSHHHRTRDPRDNGSRSGDLPYDGRLLEEAVRKKGSEERRRPHKEEEEEAYYPPAPPPYSETDSQASRERRLKKNLALSRESLVV

SEQ ID NO: 188453 - DNA, 2228 bp, Artificial Sequence
  derived and/or modified sequence
tcagcccacttccggggagggaggcagaggaacccctccccgccgctcacccctaagcccagccctcggctcccacccttgtgtacctgggccgaaccattcaccggagcgcgcagcgggtggagtgtggctcggaggaccgcggcgggtcaagcacctttctcccccatatctgaaagcatgccctttgtccacgtcgtttacgctcattaaaacttccagaatgcaacaggacggacttggagtagggacaaggaacggaagtgggaaggggaggagcgtgcacccctcctggccttggtgcgcgccgcgccccctaaggtactttggaagggacgcgcgggccagacgcgcccagacggccgcgatggcgctgttggccggcgggctctccagagggctgggctcccacccggccgccgcaggccgggacgcggtcgtcttcgtgtggcttctgcttagcacctggtgcacagctcctgccagggccatccaggtgaccgtgtccaacccctaccacgtggtgatcctcttccagcctgtgaccctgccctgtacctaccagatgacctcgacccccacgcaacccatcgtcatctggaagtacaagtctttctgccgggaccgcatcgccgatgccttctccccggccagcgtcgacaaccagctcaatgcccagctggcagccgggaacccaggctacaacccctacgttgagtgccaggacagcgtgcgcaccgtcagggtcgtggccaccaagcagggcaacgctgtgaccctgggagattactaccagggccggaggattaccatcaccggaaatgctgacctgacctttgaccagacggcgtggggggacagtggtgtgtattactgctccgtggtctcagcccaggacctccaggggaacaatgaggcctacgcagagctcatcgtccttgactggctcttcgtggttgtggtatgcctggctgccttcctcatcttcctcctcctgggcatctgctggtgccagtgctgcccgcacacttgctgctgctacgtcaggtgcccctgctgcccagacaagtgctgctgccccgaggccctgtatgccgccggcaaagcagccacctcaggtgttcccagcatttatgcccccagcacctatgcccacctgtctcccgccaagaccccacccccaccagctatgattcccatgggccctgcctacaacgggtaccctggaggataccctggagacgttgacaggagtagctcagctggtggccaaggctcctatgtacccctgcttcgggacacggacagcagtgtggcctctgaagtccgcagtggctacaggattcaggccagccagcaggacgactccatgcgggtcctgtactacatggagaaggagctggccaacttcgacccttctcgacctggcccccccagtggccgtgtggagcgggccatgagtgaagtcacctccctccacgaggacgactggcgatctcggccttcccggggccctgccctcaccccgatccgggatgaggagtggggtggccactccccccggagtcccaggggatgggaccaggagcccgccagggagcaggcaggcgggggctggcgggccaggcggccccgggcccgctccgtggacgccctggacgacctcaccccgccgagcaccgccgagtcagggagcaggtctcccacgagtaatggtgggagaagccgggcctacatgcccccgcggagccgcagccgggacgacctctatgaccaagacgactcgagggacttcccacgctcccgggacccccactacgacgacttcaggtctcgggagcgccctcctgccgaccccaggtcccaccaccaccgtacccgggaccctcgggacaacggctccaggtccggggacctcccctatgatgggcggctactggaggaggctgtgaggaagaaggggtcggaggagaggaggagaccccacaaggaggaggaggaagaggcctactacccgcccgcgccgcccccgtactcggagaccgactcgcaggcgtcccgagagcgcaggctcaagaagaacttggccctgagtcgggaaagtttagtcgtctgatctgacgttttctacgtagcttttgtatttttttttttaatttgaaggaacactgatgaagccctgccatacccctcccgagtctaataaaacgtataatcacaaaaaaaaa

SEQ ID NO: 188454 - DNA, 1893 bp, Artificial Sequence
  derived and/or modified sequence
atgcagcaggacggtctgggcgtggggactcgcaacggaagcgggaagggaaggtctgtccacccttcttggccctggtgtgcaccaagacccctgaggtactttggaagagatgccagagctcggagagcacagacagccgcaatggcactcctggctgggggattgagcaggggactcggaagtcacccagccgctgccggacgcgacgcggtggtcttcgtgtggctccttttaagcacatggtgtactgctcccgctcgcgctatccaggtgacagtgtcaaatccatatcacgtggtgatcttattccagcccgttaccttgccttgtacttaccagatgacctccacccctactcagcccatcgtgatctggaagtataagtctttttgtcgagatcgtattgcggatgcattctcccctgcctccgtcgataaccagctgaacgcccaacttgctgctgggaatcctggatataatccttatgttgagtgccaggatagcgtgaggacggtgagggtggtcgcaacaaaacagggaaacgccgtgaccttgggggactattatcaggggagacgtattaccattaccgggaacgctgacctgacatttgatcagacagcatggggggattccggcgtctattactgctcggttgttagcgcccaagacctccagggtaataacgaggcctacgctgaattgatcgtgctcgattggttgtttgtcgtagtcgtttgcctggccgcttttctaatcttcctcctgttgggtatatgttggtgccagtgttgtccccacacctgttgttgttatgtgcggtgcccttgttgtcctgataaatgttgctgtcctgaagccctgtacgctgcaggcaaagctgccacttccggagtgccttcgatctatgccccaagcacctatgcccacctgtcacccgcaaagaccccccctcccccagcaatgatacctatgggcccagcgtataacgggtatccgggaggataccctggggacgtggaccggagcagttctgccggtggccaggggagttacgttccattgctgcgggacaccgactccagtgtggcgtccgaggtcagaagcggctacagaatacaagcctcccagcaagacgacagcatgcgagtattgtattatatggaaaaagagctggctaacttcgacccctcacgtccaggaccccctagtgggagagtggagcgcgcaatgagtgaagtaacctctctacatgaggatgactggcgcagcagacctagcagaggcccagccttgaccccaatacgggatgaggagtggggaggccactcacccagatctcccagaggttgggaccaggagcccgcaagagaacaggccggaggagggtggcgcgctcggcgtccacgagctcggagtgtcgacgccctagatgatctcactccaccctctaccgccgagtcgggttcgcgcagtccgacatctaacggtggacggtcccgggcatatatgcccccaagaagccgttccagagacgacctgtacgaccaggatgactctagggatttcccacgctcccgtgaccctcattacgatgacttccgaagtcgggagcggccacctgccgatcccaggagccaccaccacaggaccagagatcctagggataacggatcgaggtcgggggacttgccttatgatgggcgacttttggaggaagcagtacgaaagaaagggagcgaagagcggcgacgtcctcataaagaggaagaagaagaggcttattatccgccagctccccctccttattcagaaactgactctcaggcctcacgagagcgacgccttaagaagaacttggccctgagtagagagtcccttgtagtgtag

SEQ ID NO: 188455 - DNA, 1893 bp, Artificial Sequence
  derived and/or modified sequence
atgcagcaagacgggctgggggttgggaccagaaacggatccggcaaaggcagatctgtgcacccatcatggccctggtgcgccccacgaccactaagatactttggcagagacgcacgggctcgacgcgcccagactgctgccatggctcttcttgccgggggcctatcccgtggattggggagccaccctgctgcggccggacgcgacgccgtggtatttgtgtggctgctgctatcaacttggtgtacggcacctgccagggccatccaggtgacagtatctaacccataccacgtggtgatcctgttccagccagtcaccctcccatgcacatatcagatgacgtccactcccacccagccaatcgtaatttggaagtataagtcgttttgtcgcgacagaatcgctgacgcctttagtccagcttccgtggataaccagcttaacgcacaattggcggccggaaatcctggatacaacccatacgttgagtgccaggactccgtacgcaccgttcgcgtggttgcaactaagcagggaaatgctgtgacgctcggggactactatcaagggcgtcgcatcacaatcaccggtaatgccgaccttacttttgaccagaccgcctggggagactccggtgtgtactactgcagtgttgtctcggcccaggatttacagggaaataatgaggcctacgccgagctgatcgtgctggattggcttttcgttgtcgtggtctgccttgccgcttttttgattttcttgctgctcggaatttgttggtgtcagtgttgtccacatacttgttgttgctatgtgcgctgcccatgttgtcccgacaaatgttgttgtcctgaggctttgtacgctgccgggaaagctgcgacatccggggtcccttccatctatgcaccaagcacttatgcccatctctcccctgccaagacaccaccgcctcctgcaatgattccaatggggcctgcatataatggatatcccggtgggtacccgggagacgttgaccggtctagcagtgccggagggcaaggctcatatgtgcctctcctccgggatacggactcatctgtggcctccgaggtgcgtagtggataccgcattcaggcgtcacagcaggacgattcaatgcgagttctctattacatggaaaaggagctggccaattttgaccctagcaggccaggaccacctagcggaagagtggaacgagctatgtcagaggttacgtcactgcatgaagacgactggcgttctaggccaagccgtggtcctgcacttacgccaataagagatgaagaatgggggggacattctccacgtagccctcggggatgggaccaggagcccgccagggaacaggctggcggaggctggcgtgcaaggcgtccccgcgctaggagtgtggatgccctggacgatcttacccctccttctaccgccgaatccggatctcgatctcccacatccaacgggggcaggtctagggcttatatgcccccaaggagccggagtagagatgacctctacgaccaagatgatagtagagacttcccacgaagccgcgacccacattacgacgattttcgtagccgcgaacgccctcccgctgatccacggtcgcaccatcatcgaaccagggaccccagggacaatggatcgcggagcggggaccttccttacgatggtagattactcgaggaggccgtacgcaaaaagggtagtgaagagcgcagacgaccacataaagaagaagaggaagaagcctactacccacctgcaccaccaccttatagcgaaacagattcgcaggcttcccgtgagagacggctgaaaaagaatttagcgctgtctagagagtcactggtagtctag

SEQ ID NO: 188456 - DNA, 1893 bp, Artificial Sequence
  derived and/or modified sequence
atgcagcaggacggcttgggcgtgggcacaaggaatgggtccgggaaaggtcggagtgtgcatccatcatggccatggtgtgcccccagacctttacggtattttggaagagacgcacgagctcgaagagcacagacagcagctatggccctgttggccggtggtctctccaggggacttggtagtcatcccgcagctgcaggtcgcgatgcagtggtctttgtttggcttttgctgagtacctggtgcactgcaccagcccgcgccatccaggtcacggtgtcaaatccataccatgtcgtaattctttttcaacccgtcacactcccatgtacctatcaaatgacatccactcctacacagcctattgtgatttggaagtacaagtcattttgcagagatcggattgcggatgcgttctctcccgcttcagtagacaatcagttaaacgcccagttggccgccggaaaccctggatacaacccatacgtggagtgccaggattcggtgagaacagttcgcgtggtcgccactaaacaggggaacgcagtgacactgggggattactaccagggccggcgaatcaccattacaggtaatgctgacctcacattcgaccagaccgcatggggggattctggagtttattactgtagtgtggtgtccgctcaagatctacaaggtaacaacgaagcctacgctgaacttatcgtgcttgactggctctttgtggtggtcgtttgcctcgctgcattccttatcttcctcctgctaggaatttgctggtgtcagtgttgtcctcacacctgctgctgctacgtccgatgtccgtgttgcccagataagtgttgctgccctgaagctctctacgctgccgggaaagctgcaacaagtggtgttccatctatctatgccccaagtacctacgctcacctttcacctgccaaaacaccacctccacccgccatgattccgatgggcccagcttataatggataccctggcggctaccccggagacgtggatcgcagttcctcagccggtggacaagggagttatgttcctctcctccgggacacagacagctctgtggcgtccgaagtcaggagtggctatcggattcaggccagccaacaagatgacagtatgcgtgttctgtattatatggaaaaggaattagcaaattttgacccttcacgtcctggcccaccctctggtagagttgaacgagcgatgtcagaggtgactagtctccatgaagatgactggcgatctagaccatcacgaggacccgcactcactccaatccgcgacgaggagtggggtggccactcacccaggtctccccggggatgggaccaagaacctgcccgagagcaagctggagggggatggagagccagacgacctcgagcaaggagtgtcgacgccttagacgacctgaccccaccttcaaccgccgagtcgggatcgcgctcccctacctccaatgggggacgatcccgggcatacatgccccccaggagccgcagccgagacgacttatacgatcaagacgattcacgagattttcctagatccagagacccccactacgacgattttagatcccgtgagcggccccccgcagatccacggtcccatcatcaccgcacccgtgaccccagagacaacggctccagatcgggcgacctcccttacgatggaagacttctcgaagaggccgtcagaaagaaaggatctgaggagaggcgaagacctcataaggaggaggaggaagaagcttactacccccctgccccacccccttatagtgaaaccgacagtcaagcaagcagagagcggcggctaaagaaaaacctcgccctaagtcgcgaaagtttagttgtgtag

SEQ ID NO: 188457 - DNA, 1893 bp, Artificial Sequence
  derived and/or modified sequence
atgcagcaggacggcctgggcgtgggcaccagaaacggcagcggcaagggcagaagcgtgcaccccagctggccctggtgcgcccccagacccctgagatacttcggcagagacgccagagccagaagagcccagaccgccgccatggccctgctggccggcggcctgagcagaggcctgggcagccaccccgccgccgccggcagagacgccgtggtgttcgtgtggctgctgctgagcacctggtgcaccgcccccgccagagccatccaggtgaccgtgagcaacccctaccacgtggtgatcctgttccagcccgtgaccctgccctgcacctaccagatgaccagcacccccacccagcccatcgtgatctggaagtacaagagcttctgcagagacagaatcgccgacgccttcagccccgccagcgtggacaaccagctgaacgcccagctggccgccggcaaccccggctacaacccctacgtggagtgccaggacagcgtgagaaccgtgagagtggtggccaccaagcagggcaacgccgtgaccctgggcgactactaccagggcagaagaatcaccatcaccggcaacgccgacctgaccttcgaccagaccgcctggggcgacagcggcgtgtactactgcagcgtggtgagcgcccaggacctgcagggcaacaacgaggcctacgccgagctgatcgtgctggactggctgttcgtggtggtggtgtgcctggccgccttcctgatcttcctgctgctgggcatctgctggtgccagtgctgcccccacacctgctgctgctacgtgagatgcccctgctgccccgacaagtgctgctgccccgaggccctgtacgccgccggcaaggccgccaccagcggcgtgcccagcatctacgcccccagcacctacgcccacctgagccccgccaagaccccccccccccccgccatgatccccatgggccccgcctacaacggctaccccggcggctaccccggcgacgtggacagaagcagcagcgccggcggccagggcagctacgtgcccctgctgagagacaccgacagcagcgtggccagcgaggtgagaagcggctacagaatccaggccagccagcaggacgacagcatgagagtgctgtactacatggagaaggagctggccaacttcgaccccagcagacccggcccccccagcggcagagtggagagagccatgagcgaggtgaccagcctgcacgaggacgactggagaagcagacccagcagaggccccgccctgacccccatcagagacgaggagtggggcggccacagccccagaagccccagaggctgggaccaggagcccgccagagagcaggccggcggcggctggagagccagaagacccagagccagaagcgtggacgccctggacgacctgaccccccccagcaccgccgagagcggcagcagaagccccaccagcaacggcggcagaagcagagcctacatgccccccagaagcagaagcagagacgacctgtacgaccaggacgacagcagagacttccccagaagcagagacccccactacgacgacttcagaagcagagagagaccccccgccgaccccagaagccaccaccacagaaccagagaccccagagacaacggcagcagaagcggcgacctgccctacgacggcagactgctggaggaggccgtgagaaagaagggcagcgaggagagaagaagaccccacaaggaggaggaggaggaggcctactacccccccgccccccccccctacagcgagaccgacagccaggccagcagagagagaagactgaagaagaacctggccctgagcagagagagcctggtggtgtag

SEQ ID NO: 188458 - DNA, 1893 bp, Artificial Sequence
  derived and/or modified sequence
atgcaacaagacggtctgggagtagggactaggaatggtagcgggaaaggcagatcagttcacccctcttggccatggtgtgcacctcgaccattacgatattttgggcgggacgctagggcccggagggctcaaacggccgcaatggcgctcctcgcaggaggattgagtaggggtctgggcagccatcctgccgccgctgggagagatgctgttgtttttgtatggctcctcctgtcaacatggtgtaccgcccccgccagagccatccaggtgaccgtctcaaacccgtatcatgtagtgattttgttccagcctgtgacactaccctgcacataccagatgacaagcactcctacccaacccatagtgatctggaagtacaagagcttttgtcgggaccgcattgcagatgctttcagtcccgcatcggtggataatcagttgaatgcccagctggctgccggaaacccaggatataacccctacgtagaatgccaagattcagtgaggactgtgcgagttgtggccacaaagcagggaaacgctgttacactgggagactactaccagggaagacggatcaccattaccggaaatgccgatctcactttcgaccagacggcatggggcgacagcggcgtgtactactgcagtgttgtctcagcccaggatttgcaggggaataacgaggcttacgctgagcttatcgtcctggactggctctttgtggtcgtcgtgtgcctcgccgcatttttgatatttctcctgctggggatatgctggtgtcagtgttgcccacacacatgttgctgctatgtcagatgtccctgttgccccgataaatgttgttgcccagaggccctctacgctgccggcaaagcagccacttccggagtacccagcatttatgcacctagtacctatgctcacctctcacccgcaaaaactccaccacctcctgccatgattcccatgggtcctgcttataacgggtacccaggcgggtatcctggtgacgtcgacagatcttccagcgctggcggccagggaagctacgtgccgttgctccgggatactgattctagcgtggcaagcgaggtgcgatctggataccgaatacaggcctcccagcaggatgattcaatgagggtgctctattatatggagaaggagctggcaaacttcgatccttcaaggcccggtccacctagtgggcgcgtggaaagggcaatgtcagaggtgacgtcactccacgaagacgactggcggtctaggccgagtagaggcccagcactgacccccatacgagacgaggagtggggaggacactcacctagaagccccaggggctgggatcaagagccagctcgggaacaggccggcggagggtggagggcacgtcgaccccgagcccgctctgtcgacgcactcgacgacctcacacctccttcgaccgccgagtctggatcgcgaagccctactagtaatggaggccgctcgcgggcatacatgcctccgcggtcaaggtcacgggatgatctgtacgaccaagacgattctcgggatttccctcggtccagagaccctcattatgatgacttcagaagtagggagcgaccccccgctgatccacgttcccatcaccatagaactagggatcccagggacaacggatcaagatctggcgacctgccctatgacgggagactgctggaagaggcagtgaggaaaaaaggctctgaggagcggcgtaggccacataaggaggaggaggaagaggcctattatccacccgcccctcccccatattccgagactgatagccaggcttcaagggaaagacgattaaagaaaaatctggcattaagtcgagagtctctcgtagtctag

SEQ ID NO: 188459 - DNA, 2217 bp, Artificial Sequence
  derived and/or modified sequence
tcagcccacttccggggagggaggcagaggaacccctccccgccgctcacccctaagcccagccctcggctcccacccttgtgtacctgggccgaaccattcaccggagcgcgcagcgggtggagtgtggctcggaggaccgcggcgggtcaagcacctttctcccccatatctgaaagcatgccctttgtccacgtcgtttacgctcattaaaacttccagaatgcaacaggacggacttggagtagggacaaggaacggaagtgggaaggggaggagcgtgcacccctcctggccttggtgcgcgccgcgccccctaaggtactttggaagggacgcgcgggccagacgcgcccagacggccgcgatggcgctgttggccggcgggctctccagagggctgggctcccacccggccgccgcaggccgggacgcggtcgtcttcgtgtggcttctgcttagcacctggtgcacagctcctgccagggccatccaggtgaccgtgtccaacccctaccacgtggtgatcctcttccagcctgtgaccctgccctgtacctaccagatgacctcgacccccacgcaacccatcgtcatctggaagtacaagtctttctgccgggaccgcatcgccgatgccttctccccggccagcgtcgacaaccagctcaatgcccagctggcagccgggaacccaggctacaacccctacgttgagtgccaggacagcgtgcgcaccgtcagggtcgtggccaccaagcagggcaacgctgtgaccctgggagattactaccagggccggaggattaccatcaccggaaatgctgacctgacctttgaccagacggcgtggggggacagtggtgtgtattactgctccgtggtctcagcccaggacctccaggggaacaatgaggcctacgcagagctcatcgtccttgactggctcttcgtggttgtggtatgcctggctgccttcctcatcttcctcctcctgggcatctgctggtgccagtgctgcccgcacacttgctgctgctacgtcaggtgcccctgctgcccagacaagtgctgctgccccgaggccctgtatgccgccggcaaagcagccacctcaggtgttcccagcatttatgcccccagcacctatgcccacctgtctcccgccaagaccccacccccaccagctatgattcccatgggccctgcctacaacgggtaccctggaggataccctggagacgttgacaggagtagctcagctggtggccaaggctcctatgtacccctgcttcgggacacggacagcagtgtggcctctgaagtccgcagtggctacaggattcaggccagccagcaggacgactccatgcgggtcctgtactacatggagaaggagctggccaacttcgacccttctcgacctggcccccccagtggccgtgtggagcgggccatgagtgaagtcacctccctccacgaggacgactggcgatctcggccttcccggggccctgccctcaccccgatccgggatgaggagtggggtggccactccccccggagtcccaggggatgggaccaggagcccgccagggagcaggcaggcgggggctggcgggccaggcggccccgggcccgctccgtggacgccctggacgacctcaccccgccgagcaccgccgagtcagggagcaggtctcccacgagtaatggtgggagaagccgggcctacatgcccccgcggagccgcagccgggacgacctctatgaccaagacgactcgagggacttcccacgctcccgggacccccactacgacgacttcaggtctcgggagcgccctcctgccgaccccaggtcccaccaccaccgtacccgggaccctcgggacaacggctccaggtccggggacctcccctatgatgggcggctactggaggaggctgtgaggaagaaggggtcggaggagaggaggagaccccacaaggaggaggaggaagaggcctactacccgcccgcgccgcccccgtactcggagaccgactcgcaggcgtcccgagagcgcaggctcaagaagaacttggccctgagtcgggaaagtttagtcgtctgatctgacgttttctacgtagcttttgtatttttttttttaatttgaaggaacactgatgaagccctgccatacccctcccgagtctaataaaacgtataatc

SEQ ID NO: 188460 - DNA, 1893 bp, Artificial Sequence
  derived and/or modified sequence
atgcagcaggacggcctgggcgtgggcaccagaaatggcagcggcaagggccgctctgtgcaccccagctggccctggtgtgccccccggcccctgcgctacttcggcagagatgcccgggcccggcgggcccagacagctgccatggccctgctggccggcggcctgagccggggcctgggcagccaccctgctgctgctggaagagatgctgtggtgtttgtgtggctgctgctgagcacctggtgcacagccccagcccgggccatccaggtgacagtgagcaacccctaccacgtggtgatcctcttccagcctgtgaccctgccctgcacctaccagatgaccagcacccccacccagcccatcgtcatctggaagtacaagagcttctgccgggacagaattgctgatgccttcagccctgcctctgtggacaaccagctgaatgcccagctggccgccggcaaccctggctacaacccctacgtggagtgccaggacagcgtgaggacagtgcgggtggtggccaccaagcagggcaatgctgtgaccctgggggactactaccagggccgccgcatcaccatcactggaaatgctgacctgacctttgaccagacagcctggggagacagcggcgtgtactactgcagcgtggtgtctgcccaggacctgcagggcaacaatgaggcctatgcagagctgattgtgctggactggctgtttgtggtggtggtgtgcctggccgccttcctgatcttcctgctgctgggcatctgctggtgccagtgctgcccccacacctgctgctgctacgtgcgctgcccctgctgcccagacaagtgctgctgcccagaggccctgtatgctgctgggaaggccgccaccagcggcgtgcccagcatctatgcccccagcacctacgcccacctgagccctgccaagaccccacctcctccagccatgatccccatgggccctgcctacaacggctacccaggcggctacccaggagatgtggacaggagcagcagcgctgggggccagggcagctatgtgcccctgctgcgggacacagacagctctgtggccagcgaggtgcgcagcggctaccgcatccaggccagccagcaggatgacagcatgagggtgctgtactacatggagaaggagctggccaactttgaccccagcaggcctggccccccatctggccgggtggagcgggccatgtctgaggtgaccagcctgcatgaagatgactggaggagccggcccagccggggccctgccctgacccccatcagagatgaggagtggggcggccacagccccaggagcccccggggctgggaccaggagcccgcccgggagcaggccggcggcggctggagggcccggcggccccgggcccggtctgtggatgccctggatgacctgaccccacccagcacagctgagagcggcagccgcagccccaccagcaatggaggccgcagccgggcctacatgccacccaggagccgcagcagagatgacctgtatgaccaggatgacagccgggacttccccaggagccgggacccccactatgatgacttccgcagccgggagaggcctcctgctgaccccaggagccaccaccacaggacccgggacccccgggacaatggcagccgcagcggggacctgccctatgatggccgcctgctggaggaggccgtgaggaagaagggcagcgaggagaggagaagaccccacaaggaggaggaggaggaggcctactaccccccagcccccccaccctacagcgagacagacagccaggccagccgggagcggcggctgaagaagaacctggccctgagccgggagagcctggtggtgtag

SEQ ID NO: 188461 - DNA, 1893 bp, Artificial Sequence
  derived and/or modified sequence
atgcagcaggacggcctgggcgtgggcacccggaacggcagcggcaaagggcgctctgttcatccaagctggccgtggtgcgcaccaagacccctaagatattttgggcgggatgcacgagcccgcagagcacagacagctgcgatggcgctgttggccggcgggctgtccagaggactcgggagtcaccccgcggctgcaggccgcgatgccgttgtctttgtctggctgctgctttccacctggtgcactgctcctgctagagccatccaggtgacagttagtaatccgtatcatgtagttatccttttccagcccgtgaccctcccttgtacctatcagatgacctctacccctacccagcccattgtcatatggaagtacaagtctttttgcagagatcggatcgcagacgctttttcacccgcctccgttgacaatcagttgaatgcacaattggccgccgggaatccaggatataatccctacgttgaatgccaggactcagttcgaacagtgcgcgtggtggcgaccaagcagggtaacgcagtcactctgggcgactattatcaaggaagacggatcaccattaccggcaatgccgacctgaccttcgatcagactgcctggggagacagtggtgtatattattgctccgttgtgagcgctcaggacctccaggggaacaacgaggcatatgccgagttgattgtactagactggctatttgttgtcgtggtgtgcctggccgcttttttgatcttcctgctgttgggcatatgctggtgtcagtgttgtccgcacacctgttgctgttacgtgcgatgtccttgctgccctgataaatgttgttgtccggaggccctctacgccgctgggaaagctgctaccagcggtgtgcccagcatttatgcaccatccacttatgcgcacttgagtccggccaaaaccccacccccccccgctatgatccctatgggcccggcttacaatggatatcctggcgggtatcctggagacgtcgatcggagtagctccgcaggagggcaaggttcctatgtgcccctcctgagggataccgattcttcagttgcgagcgaagtgcgcagtggctacagaatacaggcaagtcagcaggacgactctatgagagtcctgtactatatggaaaaggaattggcgaattttgatcccagccggcccggccctccgtcaggccgcgtggagcgggctatgtcagaggtgaccagccttcacgaggacgactggaggagtcggccaagccgcggccccgccttaacaccgatcagagatgaagagtggggcggtcactctcctaggtcaccccgaggttgggaccaggaacctgcccgagagcaagccggtgggggttggcgggccaggagaccacgagctaggagcgtggatgcattggatgaccttactcccccttccacggccgaatcagggtcacggtctcctacgtccaatggtggacggtccagagcatacatgccgccaaggtctcgttcgcgggacgacctgtacgaccaggacgatagccgggattttccacgtagtcgggacccacactatgacgatttcagaagccgcgaacgtcctccagccgatccacgctctcaccatcaccgcacaagagacccccgagataatggctcacggagtggggacctaccatacgatggacgactcctggaagaggccgtgagaaaaaagggaagcgaggaacgcagacggccccataaagaggaagaggaggaggcttactatccgcctgccccacccccctacagcgaaacagacagtcaagctagccgggagcggcgactaaagaaaaacttggcacttagcagggagtccttggtcgtctag

SEQ ID NO: 188462 - RNA, 1893 nt, Artificial Sequence
  derived and/or modified sequence
augcagcaagacgggcuggggguugggaccagaaacggauccggcaaaggcagaucugugcacccaucauggcccuggugcgccccacgaccacuaagauacuuuggcagagacgcacgggcucgacgcgcccagacugcugccauggcucuucuugccgggggccuaucccguggauuggggagccacccugcugcggccggacgcgacgccgugguauuuguguggcugcugcuaucaacuugguguacggcaccugccagggccauccaggugacaguaucuaacccauaccacguggugauccuguuccagccagucacccucccaugcacauaucagaugacguccacucccacccagccaaucguaauuuggaaguauaagucguuuugucgcgacagaaucgcugacgccuuuaguccagcuuccguggauaaccagcuuaacgcacaauuggcggccggaaauccuggauacaacccauacguugagugccaggacuccguacgcaccguucgcgugguugcaacuaagcagggaaaugcugugacgcucggggacuacuaucaagggcgucgcaucacaaucaccgguaaugccgaccuuacuuuugaccagaccgccuggggagacuccgguguguacuacugcaguguugucucggcccaggauuuacagggaaauaaugaggccuacgccgagcugaucgugcuggauuggcuuuucguugucguggucugccuugccgcuuuuuugauuuucuugcugcucggaauuuguuggugucaguguuguccacauacuuguuguugcuaugugcgcugcccauguugucccgacaaauguuguuguccugaggcuuuguacgcugccgggaaagcugcgacauccggggucccuuccaucuaugcaccaagcacuuaugcccaucucuccccugccaagacaccaccgccuccugcaaugauuccaauggggccugcauauaauggauaucccgguggguacccgggagacguugaccggucuagcagugccggagggcaaggcucauaugugccucuccuccgggauacggacucaucuguggccuccgaggugcguaguggauaccgcauucaggcgucacagcaggacgauucaaugcgaguucucuauuacauggaaaaggagcuggccaauuuugacccuagcaggccaggaccaccuagcggaagaguggaacgagcuaugucagagguuacgucacugcaugaagacgacuggcguucuaggccaagccgugguccugcacuuacgccaauaagagaugaagaaugggggggacauucuccacguagcccucggggaugggaccaggagcccgccagggaacaggcuggcggaggcuggcgugcaaggcguccccgcgcuaggaguguggaugcccuggacgaucuuaccccuccuucuaccgccgaauccggaucucgaucucccacauccaacgggggcaggucuagggcuuauaugcccccaaggagccggaguagagaugaccucuacgaccaagaugauaguagagacuucccacgaagccgcgacccacauuacgacgauuuucguagccgcgaacgcccucccgcugauccacggucgcaccaucaucgaaccagggaccccagggacaauggaucgcggagcggggaccuuccuuacgaugguagauuacucgaggaggccguacgcaaaaaggguagugaagagcgcagacgaccacauaaagaagaagaggaagaagccuacuacccaccugcaccaccaccuuauagcgaaacagauucgcaggcuucccgugagagacggcugaaaaagaauuuagcgcugucuagagagucacugguagucuag

SEQ ID NO: 188463 - RNA, 1893 nt, Artificial Sequence
  derived and/or modified sequence
augcagcaggacggcuugggcgugggcacaaggaauggguccgggaaaggucggagugugcauccaucauggccauggugugcccccagaccuuuacgguauuuuggaagagacgcacgagcucgaagagcacagacagcagcuauggcccuguuggccgguggucucuccaggggacuugguagucaucccgcagcugcaggucgcgaugcaguggucuuuguuuggcuuuugcugaguaccuggugcacugcaccagcccgcgccauccaggucacggugucaaauccauaccaugucguaauucuuuuucaacccgucacacucccauguaccuaucaaaugacauccacuccuacacagccuauugugauuuggaaguacaagucauuuugcagagaucggauugcggaugcguucucucccgcuucaguagacaaucaguuaaacgcccaguuggccgccggaaacccuggauacaacccauacguggagugccaggauucggugagaacaguucgcguggucgccacuaaacaggggaacgcagugacacugggggauuacuaccagggccggcgaaucaccauuacagguaaugcugaccucacauucgaccagaccgcauggggggauucuggaguuuauuacuguagugugguguccgcucaagaucuacaagguaacaacgaagccuacgcugaacuuaucgugcuugacuggcucuuugugguggucguuugccucgcugcauuccuuaucuuccuccugcuaggaauuugcuggugucaguguuguccucacaccugcugcugcuacguccgauguccguguugcccagauaaguguugcugcccugaagcucucuacgcugccgggaaagcugcaacaagugguguuccaucuaucuaugccccaaguaccuacgcucaccuuucaccugccaaaacaccaccuccacccgccaugauuccgaugggcccagcuuauaauggauacccuggcggcuaccccggagacguggaucgcaguuccucagccgguggacaagggaguuauguuccucuccuccgggacacagacagcucuguggcguccgaagucaggaguggcuaucggauucaggccagccaacaagaugacaguaugcguguucuguauuauauggaaaaggaauuagcaaauuuugacccuucacguccuggcccacccucugguagaguugaacgagcgaugucagaggugacuagucuccaugaagaugacuggcgaucuagaccaucacgaggacccgcacucacuccaauccgcgacgaggagugggguggccacucacccaggucuccccggggaugggaccaagaaccugcccgagagcaagcuggagggggauggagagccagacgaccucgagcaaggagugucgacgccuuagacgaccugaccccaccuucaaccgccgagucgggaucgcgcuccccuaccuccaaugggggacgaucccgggcauacaugccccccaggagccgcagccgagacgacuuauacgaucaagacgauucacgagauuuuccuagauccagagacccccacuacgacgauuuuagaucccgugagcggccccccgcagauccacggucccaucaucaccgcacccgugaccccagagacaacggcuccagaucgggcgaccucccuuacgauggaagacuucucgaagaggccgucagaaagaaaggaucugaggagaggcgaagaccucauaaggaggaggaggaagaagcuuacuaccccccugccccacccccuuauagugaaaccgacagucaagcaagcagagagcggcggcuaaagaaaaaccucgcccuaagucgcgaaaguuuaguuguguag

SEQ ID NO: 188464 - protein, 373 aa, Artificial Sequence
  derived and/or modified sequence
MLIPFSMKNCFQLLCNCQVPAAGFKKTVKNGLILQSISNDVYQNLAVEDWIHDHMNLEGKPILFFWQNSPSVVIGRHQNPWQECNLNLMREEGIKLARRRSGGGTVYHDMGNINLTFFTTKKKYDRMENLKLIVRALNAVQPQLDVQATKRFDLLLDGQFKISGTASKIGRTTAYHHCTLLCSTDGTFLSSLLKSPYQGIRSNATASIPSLVKNLLEKDPTLTCEVLMNAVATEYAAYHQIDNHIHLINPTDETLFPGINSKAKELQTWEWIYGKTPKFSINTSFHVLYEQSHLEIKVFIDIKNGRIEICNIEAPDHWLPLEIRDKLNSSLIGSKFCPTETTMLTNILLRTCPQDHKLNSKWNILCEKIKGIM

SEQ ID NO: 188465 - protein, 106 aa, Artificial Sequence
  derived and/or modified sequence
MLIPFSMKNCFQLLCNCQVPAAGFKKTVKNGLILQSISNDVYQNLAVEDWIHDHMNLEGKPILFFWQNSPSVVIGRHQNPWQECNLNLMREEGIKLARRRSGGGTV

SEQ ID NO: 188466 - protein, 251 aa, Artificial Sequence
  derived and/or modified sequence
MLIPFSMKNCFQLLCNCQVPAAGFKKTVKNGLILQSISNDVYQNLAVEDWIHDHMNLEGKPILFFWQNSPSVVIGRHQNPWQECNLNLMREEGIKLARRRSGGGTVYHDMGNINLTFFTTKKKYDRMENLKLIVRALNAVQPQLDVQATKRFDLLLDGQFKISGTASKIGRTTAYHHCTLLCSTDGTFLSSLLKSPYQGIRSNATASIPSLVKNLLEKDPTLTCEVLMNAVATEYAAYHQIDNHIHLINPT

SEQ ID NO: 188467 - protein, 39 aa, Artificial Sequence
  derived and/or modified sequence
MLIPFSMKNCFQLLCNCQVPAAGFKKTVKNGLILQSISN

SEQ ID NO: 188468 - protein, 135 aa, Artificial Sequence
  derived and/or modified sequence
MLIPFSMKNCFQLLCNCQVPAAGFKKTVKNGLILQSISNDVYQNLAVEDWIHDHMNLEGKPILFFWQNSPSVVIGRHQNPWQECNLNLMREEGIKLARRRSGGGTVYHDMGNINLTFFTTKKKYDRMENLKLIVR

SEQ ID NO: 188469 - DNA, 1122 bp, Artificial Sequence
  derived and/or modified sequence
atgctcatcccgttctccatgaagaattgcttccagctgctgtgcaactgtcaagtcccagccgctggatttaagaagaccgtcaaaaatggcctgatcctgcagtcaatatctaacgacgtgtatcagaatctggccgtggaggactggatacacgatcacatgaacctcgagggaaaaccaatcctctttttttggcagaatagccctagcgtcgtcattggcagacaccaaaacccctggcaggagtgcaacttgaacttaatgagggaggaagggataaagctggcacgaaggcgatccggcggcggcaccgtttatcacgacatgggcaacattaacttgacattctttactactaaaaagaagtacgaccgcatggaaaaccttaagcttattgtgcgtgccctgaatgccgtgcagcctcaactagacgtgcaagctacaaaaaggtttgacctcttgctcgacgggcagttcaaaatatctggcactgcctctaaaatagggcggacaacggcttatcatcactgtaccctgctctgctctaccgacggcacattcctatctagtctcttaaaatccccctatcagggaatccgttcaaacgccacagcaagcatcccgtctctggtaaagaacctgctggaaaaggacccaaccctgacctgtgaggtgcttatgaatgcagtcgctaccgagtacgccgcctatcatcaaatcgataatcacatacatctaataaatcctacagacgaaaccctgtttccagggattaactccaaggctaaagaattacagacctgggaatggatctatggcaaaacaccaaagtttagcatcaatactagtttccacgtcctgtacgagcagagccacctggagattaaagtattcattgacataaaaaatggcagaattgagatctgtaatatcgaagcaccggaccactggttgcctcttgagatccgcgacaaactaaacagctcactaattggctccaagttctgcccgaccgagactaccatgttgaccaacatcttactcagaacttgtcctcaggatcataagcttaattccaaatggaacatcctttgcgagaagattaaaggaatcatgtag

SEQ ID NO: 188470 - DNA, 1122 bp, Artificial Sequence
  derived and/or modified sequence
atgctgattcccttcagcatgaaaaattgttttcagctgttgtgcaattgccaagtccctgccgccggatttaagaaaaccgttaagaatggcttgatcttgcaatctatctccaatgacgtgtaccaaaaccttgcggtggaggactggatccatgatcatatgaaccttgaggggaagcccatactcttcttctggcagaacagtccaagcgtggtaattggaaggcaccagaacccctggcaggagtgtaacctgaatttgatgagagaggagggcatcaaattggctagacggcggagtggaggaggtaccgtgtaccacgatatgggtaacatcaatctgacattctttaccactaagaaaaaatacgacagaatggagaaccttaagttaattgtacgcgccctgaatgctgtgcagccacagttggatgtgcaagcaaccaagcggtttgacctgctattggacggccagttcaaaataagcggcactgcatctaagattggacgaacaaccgcataccaccattgtacactgctttgctccacagacggcacattcctgtcttcgctgctgaagtccccgtaccagggcattaggtctaatgcaacggcctccatcccaagcctcgtgaaaaacctactcgaaaaagatccaacgttgacatgtgaagttctgatgaatgccgttgccactgagtatgccgcctaccaccaaatcgataaccatattcatttgatcaatcccactgacgagacactgttccctggcattaatagtaaggcgaaagagctccagacctgggaatggatctacggtaaaacaccaaagttttcaattaatacaagtttccacgtgttgtatgaacaatctcacctggaaattaaggtgttcatcgatattaagaatggtaggattgagatatgtaacatagaagcacctgaccactggctacctcttgagataagagacaagcttaatagcagtttaatcggcagtaagttttgtcctacagaaaccacaatgctcaccaacatcttacttcgcacatgcccccaggaccacaagctgaactccaaatggaatatactttgtgaaaagatcaagggcatcatgtag

SEQ ID NO: 188471 - DNA, 1122 bp, Artificial Sequence
  derived and/or modified sequence
atgcttattcccttttccatgaaaaactgttttcagctcttatgtaactgccaggtcccagcagcagggttcaagaaaactgtgaagaacgggctcattctccaatccatatcaaacgacgtatatcaaaatctggcagttgaggactggatccacgaccacatgaacttagagggcaagcccatattgttcttttggcaaaactctccatccgtggttatagggaggcatcagaatccctggcaggagtgtaatctgaatctgatgcgggaagagggcatcaaactggcacgccgacgcagtggcggtggtactgtttatcacgatatgggcaacatcaatctcactttcttcacaactaagaaaaagtacgaccggatggagaatctcaaactcatagttagagccttaaacgcagtgcagccccagttggacgtgcaggccacaaaacggttcgatcttctgctggacggacagtttaaaatttccggtaccgctagcaaaatcggcaggactacagcctatcatcattgtactctcctttgctcaactgacggcacctttcttagcagcttgctgaagagtccatatcaggggattaggtcaaacgccacagctagtataccctctctcgtgaagaacctcctagaaaaggatccgactctcacctgcgaggtgctgatgaacgccgttgccacagagtacgcagcataccatcagatcgataaccatatccacctcattaaccccacggatgagacactcttccccggcatcaactccaaagcgaaggagctccagacttgggagtggatctacgggaagacccccaagttttctatcaacacatcattccatgtgctctatgagcagtcgcacctggagattaaagtttttattgacattaagaatgggcgcattgaaatatgcaacatcgaagcccccgaccattggctgccactcgagattagagataagctgaattcttcactgattggttccaaattctgtcccacagagactaccatgcttacaaatatcttgttacggacttgccctcaggaccataagctgaactcaaagtggaacattttatgtgagaaaattaaaggcattatgtag

SEQ ID NO: 188472 - DNA, 1122 bp, Artificial Sequence
  derived and/or modified sequence
atgctcattcccttttctatgaaaaactgtttccaattactttgcaattgtcaggttcccgccgctggttttaaaaaaaccgtgaagaatggattgattctgcaatctatatccaatgacgtatatcagaatttggctgtggaggattggattcatgatcacatgaacctagaagggaaaccaatcctcttcttctggcagaactcgccttccgtcgtgattggcagacaccagaacccctggcaagagtgtaacttgaacctgatgagagaggaaggaattaagcttgcaaggcggaggagcggcgggggcacagtttatcatgatatgggaaatattaacttgacattttttaccacgaaaaaaaagtacgaccggatggaaaatctcaaactcatcgtgagagcgcttaatgcagttcagccccagttggatgtgcaggccacaaagaggtttgatctgctcctggacggccaatttaagatctctgggactgccagtaaaatcggaagaaccacagcttaccaccattgcactttgctctgctccaccgatgggacctttctcagtagcctcctcaagagtccatatcaaggcatcaggtccaatgctaccgcctcaattccctctctggtcaagaacttgcttgaaaaggatccgacactcacatgcgaggtcttgatgaatgccgtggccactgagtacgccgcctaccatcagatcgataatcacatacatctgatcaatccaaccgacgagactctctttccaggtataaatagcaaggctaaggaactacagacctgggagtggatctatggcaaaactcctaagttttccattaacacttccttccatgtcctctatgaacagtctcacctggagatcaaggtcttcattgacatcaaaaatggacggatcgaaatctgtaacatagaagcccctgatcactggttgcctctcgaaatcagagataaactgaacagcagcctgatcgggtccaagttttgtccgaccgaaacaactatgctgacgaatatccttctccgcacctgcccccaagaccacaagttgaatagcaagtggaatattctttgtgagaagatcaagggtatcatgtag

SEQ ID NO: 188473 - DNA, 1122 bp, Artificial Sequence
  derived and/or modified sequence
atgctaattccgtttagcatgaagaattgctttcagctgctctgcaattgccaggtgccagccgcaggctttaagaagacagtcaaaaatggtctgattctccagagcattagtaatgatgtctaccaaaacctcgccgtggaagattggatccacgaccacatgaatctcgagggtaagccgatcttattcttttggcagaatagcccaagcgtggtcattggacggcatcagaatccatggcaggagtgtaacctgaatctgatgagggaagagggtatcaagctggcccgccgacgtagcggaggaggtaccgtgtaccacgacatgggtaatattaatctgacatttttcactaccaagaaaaagtacgatcgcatggagaatctgaagctcattgtgcgcgcactgaatgctgtccaaccccaactggacgttcaggccactaaacggttcgatctgcttcttgatggccaatttaaaataagcggcacagcatccaagatcggtaggaccaccgcttatcatcactgtaccttgctgtgttctaccgacggcacattcttgtccagtctcctgaagagcccttaccaaggaatcaggtctaatgctacggccagcattccatctctggtcaagaacttgctcgagaaagatcccacgttgacatgcgaggtgctaatgaatgctgtggccacagaatatgccgcctaccatcaaatcgacaaccacatacatctgatcaatccaacagatgaaaccttatttcccggcattaatagtaaagcgaaagagcttcagacttgggagtggatttacggaaagacacctaagttttcaatcaatacctctttccacgtgctgtacgaacaatctcatctggaaatcaaggtgtttattgatatcaagaatggtagaattgaaatatgcaatatagaggcacctgaccattggctgccactggaaatcagagataagttgaactctagcttgattggctcaaaattttgccccactgagacgaccatgctgaccaatattctgttaaggacctgtccccaggatcataagctgaattctaagtggaacatcttatgcgagaaaataaagggaataatgtag

SEQ ID NO: 188474 - DNA, 321 bp, Artificial Sequence
  derived and/or modified sequence
atgctgatccccttctcaatgaagaactgtttccagctgctatgcaactgccaggtgcccgctgccggattcaaaaaaaccgtgaagaatgggctgattctgcagtctatctccaatgatgtctaccagaatctggcagttgaagattggatccacgatcatatgaacctcgaaggaaaacccattttgtttttctggcagaatagcccctccgttgtcattggacggcaccagaacccatggcaggaatgtaacctgaacttaatgcgggaggaggggattaagctcgccaggcgaaggagcggcggggggaccgtgtag

SEQ ID NO: 188475 - DNA, 756 bp, Artificial Sequence
  derived and/or modified sequence
atgctcattccattctcaatgaagaactgtttccagttactatgcaactgtcaagtgcctgcagcgggcttcaagaaaaccgtgaagaatggcctaattctgcagagcataagcaatgacgtctaccagaatttggcagtcgaagattggatccatgatcacatgaatctcgagggcaagcccatcctgtttttttggcagaacagtccttcagttgtgattggcaggcatcagaacccatggcaggaatgtaatctgaaccttatgagagaagaggggatcaagctggctagaagacggagcggaggcggcactgtgtaccatgacatgggaaatataaacctcaccttctttacaaccaaaaagaagtacgatcgcatggagaacctgaaactgatcgtgcgcgctctgaatgccgtacaaccccagctggatgtgcaggcaacaaagcgtttcgacctgctcttagatgggcagttcaagatctctgggactgcctctaaaattggacgcaccactgcataccaccactgcacactcttgtgtagtactgacggtacatttctgagtagcctcttaaaatccccatatcagggaattaggtccaacgctacggcaagtatacccagcttggtgaagaatctgttagagaaggaccccacactgacctgtgaggttttgatgaacgcagtcgccactgagtatgcagcatatcatcaaatcgacaaccatatccacctcatcaatcccacttag

SEQ ID NO: 188476 - DNA, 120 bp, Artificial Sequence
  derived and/or modified sequence
atgctgattccattttccatgaagaactgctttcaactgttgtgtaactgccaggtcccagccgctggttttaaaaagactgttaagaatggcttgattcttcaatccatcagcaattag

SEQ ID NO: 188477 - DNA, 408 bp, Artificial Sequence
  derived and/or modified sequence
atgctcattcccttttctatgaagaattgcttccagctgctgtgcaattgtcaggttccagctgccggtttcaaaaaaactgtgaaaaacgggctgatactgcagagtatctcaaatgacgtctatcaaaatcttgcggtcgaagattggattcatgaccacatgaatctggaaggcaagcccatcctgttcttttggcagaatagcccctcggtggttatcggaagacaccagaacccctggcaagagtgcaatctaaacctcatgagagaggaaggcattaagctcgcacgcaggagatccggcggcggaaccgtttatcacgacatgggcaacatcaacctcacattttttaccaccaagaagaagtacgatcggatggagaatctgaaactgattgtgagatag

SEQ ID NO: 188478 - DNA, 1122 bp, Artificial Sequence
  derived and/or modified sequence
atgctgatccccttctccatgaagaactgcttccagctgctgtgcaactgccaggtgcctgctgctggcttcaagaagacagtgaagaatggcctcatcctgcagagcatcagcaatgatgtgtaccagaacctggccgtggaggactggattcatgaccacatgaacctggagggcaagcccatcctcttcttctggcagaacagccccagcgtggtgattggccgccaccagaacccctggcaggagtgcaacctgaacctgatgagggaggagggcatcaagctggccaggagaagaagtggcggcggcaccgtgtaccatgacatgggcaacatcaacctgaccttcttcaccaccaagaagaagtatgacaggatggagaacctgaagctgattgtgcgggccctgaatgctgtgcagccccagctggatgtgcaggccaccaagagatttgacctgctgctggatggccagttcaagatctctggaacagccagcaagattggaagaaccacagcctaccaccactgcaccctgctgtgcagcacagatggcaccttcctgagcagcctgctgaagagcccctaccagggcatccgcagcaatgccacagccagcatccccagcctggtgaagaacctgctggagaaggaccccaccctgacctgtgaggtgctgatgaatgctgtggccacagaatatgctgcctaccaccagattgacaaccacatccacctgatcaaccccacagatgagaccctcttccctggcatcaacagcaaggccaaggagctgcagacctgggagtggatctacggcaagacccccaagttcagcatcaacaccagcttccacgtgctgtatgagcagagccacctggagatcaaggtgttcatcgacatcaagaatggaagaattgagatctgcaacatcgaggccccagaccactggctgcccctggagatccgggacaagctgaacagcagcctcatcggcagcaagttctgccccacagagaccaccatgctgaccaacatcctgctgcggacctgcccccaggaccacaagctgaacagcaagtggaacatcctgtgtgagaagatcaagggcatcatgtag

SEQ ID NO: 188479 - DNA, 321 bp, Artificial Sequence
  derived and/or modified sequence
atgctgatccccttctccatgaagaactgcttccagctgctgtgcaactgccaggtgcctgctgctggcttcaagaagacagtgaagaatggcctcatcctgcagagcatcagcaatgatgtgtaccagaacctggccgtggaggactggattcatgaccacatgaacctggagggcaagcccatcctcttcttctggcagaacagccccagcgtggtgattggccgccaccagaacccctggcaggagtgcaacctgaacctgatgagggaggagggcatcaagctggccaggagaagaagtggcggcggcaccgtgtag

SEQ ID NO: 188480 - DNA, 756 bp, Artificial Sequence
  derived and/or modified sequence
atgctgatccccttctccatgaagaactgcttccagctgctgtgcaactgccaggtgcctgctgctggcttcaagaagacagtgaagaatggcctcatcctgcagagcatcagcaatgatgtgtaccagaacctggccgtggaggactggattcatgaccacatgaacctggagggcaagcccatcctcttcttctggcagaacagccccagcgtggtgattggccgccaccagaacccctggcaggagtgcaacctgaacctgatgagggaggagggcatcaagctggccaggagaagaagtggcggcggcaccgtgtaccatgacatgggcaacatcaacctgaccttcttcaccaccaagaagaagtatgacaggatggagaacctgaagctgattgtgcgggccctgaatgctgtgcagccccagctggatgtgcaggccaccaagagatttgacctgctgctggatggccagttcaagatctctggaacagccagcaagattggaagaaccacagcctaccaccactgcaccctgctgtgcagcacagatggcaccttcctgagcagcctgctgaagagcccctaccagggcatccgcagcaatgccacagccagcatccccagcctggtgaagaacctgctggagaaggaccccaccctgacctgtgaggtgctgatgaatgctgtggccacagaatatgctgcctaccaccagattgacaaccacatccacctgatcaaccccacctag

SEQ ID NO: 188481 - DNA, 120 bp, Artificial Sequence
  derived and/or modified sequence
atgctgatccccttctccatgaagaactgcttccagctgctgtgcaactgccaggtgcctgctgctggcttcaagaagacagtgaagaatggcctcatcctgcagagcatcagcaactag

SEQ ID NO: 188482 - DNA, 408 bp, Artificial Sequence
  derived and/or modified sequence
atgctgatccccttctccatgaagaactgcttccagctgctgtgcaactgccaggtgcctgctgctggcttcaagaagacagtgaagaatggcctcatcctgcagagcatcagcaatgatgtgtaccagaacctggccgtggaggactggattcatgaccacatgaacctggagggcaagcccatcctcttcttctggcagaacagccccagcgtggtgattggccgccaccagaacccctggcaggagtgcaacctgaacctgatgagggaggagggcatcaagctggccaggagaagaagtggcggcggcaccgtgtaccatgacatgggcaacatcaacctgaccttcttcaccaccaagaagaagtatgacaggatggagaacctgaagctgattgtgaggtag

SEQ ID NO: 188483 - DNA, 1352 bp, Artificial Sequence
  derived and/or modified sequence
agcatcgcgcgcaaggcctgccggttgctcggggtcgtatgacgcacttttccagctcgagccctcacgaggccgtgggtacgaccggaagccgcagttcagtgatggggagccgtgtttggcagtgcagaggtagcgaagtgtcccaagaacatggaagcatgctgatcccattttcaatgaagaattgcttccagttactttgtaactgccaggtcccagcagctggctttaaaaaaacagtaaaaaatgggctcattttacagtcaatttccaatgatgtctatcaaaatctggctgtggaagactggatccatgaccatatgaatctagaaggcaaaccaattctattcttttggcagaattctccctctgttgtaattggtaggcatcaaaatccttggcaggaatgtaacctgaatctaatgagagaagaaggtataaaactggctcggagaagaagtggaggaggaacagtctaccatgatatgggtaatatcaatttgactttctttacaaccaaaaaaaagtatgatagaatggaaaatctgaaattaattgtgagagctctgaatgctgtccaaccccagctggatgtgcaggctaccaaaagatttgaccttttacttgatggacagtttaaaatctcaggaacagcttctaagatcggccggactactgcctatcaccattgcactttattatgtagtactgatgggacgttcttgtcttctttgctaaagagcccttaccaagggatcaggagcaatgccactgctagcataccttccttagtgaaaaatcttttggaaaaggatcccactctgacctgtgaagtactaatgaatgctgttgctacagagtatgctgcttatcatcaaattgataatcacattcacctaataaacccaacggatgagacactgtttcctggaataaatagcaaagccaaagaactgcaaacttgggagtggatatatggcaaaactccaaagtttagtataaatacttcctttcatgtgttatatgaacagtcacacttggaaattaaagtattcatagacataaagaatggaagaattgaaatttgtaatattgaagcacctgatcattggttgccattggaaatacgtgacaaattaaattcaagtcttattggcagtaagttttgcccaactgaaactaccatgctaacaaatatattacttagaacatgtccacaagaccacaaactaaacagtaaatggaatattctctgtgaaaaaattaagggaataatgtgattccaagtaaatgtcttaatacagtttcaattagaaaataaaatgtctcatacttgcacattgtatgtc

SEQ ID NO: 188484 - DNA, 1289 bp, Artificial Sequence
  derived and/or modified sequence
agcatcgcgcgcaaggcctgccggttgctcggggtcgtatgacgcacttttccagctcgagccctcacgaggccgtgggtacgaccggaagccgcagcatgctgatcccattttcaatgaagaattgcttccagttactttgtaactgccaggtcccagcagctggctttaaaaaaacagtaaaaaatgggctcattttacagtcaatttccaatgatgtctatcaaaatctggctgtggaagactggatccatgaccatatgaatctagaaggcaaaccaattctattcttttggcagaattctccctctgttgtaattggtaggcatcaaaatccttggcaggaatgtaacctgaatctaatgagagaagaaggtataaaactggctcggagaagaagtggaggaggaacagtctaccatgatatgggtaatatcaatttgactttctttacaaccaaaaaaaagtatgatagaatggaaaatctgaaattaattgtgagagctctgaatgctgtccaaccccagctggatgtgcaggctaccaaaagatttgaccttttacttgatggacagtttaaaatctcaggaacagcttctaagatcggccggactactgcctatcaccattgcactttattatgtagtactgatgggacgttcttgtcttctttgctaaagagcccttaccaagggatcaggagcaatgccactgctagcataccttccttagtgaaaaatcttttggaaaaggatcccactctgacctgtgaagtactaatgaatgctgttgctacagagtatgctgcttatcatcaaattgataatcacattcacctaataaacccaacggatgagacactgtttcctggaataaatagcaaagccaaagaactgcaaacttgggagtggatatatggcaaaactccaaagtttagtataaatacttcctttcatgtgttatatgaacagtcacacttggaaattaaagtattcatagacataaagaatggaagaattgaaatttgtaatattgaagcacctgatcattggttgccattggaaatacgtgacaaattaaattcaagtcttattggcagtaagttttgcccaactgaaactaccatgctaacaaatatattacttagaacatgtccacaagaccacaaactaaacagtaaatggaatattctctgtgaaaaaattaagggaataatgtgattccaagtaaatgtcttaatacagtttcaattagaaaataaaatgtctcatacttgcacattgtatgtc

SEQ ID NO: 188485 - DNA, 1424 bp, Artificial Sequence
  derived and/or modified sequence
agcatcgcgcgcaaggcctgccggttgctcggggtcgtatgacgcacttttccagctcgagccctcacgaggccgtgggtacgaccggaagccgcagactgaatctcgctctgttgcccagcccatctcggcccactgaaacctccacctcccgggttcaagcgattctcctgcctcagcctcccgagtagctgagattacaggcgcctgccaccacgcccagcatgctgatcccattttcaatgaagaattgcttccagttactttgtaactgccaggtcccagcagctggctttaaaaaaacagtaaaaaatgggctcattttacagtcaatttccaatgatgtctatcaaaatctggctgtggaagactggatccatgaccatatgaatctagaaggcaaaccaattctattcttttggcagaattctccctctgttgtaattggtaggcatcaaaatccttggcaggaatgtaacctgaatctaatgagagaagaaggtataaaactggctcggagaagaagtggaggaggaacagtctaccatgatatgggtaatatcaatttgactttctttacaaccaaaaaaaagtatgatagaatggaaaatctgaaattaattgtgagagctctgaatgctgtccaaccccagctggatgtgcaggctaccaaaagatttgaccttttacttgatggacagtttaaaatctcaggaacagcttctaagatcggccggactactgcctatcaccattgcactttattatgtagtactgatgggacgttcttgtcttctttgctaaagagcccttaccaagggatcaggagcaatgccactgctagcataccttccttagtgaaaaatcttttggaaaaggatcccactctgacctgtgaagtactaatgaatgctgttgctacagagtatgctgcttatcatcaaattgataatcacattcacctaataaacccaacggatgagacactgtttcctggaataaatagcaaagccaaagaactgcaaacttgggagtggatatatggcaaaactccaaagtttagtataaatacttcctttcatgtgttatatgaacagtcacacttggaaattaaagtattcatagacataaagaatggaagaattgaaatttgtaatattgaagcacctgatcattggttgccattggaaatacgtgacaaattaaattcaagtcttattggcagtaagttttgcccaactgaaactaccatgctaacaaatatattacttagaacatgtccacaagaccacaaactaaacagtaaatggaatattctctgtgaaaaaattaagggaataatgtgattccaagtaaatgtcttaatacagtttcaattagaaaataaaatgtctcatacttgcacattgtatgtcaaaaaaaaa

SEQ ID NO: 188486 - DNA, 1531 bp, Artificial Sequence
  derived and/or modified sequence
agcatcgcgcgcaaggcctgccggttgctcggggtcgtatgacgcacttttccagctcgagccctcacgaggccgtgggtacgaccggaagccgcagactgaatctcgctctgttgcccagcccatctcggcccactgaaacctccacctcccgggttcaagcgattctcctgcctcagcctcccgagtagctgagattacaggcgcctgccaccacgcccaggcggtgtccctgaagtataaatccaaagccttcatgcctgtaatccgagtgctttaggaggccaaggcaggaggactgcttgagcccaggagtttgagaccagcctggacaacaaacatgctgatcccattttcaatgaagaattgcttccagttactttgtaactgccaggtcccagcagctggctttaaaaaaacagtaaaaaatgggctcattttacagtcaatttccaatgatgtctatcaaaatctggctgtggaagactggatccatgaccatatgaatctagaaggcaaaccaattctattcttttggcagaattctccctctgttgtaattggtaggcatcaaaatccttggcaggaatgtaacctgaatctaatgagagaagaaggtataaaactggctcggagaagaagtggaggaggaacagtctaccatgatatgggtaatatcaatttgactttctttacaaccaaaaaaaagtatgatagaatggaaaatctgaaattaattgtgagagctctgaatgctgtccaaccccagctggatgtgcaggctaccaaaagatttgaccttttacttgatggacagtttaaaatctcaggaacagcttctaagatcggccggactactgcctatcaccattgcactttattatgtagtactgatgggacgttcttgtcttctttgctaaagagcccttaccaagggatcaggagcaatgccactgctagcataccttccttagtgaaaaatcttttggaaaaggatcccactctgacctgtgaagtactaatgaatgctgttgctacagagtatgctgcttatcatcaaattgataatcacattcacctaataaacccaacggatgagacactgtttcctggaataaatagcaaagccaaagaactgcaaacttgggagtggatatatggcaaaactccaaagtttagtataaatacttcctttcatgtgttatatgaacagtcacacttggaaattaaagtattcatagacataaagaatggaagaattgaaatttgtaatattgaagcacctgatcattggttgccattggaaatacgtgacaaattaaattcaagtcttattggcagtaagttttgcccaactgaaactaccatgctaacaaatatattacttagaacatgtccacaagaccacaaactaaacagtaaatggaatattctctgtgaaaaaattaagggaataatgtgattccaagtaaatgtcttaatacagtttcaattagaaaataaaatgtctcatacttgcacattgtatgtc

SEQ ID NO: 188487 - DNA, 1543 bp, Artificial Sequence
  derived and/or modified sequence
agcatcgcgcgcaaggcctgccggttgctcggggtcgtatgacgcacttttccagctcgagccctcacgaggccgtgggtacgaccggaagccgcagactgaatctcgctctgttgcccagcccatctcggcccactgaaacctccacctcccgggttcaagcgattctcctgcctcagcctcccgagtagctgagattacaggcgcctgccaccacgcccagagagatatttttagcactattaaaatacatgcattggctcaatacatgaattggatcaattctggaaccctaacaagatcacatttttgaccaaagtcaatatcttggactatagttaatttatcaagcatgctgatcccattttcaatgaagaattgcttccagttactttgtaactgccaggtcccagcagctggctttaaaaaaacagtaaaaaatgggctcattttacagtcaatttccaatgatgtctatcaaaatctggctgtggaagactggatccatgaccatatgaatctagaaggcaaaccaattctattcttttggcagaattctccctctgttgtaattggtaggcatcaaaatccttggcaggaatgtaacctgaatctaatgagagaagaaggtataaaactggctcggagaagaagtggaggaggaacagtctaccatgatatgggtaatatcaatttgactttctttacaaccaaaaaaaagtatgatagaatggaaaatctgaaattaattgtgagagctctgaatgctgtccaaccccagctggatgtgcaggctaccaaaagatttgaccttttacttgatggacagtttaaaatctcaggaacagcttctaagatcggccggactactgcctatcaccattgcactttattatgtagtactgatgggacgttcttgtcttctttgctaaagagcccttaccaagggatcaggagcaatgccactgctagcataccttccttagtgaaaaatcttttggaaaaggatcccactctgacctgtgaagtactaatgaatgctgttgctacagagtatgctgcttatcatcaaattgataatcacattcacctaataaacccaacggatgagacactgtttcctggaataaatagcaaagccaaagaactgcaaacttgggagtggatatatggcaaaactccaaagtttagtataaatacttcctttcatgtgttatatgaacagtcacacttggaaattaaagtattcatagacataaagaatggaagaattgaaatttgtaatattgaagcacctgatcattggttgccattggaaatacgtgacaaattaaattcaagtcttattggcagtaagttttgcccaactgaaactaccatgctaacaaatatattacttagaacatgtccacaagaccacaaactaaacagtaaatggaatattctctgtgaaaaaattaagggaataatgtgattccaagtaaatgtcttaatacagtttcaattagaaaataaaatgtctcatacttgcacattgtatgtc

SEQ ID NO: 188488 - DNA, 803 bp, Artificial Sequence
  derived and/or modified sequence
aaaccgggatgttgcgggccgtagcgcgtgggcggccgtggggtcttgggcgcgcgcggtgtttctggcggtgggtcaggacttgcgggtcgcctccgccggtgttgaagcctcttgtgtgcacactttctcctcagcacttgggacgacctaatttcactgttaggaacggttgatcccgaacacaggagggagggtaaatatcgtaaaacatgttggacgctagctgtgtgcacgccccctgggagccaaaagggcgaagtaaaacatgcacacgaccgtaatgagattctgattcagtgatggggagccgtgtttggcagtgcagaggtagcgaagtgtcccaagaacatggaagactgaatctcgctctgttgcccagcccatctcggcccactgaaacctccacctcccgggttcaagcgattctcctgcctcagcctcccgagtagctgagattacaggcgcctgccaccacgcccagcatgctgatcccattttcaatgaagaattgcttccagttactttgtaactgccaggtcccagcagctggctttaaaaaaacagtaaaaaatgggctcattttacagtcaatttccaatgatgtctatcaaaatctggctgtggaagactggatccatgaccatatgaatctagaaggcaaaccaattctattcttttggcagaattctccctctgttgtaattggtaggcatcaaaatccttggcaggaatgtaacctgaatctaatgagagaagaaggtataaaactggctcggagaagaagtggaggaggaacagtc

SEQ ID NO: 188489 - DNA, 885 bp, Artificial Sequence
  derived and/or modified sequence
ggggtcgtatgacgcacttttccagctcgagccctcacgaggccgtgggtacgaccggaagccgcagttcagtgatggggagccgtgtttggcagtgcagaggtagcgaagtgtcccaagaacatggaagcatgctgatcccattttcaatgaagaattgcttccagttactttgtaactgccaggtcccagcagctggctttaaaaaaacagtaaaaaatgggctcattttacagtcaatttccaatgatgtctatcaaaatctggctgtggaagactggatccatgaccatatgaatctagaaggcaaaccaattctattcttttggcagaattctccctctgttgtaattggtaggcatcaaaatccttggcaggaatgtaacctgaatctaatgagagaagaaggtataaaactggctcggagaagaagtggaggaggaacagtctaccatgatatgggtaatatcaatttgactttctttacaaccaaaaaaaagtatgatagaatggaaaatctgaaattaattgtgagagctctgaatgctgtccaaccccagctggatgtgcaggctaccaaaagatttgaccttttacttgatggacagtttaaaatctcaggaacagcttctaagatcggccggactactgcctatcaccattgcactttattatgtagtactgatgggacgttcttgtcttctttgctaaagagcccttaccaagggatcaggagcaatgccactgctagcataccttccttagtgaaaaatcttttggaaaaggatcccactctgacctgtgaagtactaatgaatgctgttgctacagagtatgctgcttatcatcaaattgataatcacattcacctaataaacccaacgg

SEQ ID NO: 188490 - DNA, 583 bp, Artificial Sequence
  derived and/or modified sequence
gatgttgcgggccgtagcgcgtgggcggccgtggggtcttgggcgcgcgcggtgtttctggcggtgggtcaggacttgcgggtcgcctccgccggtgttgaagcctcttgtgtgcacactttctcctcagcacttgggacgacctaatttcactgttaggaacggttgatcccgaacacaggagggagggtaaatatcgtaaaacatgttggacgctagctgtgtgcacgccccctgggagccaaaagggcgaagtaaaacatgcacacgaccgtaatgagattctgagtaagttgtatatcattagagaggggacaaaataatagggtcttggcgaggtcttatgaagaagctgcgcctgcctagaaagatagatgggattgtgctgttttcgctttcagttcagtgatggggagccgtgtttggcagtgcagaggtagcgaagtgtcccaagaacatggaagcatgctgatcccattttcaatgaagaattgcttccagttactttgtaactgccaggtcccagcagctggctttaaaaaaacagtaaaaaatgggctcattttacagtcaatttccaatg

SEQ ID NO: 188491 - DNA, 482 bp, Artificial Sequence
  derived and/or modified sequence
ggttgctcggggtcgtatgacgcacttttccagctcgagccctcacgaggccgtgggtacgaccggaagccgcagcatgctgatcccattttcaatgaagaattgcttccagttactttgtaactgccaggtcccagcagctggctttaaaaaaacagtaaaaaatgggctcattttacagtcaatttccaatgatgtctatcaaaatctggctgtggaagactggatccatgaccatatgaatctagaaggcaaaccaattctattcttttggcagaattctccctctgttgtaattggtaggcatcaaaatccttggcaggaatgtaacctgaatctaatgagagaagaaggtataaaactggctcggagaagaagtggaggaggaacagtctaccatgatatgggtaatatcaatttgactttctttacaaccaaaaaaaagtatgatagaatggaaaatctgaaattaattgtgagag

SEQ ID NO: 188492 - DNA, 1122 bp, Artificial Sequence
  derived and/or modified sequence
atgctgatccccttcagcatgaagaactgcttccagctgctgtgcaactgtcaggtgccggcagctggattcaagaaaaccgtcaagaacgggctaattctgcagtcaattagcaacgatgtgtaccaaaatctcgccgtggaggattggattcacgaccacatgaacctcgaaggtaaacccatcctatttttctggcagaacagtccttctgtggttatcgggcgacatcagaatccatggcaggagtgtaatttgaatctgatgagagaggaggggatcaagctggctcgtagaaggtctggcggggggacagtgtatcacgacatggggaacatcaatcttaccttcttcaccaccaagaaaaagtatgacagaatggagaatcttaaactgatcgtgagggctctgaatgccgtgcagcctcagttggacgtgcaggcgaccaaaaggtttgatttactgctggacggccagtttaagatctcaggtacagcgagcaaaatcggcaggactacagcctaccatcactgcacgctgttatgctcaaccgatggcacattcctttcctctttgttgaagagcccataccagggtattcgtagcaatgcgacggctagcatccccagcctcgtcaaaaacctgttggaaaaggacccaacattgacttgtgaagtgctgatgaatgctgtggccactgaatatgccgcctaccatcaaatagataatcatattcacctgatcaaccctacagacgagacattgttccccggaataaattctaaggccaaggaactacagacgtgggagtggatctacggcaaaacacccaaattctcaataaacacgtccttccacgttctctatgagcagtcccacctggagataaaagtgttcatcgacatcaagaacggtcgtatcgagatctgcaatattgaagcccccgaccattggctaccgctggaaattagagacaagttgaatagctcgcttatagggagcaagttctgcccaaccgaaactacgatgttgaccaacatactactacggacttgccctcaagatcacaaactgaactccaagtggaatatcctgtgtgaaaagatcaaggggataatgtag

SEQ ID NO: 188493 - DNA, 1122 bp, Artificial Sequence
  derived and/or modified sequence
atgctgatccccttcagcatgaagaactgcttccagctgctgtgcaattgtcaggtgcccgctgcaggctttaaaaagacagtaaagaacggcctgatccttcagtccatcagcaatgacgtgtatcagaacctggctgtggaggattggattcacgatcacatgaacctggaaggtaaacccatcctattcttctggcagaattctccatcagtggtgattgggcggcatcaaaatccctggcaggaatgcaacctaaacctaatgagagaagagggaattaaactggcgaggcgccgttcaggcggcgggacagtctaccacgatatggggaacataaacctcacattctttaccactaagaagaagtacgacaggatggagaaccttaaactgatcgtgcgggccctcaacgcggtacaaccacaactggatgttcaggctaccaaaaggttcgatctgctgctggatggacagtttaagatttctggcactgcatctaagattggacggacaaccgcctatcaccattgcactctgctatgctcaactgacggaaccttcctgtctagcctgctgaaaagcccatatcaggggatcaggtccaacgccacagccagcatcccctccttagtaaaaaacctgctggaaaaggaccccactctgacttgtgaagtcttaatgaatgccgtcgccactgagtacgccgcttaccatcagattgataatcatatccatctaatcaatccaaccgacgagaccctatttccgggaattaacagtaaggccaaggaactccaaacctgggagtggatctatggtaaaactcctaagtttagcattaacacgtcctttcacgtcctgtacgaacaatcccacttagaaatcaaggtgtttatcgatattaaaaatggccgcatagagatatgtaacatcgaggcgcctgaccactggctaccactagaaatcagagataagcttaattcaagtctgataggatccaagttctgcccaaccgagactaccatgctgactaatatcctccttaggacctgcccacaggaccataaactgaattctaaatggaatatcctgtgtgaaaaaatcaagggcatcatgtag

SEQ ID NO: 188494 - DNA, 1122 bp, Artificial Sequence
  derived and/or modified sequence
atgctgatccccttcagcatgaagaactgcttccagctgctgtgcaactgccaggtaccagccgcaggttttaagaaaacagtgaagaatggcttgatattgcaaagcatatccaacgacgtgtatcaaaacctggccgtagaggattggatccatgatcatatgaatctggagggaaagcctatactgtttttttggcagaactcaccttccgttgtgatcgggaggcaccagaatccttggcaggaatgtaatctcaacctgatgcgggaggaaggcatcaaactggcaaggaggcggtctggtggcgggaccgtctaccacgacatgggaaatattaatttgaccttctttactacaaagaagaagtatgacaggatggagaacctgaaactaattgtgcgggcgctcaatgctgtgcagcctcagctggacgtgcaagccaccaagcgatttgaccttctgctggatggccagttcaagatcagcggcacagcgagtaagattggacgcacaactgcttaccaccattgtaccctcctgtgtagtacagacggcactttcctttcttcactattaaagagtccttaccaggggattcggtctaacgctacagcatcaattccttctttggtgaaaaatctccttgaaaaagatcccaccctaacatgtgaggttttgatgaatgccgtggcgacagaatatgcagcctaccatcagattgacaaccacatccacttgatcaatcccactgatgaaacactgttccctggaattaactccaaggccaaggagctgcagacatgggagtggatatacggcaagacccccaaatttagtatcaatacgagtttccatgtgctgtatgagcagagccacctcgaaatcaaggtgtttatcgatataaaaaatggtcggattgaaatttgtaacatcgaggctcccgatcattggttgcccctggaaatacgcgataaactcaattcgtccctcatcggatccaaattctgccccacagaaactacaatgctgaccaacatcctgttaaggacctgcccacaggaccataagctgaattcaaagtggaatatcctgtgcgagaagatcaaggggataatgtag

SEQ ID NO: 188495 - DNA, 1122 bp, Artificial Sequence
  derived and/or modified sequence
atgctgatccccttcagcatgaagaactgcttccagctgctgtgcaactgccaggtccccgcagcaggttttaagaagacagtcaaaaacggtctgatcctgcaaagcatatccaatgatgtctatcagaacctggcagtggaggactggatccatgaccacatgaacctagagggaaagcccatactcttcttctggcagaactccccctctgtggttatcggaaggcaccagaacccatggcaggaatgcaatctaaacctgatgagagaggagggaattaaattagccagaaggcgctctggagggggaactgtttaccacgatatgggaaatattaatctgacttttttcacaacaaaaaaaaagtatgaccggatggagaatcttaaactgatcgtcagagcactgaatgcggtccaaccacagttggacgttcaggctaccaaacgcttcgacctactcctggatggacagttcaagatctctgggacagcatctaagattggcagaactaccgcttatcatcattgtaccctgttatgctccaccgatggcaccttcctctctagccttctgaagtctccatatcagggcattaggtctaatgctactgcctctattccttctctggtgaagaatctgttagaaaaagatcccacattaacgtgcgaggtattgatgaatgcagtcgcgaccgaatatgctgcttatcatcagatagataaccacattcatctcatcaaccctactgacgagaccttgtttcctggtataaattccaaggctaaggagctacagacctgggaatggatctatggaaaaacaccgaagttcagtataaacacatcatttcatgtgctctatgagcagtcacatctcgagataaaggtatttatcgacattaagaatggcagaatagagatttgcaacatcgaagcgccagaccattggctgccgctcgagattagggataaactaaacagtagtctgatagggagtaagttctgtcccaccgaaacgacaatgctgaccaacattttgctgcgcacgtgccctcaggatcacaagctgaacagtaagtggaatattctgtgcgagaagatcaagggcataatgtag

SEQ ID NO: 188496 - DNA, 1122 bp, Artificial Sequence
  derived and/or modified sequence
atgctgatccccttcagcatgaagaactgcttccagctgctgtgcaactgtcaggttccagccgcaggatttaagaaaactgtgaaaaatgggctgattctgcagtctatatctaacgatgtctaccagaacctggctgtggaggattggatacatgatcatatgaatcttgagggcaaacccatactctttttttggcagaactctccctcagttgtcatcgggagacaccaaaacccttggcaggaatgcaatctcaatctcatgcgcgaagagggcatcaagctggcccgaaggcggtccgggggcggcactgtgtaccatgatatgggaaatataaatctgaccttctttaccactaaaaagaaatatgacagaatggagaatctcaagctcatagtgcgagcactgaacgctgtgcagcctcagctggatgtgcaggccactaaacgctttgatcttctgttggatgggcagtttaagatctctgggactgcttccaagataggtcggacaacggcctatcatcattgtacgctcctgtgcagtacagacggaactttcctgtcatctcttctgaaaagcccttatcagggcatcagatccaacgcaactgcctcaatcccatccctggttaaaaacttgctggaaaaagatcctacacttacctgcgaggtactcatgaatgccgttgccacggagtacgctgcatatcaccagattgataaccacatccatttgattaaccccaccgacgaaacgttgtttcctggcatcaactcaaaagccaaggagttacagacttgggagtggatctacggcaaaacaccaaagttttctattaatacttcatttcacgtcctgtatgagcaatcccacctcgagattaaagtatttatcgacatcaagaatggacgaattgagatctgtaatatagaggcaccagaccattggctcccgcttgaaatccgagataagctgaatagcagtctgatcggcagtaaattttgccccacagaaacaacgatgttgacaaacattctgctgaggacatgccctcaggaccacaagctgaacagcaaatggaacatcctgtgtgaaaaaataaagggcatcatgtag

SEQ ID NO: 188497 - DNA, 321 bp, Artificial Sequence
  derived and/or modified sequence
atgctgatccccttcagcatgaagaactgcttccagctgctgtgcaactgccaggtccctgcagcaggctttaaaaaaacagtgaagaacggtttgatccttcagagcatatctaatgacgtgtaccagaacctcgccgtggaggactggattcacgaccacatgaacttagaagggaagccaatcctttttttctggcagaactcccccagtgtcgtgattggacggcaccagaatccttggcaggagtgtaacctgaatcttatgcgcgaagaaggcataaagcttgcacgccgtcgcagcggaggtggaactgtgtag

SEQ ID NO: 188498 - DNA, 756 bp, Artificial Sequence
  derived and/or modified sequence
atgctgatccccttcagcatgaagaactgcttccagctgctgtgcaactgccaagttccagctgcggggttcaagaaaactgttaagaacggcctgattctacagtccatttctaacgacgtttaccagaacctggctgtggaggattggatccacgaccatatgaacctggaaggcaagcccatcttattcttctggcagaattctcctagtgtggttatcggccggcaccagaacccctggcaggagtgtaacttaaacctcatgcgggaagaaggcatcaagcttgcccggcggaggagtggaggagggactgtgtatcatgacatgggtaatattaaccttacattcttcactaccaaaaaaaagtatgataggatggagaatctgaaattgatcgtccgcgcactcaacgccgtgcagccccagcttgacgtgcaagcgacgaaaaggttcgatctgctgctggatgggcagtttaagattagcggaacagcctccaaaattggacgaacgaccgcctatcaccactgtacgcttttatgcagcactgacgggacgtttctgagctcattgttgaaatccccctatcagggcattagatccaacgcaaccgctagtattccatctctggtcaagaatttgctcgaaaaggatccaactctgacctgcgaagtattgatgaacgccgtagcaaccgaatacgccgcctaccaccagatcgataaccacatacacctcattaatcccacatag

SEQ ID NO: 188499 - DNA, 120 bp, Artificial Sequence
  derived and/or modified sequence
atgctgatccccttcagcatgaagaactgcttccagctgctgtgcaactgccaagtacctgcagcaggctttaagaaaactgtcaagaatggactaatcctgcaatcaatttcaaactag

SEQ ID NO: 188500 - DNA, 408 bp, Artificial Sequence
  derived and/or modified sequence
atgctgatccccttcagcatgaagaactgcttccagctgctgtgcaactgccaagttcctgcagcaggcttcaaaaaaacggtaaagaacggacttattctgcagagtattagcaacgacgtgtaccagaacctcgctgtggaagactggatccatgaccacatgaatctcgaaggcaaaccaatactatttttctggcagaacagtccgtcggtggtgataggccgacaccagaacccttggcaggagtgtaatcttaacctgatgagggaggagggtattaaactggctcgccggcggtctgggggtggcacagtctaccacgacatgggcaacataaatctaactttctttacaacaaaaaagaaatacgacaggatggagaacctgaagctgatcgtcagatag

SEQ ID NO: 188501 - DNA, 1122 bp, Artificial Sequence
  derived and/or modified sequence
atgctcattcccttttcaatgaagaactgctttcagctactctgtaattgtcaagttcctgctgcaggcttcaaaaagaccgtcaagaatgggctcatcttgcagagcattagcaacgacgtttaccaaaatcttgccgtagaagattggatccacgaccacatgaacctggagggaaaaccaatccttttcttctggcagaattccccatctgttgtaattggcagacatcaaaacccatggcaagaatgtaatctcaatctcatgagggaggaaggaatcaagttggccaggagacggtccgggggtggtacggtgtatcatgatatgggcaatatcaatttaacgttctttaccactaaaaaaaagtatgatcgaatggaaaacctcaaactgatcgtccgggctctgaatgccgtgcagccccagctcgacgtacaggctacaaaacggttcgatttgcttctggacggccagttcaagattagcggcacagcatctaaaatcgggaggacgaccgcctatcaccactgcacactgctgtgtagcactgatggaacctttctctcaagtctgttaaaatctccgtaccaagggataaggtcaaatgctactgcaagtataccctcactcgtgaagaatttactcgagaaagacccaaccctcacatgtgaagtcctaatgaacgccgtcgccactgagtacgccgcatatcaccagatcgataaccacatccatctgatcaatcccaccgatgagaccctgtttccgggtatcaatagcaaggccaaagagctgcagacttgggaatggatttacggaaaaactccaaaattcagcatcaataccagcttccacgtcctgtacgagcaatctcacctggaaataaaagttttcatcgatatcaaaaacggacgcattgagatctgtaatattgaggcacccgaccattggctcccgttagagataagggacaaactcaattctagtttgataggtagcaagttctgtcccactgagactactatgctaacaaacatcctgctcagaacatgccctcaagaccacaagctgaattcaaaatggaacatactgtgtgaaaaaatcaaagggatcatgtag

SEQ ID NO: 188502 - DNA, 1122 bp, Artificial Sequence
  derived and/or modified sequence
atgttgatcccattttctatgaaaaattgttttcagctactctgcaactgccaggtacctgccgcaggtttcaagaagaccgttaagaacgggttgatcctgcagtccataagcaatgacgtctaccagaacctcgctgtcgaagactggattcacgaccatatgaacctggagggcaaaccaatcctgttcttttggcaaaacagccccagcgttgtcatcggtagacaccagaatccgtggcaggagtgcaacctcaaccttatgcgcgaagaaggcatcaagctcgcgaggaggcggtcaggcggaggaaccgtgtatcacgacatgggtaacatcaacttaacctttttcacaacaaagaagaagtacgatcgcatggagaatcttaaactcatagttcgagccctcaacgccgtgcagcctcagctggacgtgcaagccaccaagcgcttcgacttgctcttagacggtcaattcaaaatctcggggacagcatccaagatcggacgcacaactgcctaccaccactgcaccctcctctgcagcaccgacggcacgttcctcagctctttgttaaaaagcccctatcagggcatccgatccaacgctacagcctccataccgtctctggtaaaaaacttactggaaaaggatcccactctcacatgcgaagttcttatgaatgcagtcgccaccgagtacgctgcctaccaccagatcgataatcatattcacctcatcaatccaaccgacgagaccctgttccccggaatcaattcgaaggctaaagagctgcagacttgggaatggatctatgggaaaaccccgaaatttagcatcaacacaagcttccatgtactctacgagcagtcacatctcgagatcaaggtcttcatcgatatcaagaatgggagaatcgaaatatgtaacatcgaggctcctgatcattggctgcccctcgagattagggacaaattgaacagctcgctcatcggcagtaagttctgtcctactgagacaactatgctgaccaacatcctcctcagaacctgcccacaggatcataagctgaattcaaaatggaacattctgtgcgagaagattaagggcatcatgtag

SEQ ID NO: 188503 - DNA, 1122 bp, Artificial Sequence
  derived and/or modified sequence
atgttgatcccgttcagtatgaagaactgttttcagctattgtgcaactgtcaagtaccggctgcagggttcaagaagaccgtgaagaacggcctcatcctccagagcattagcaatgatgtgtatcaaaacctcgccgtcgaggactggatccatgaccatatgaatctcgaaggaaaacctattttgtttttttggcagaattccccgagcgtcgtgattgggagacatcaaaatccatggcaggaatgtaatttgaatctcatgcgtgaggaaggcattaaacttgcccgaagaaggtctggcggaggcacagtgtatcacgatatgggcaacatcaacctgacatttttcaccaccaagaaaaaatacgacagaatggaaaatctgaagctgatcgtacgggcactgaatgccgttcagccccaactggacgtacaggctaccaagcgatttgacctgcttctcgatgggcagtttaagatcagtggcaccgcaagcaagatcggcaggacaacagcctatcaccattgcacactcttgtgcagcacagacgggaccttcctaagttcgctcctgaagagcccctaccaaggtattcgttccaatgctactgcttccatccccagcctcgtgaaaaacctattggagaaggatcctactctgacctgtgaagtcctgatgaacgccgttgctactgaatatgccgcataccatcaaatcgataaccacatccacctgattaatcccactgacgagactctgttcccaggtatcaattcaaaagcaaaggagttacagacatgggagtggatatatggcaagacccctaagttcagtattaatacatctttccatgtgctctatgaacagtcccacctggagattaaggtgttcatagatattaagaacggcagaattgaaatatgcaatatcgaggcccctgaccactggctgcccctcgagatccgggacaagttaaattcatcactgatcggctccaaattttgcccaaccgagactaccatgctcaccaacattctcctacgaacctgcccacaggatcataagctcaactctaaatggaacatattgtgcgagaaaatcaagggcatcatgtag

SEQ ID NO: 188504 - DNA, 1122 bp, Artificial Sequence
  derived and/or modified sequence
atgctgattccgttttctatgaagaactgtttccaactcttgtgtaactgccaggtgccggcagcaggcttcaagaaaacggtaaagaatggactaatactgcagtcaatttccaacgatgtgtatcagaacctggctgtggaggactggatacacgaccacatgaaccttgaaggtaagcctattctgtttttttggcagaatagcccaagtgtagtgatcggcagacaccagaatccttggcaggaatgcaatctgaacctcatgagagaagaaggcatcaagctcgctcggaggcgttccggaggcggaaccgtttatcacgacatgggcaacatcaatctgacattctttaccactaaaaagaagtatgacagaatggaaaacctgaaactgattgtcagagcactcaacgcggttcaaccccagttagatgtgcaggctactaaaagatttgatcttctcttggacggccagttcaagatttcaggaacagcttctaaaattggcaggactacagcctaccaccattgcacactgctttgcagcactgacggaaccttcctgtcatctctactaaaaagtccctatcaggggattcgctccaacgcgacagcaagcataccctccctggtaaaaaatctactggagaaggaccctactttaacatgtgaagtcctgatgaatgctgtcgctacagagtatgccgcttaccaccagatcgacaaccacatccacctgatcaaccccactgacgagacactctttcctggaatcaatagtaaagccaaagaattgcaaacatgggaatggatctatgggaagacacctaagttctccatcaacactagcttccatgtgctctacgagcagtcacatctggagattaaggtgttcattgacattaaaaacggccgaatcgagatctgtaacattgaggcacccgaccactggctgccgctcgagattcgcgacaaactaaactcctcgttgataggctcaaagttctgcccaacagaaactactatgctcacgaacattctcttaaggacatgtcctcaggaccacaagctgaactcaaaatggaacatcctgtgtgaaaaaatcaagggcataatgtag

SEQ ID NO: 188505 - DNA, 1122 bp, Artificial Sequence
  derived and/or modified sequence
atgctcatccctttttccatgaagaactgtttccagctgctgtgtaactgtcaggtgcccgctgctggctttaagaagacagtcaaaaacgggctgattctccagtctatctctaacgatgtataccagaacctggctgtcgaggactggattcacgatcatatgaatctggagggaaagcctatcctctttttctggcagaactcacccagcgtcgtcattggcagacatcagaatccctggcaggaatgtaacttgaacttgatgcgtgaagagggaattaagcttgcaagacgccgttccggcggtggcacggtctatcatgatatgggaaacataaatctgaccttttttactactaaaaaaaagtatgataggatggaaaaccttaaactcattgtacgtgccctgaacgcggttcaaccacagctggatgtgcaggctacaaagaggtttgatctgcttctcgatggacagttcaaaattagcggcaccgcctctaagattgggaggaccaccgcctatcaccactgcactctgctttgcagcacggacggcactttcctgtcttcactgttgaaatccccgtatcaaggcattcgtagcaatgctacagcttccattccatctcttgtgaagaatctcttggaaaaggacccaaccctgacttgtgaagtccttatgaatgccgtcgccaccgagtatgccgcataccatcagattgacaaccacatccaccttatcaaccccactgatgaaaccttgttcccagggatcaattccaaagccaaagaactgcagacgtgggagtggatttacggtaaaaccccaaaattttctattaatacatctttccatgtgctgtacgaacagtcacatcttgaaatcaaggtgtttatcgacatcaaaaacggccgaatagagatatgcaatatcgaagcccctgaccactggttaccactcgagatcagagataaattgaattcgagtttaattgggtccaagttctgcccaacagaaaccaccatgcttactaatatcttactccgaacctgtccacaggatcacaagcttaatagcaagtggaacatactatgtgagaagatcaagggcatcatgtag

SEQ ID NO: 188506 - DNA, 321 bp, Artificial Sequence
  derived and/or modified sequence
atgcttattccatttagtatgaaaaattgtttccaactcctttgcaactgtcaagttcctgccgcagggttcaaaaagacggttaaaaacggccttattttgcaatctatctctaacgacgtctatcagaacctcgctgtggaagattggattcacgaccacatgaatctggaggggaagcccattctatttttctggcagaactctcccagtgtagtcattggtaggcaccaaaacccatggcaagagtgcaaccttaatcttatgcgggaggaggggatcaaattggcacgcagacgcagcggaggcggaacagtttag

SEQ ID NO: 188507 - DNA, 756 bp, Artificial Sequence
  derived and/or modified sequence
atgcttatacctttttctatgaagaattgcttccagttgctgtgcaactgccaggttcctgccgctggctttaagaagaccgtgaaaaacggcctgattctgcagagtatctccaatgacgtgtatcagaacctagccgttgaggattggatacatgatcacatgaacttggagggcaagccaatcctttttttttggcaaaattctccctccgtggtgataggtaggcatcagaacccatggcaggagtgtaacctgaacctgatgcgagaagaaggcataaagctagctagacgacgctccggtggcggtaccgtgtaccatgatatgggcaatataaacttaacattttttactactaaaaagaagtatgaccgcatggagaatctgaagcttatcgtccgggcactcaacgcagtgcaacctcagcttgacgtgcaggccacgaaacgttttgatctcctcctggacgggcagtttaaaatttcaggcacagcctccaagattggacgcaccactgcttaccatcactgtaccttattgtgcagcactgacggaacatttttgtccagtctgctgaaatctccataccaaggcatcagatcgaatgcgactgccagcattccttccctggtgaagaacctgctggaaaaggatcccacactcacatgcgaggtgttgatgaacgccgtggccaccgagtacgccgcatatcaccagattgacaatcacattcatcttattaacccgacatag

SEQ ID NO: 188508 - DNA, 120 bp, Artificial Sequence
  derived and/or modified sequence
atgctcatacccttcagcatgaaaaactgtttccagctcctttgcaattgccaggtccctgcagccggttttaaaaaaactgtcaagaatggactcatattacaaagtatttcgaattag

SEQ ID NO: 188509 - DNA, 408 bp, Artificial Sequence
  derived and/or modified sequence
atgctcattccgttttcaatgaaaaattgcttccagctgttgtgtaattgccaggtcccagccgcaggcttcaagaagacggtaaaaaacgggctgattcttcagtcgatttcgaatgatgtctaccagaatctggctgtggaggattggatacatgatcacatgaacttggaggggaaacccattttgttcttctggcaaaacagcccatcagtggttatcggaaggcaccagaacccgtggcaggagtgcaatctaaatctgatgcgtgaggaaggcattaaactggcaagaagacgcagcggtggtggcacagtgtatcacgatatgggtaacatcaacctcacctttttcacaaccaagaaaaaatacgatcgtatggagaatctcaagctgatcgtgaggtag

SEQ ID NO: 188510 - DNA, 1122 bp, Artificial Sequence
  derived and/or modified sequence
atgctgatccccttcagcatgaagaactgcttccagctgctgtgcaactgccaggtgcccgccgccggcttcaagaagaccgtgaagaacggcctgatcctgcagagcatcagcaacgacgtgtaccagaacctggccgtggaggactggatccacgaccacatgaacctggagggcaagcccatcctgttcttctggcagaacagccccagcgtggtgatcggcagacaccagaacccctggcaggagtgcaacctgaacctgatgagagaggagggcatcaagctggccagaagaagaagcggcggcggcaccgtgtaccacgacatgggcaacatcaacctgaccttcttcaccaccaagaagaagtacgacagaatggagaacctgaagctgatcgtgagagccctgaacgccgtgcagccccagctggacgtgcaggccaccaagagattcgacctgctgctggacggccagttcaagatcagcggcaccgccagcaagatcggcagaaccaccgcctaccaccactgcaccctgctgtgcagcaccgacggcaccttcctgagcagcctgctgaagagcccctaccagggcatcagaagcaacgccaccgccagcatccccagcctggtgaagaacctgctggagaaggaccccaccctgacctgcgaggtgctgatgaacgccgtggccaccgagtacgccgcctaccaccagatcgacaaccacatccacctgatcaaccccaccgacgagaccctgttccccggcatcaacagcaaggccaaggagctgcagacctgggagtggatctacggcaagacccccaagttcagcatcaacaccagcttccacgtgctgtacgagcagagccacctggagatcaaggtgttcatcgacatcaagaacggcagaatcgagatctgcaacatcgaggcccccgaccactggctgcccctggagatcagagacaagctgaacagcagcctgatcggcagcaagttctgccccaccgagaccaccatgctgaccaacatcctgctgagaacctgcccccaggaccacaagctgaacagcaagtggaacatcctgtgcgagaagatcaagggcatcatgtag

SEQ ID NO: 188511 - DNA, 321 bp, Artificial Sequence
  derived and/or modified sequence
atgctgatccccttcagcatgaagaactgcttccagctgctgtgcaactgccaggtgcccgccgccggcttcaagaagaccgtgaagaacggcctgatcctgcagagcatcagcaacgacgtgtaccagaacctggccgtggaggactggatccacgaccacatgaacctggagggcaagcccatcctgttcttctggcagaacagccccagcgtggtgatcggcagacaccagaacccctggcaggagtgcaacctgaacctgatgagagaggagggcatcaagctggccagaagaagaagcggcggcggcaccgtgtag

SEQ ID NO: 188512 - DNA, 756 bp, Artificial Sequence
  derived and/or modified sequence
atgctgatccccttcagcatgaagaactgcttccagctgctgtgcaactgccaggtgcccgccgccggcttcaagaagaccgtgaagaacggcctgatcctgcagagcatcagcaacgacgtgtaccagaacctggccgtggaggactggatccacgaccacatgaacctggagggcaagcccatcctgttcttctggcagaacagccccagcgtggtgatcggcagacaccagaacccctggcaggagtgcaacctgaacctgatgagagaggagggcatcaagctggccagaagaagaagcggcggcggcaccgtgtaccacgacatgggcaacatcaacctgaccttcttcaccaccaagaagaagtacgacagaatggagaacctgaagctgatcgtgagagccctgaacgccgtgcagccccagctggacgtgcaggccaccaagagattcgacctgctgctggacggccagttcaagatcagcggcaccgccagcaagatcggcagaaccaccgcctaccaccactgcaccctgctgtgcagcaccgacggcaccttcctgagcagcctgctgaagagcccctaccagggcatcagaagcaacgccaccgccagcatccccagcctggtgaagaacctgctggagaaggaccccaccctgacctgcgaggtgctgatgaacgccgtggccaccgagtacgccgcctaccaccagatcgacaaccacatccacctgatcaaccccacctag

SEQ ID NO: 188513 - DNA, 120 bp, Artificial Sequence
  derived and/or modified sequence
atgctgatccccttcagcatgaagaactgcttccagctgctgtgcaactgccaggtgcccgccgccggcttcaagaagaccgtgaagaacggcctgatcctgcagagcatcagcaactag

SEQ ID NO: 188514 - DNA, 408 bp, Artificial Sequence
  derived and/or modified sequence
atgctgatccccttcagcatgaagaactgcttccagctgctgtgcaactgccaggtgcccgccgccggcttcaagaagaccgtgaagaacggcctgatcctgcagagcatcagcaacgacgtgtaccagaacctggccgtggaggactggatccacgaccacatgaacctggagggcaagcccatcctgttcttctggcagaacagccccagcgtggtgatcggcagacaccagaacccctggcaggagtgcaacctgaacctgatgagagaggagggcatcaagctggccagaagaagaagcggcggcggcaccgtgtaccacgacatgggcaacatcaacctgaccttcttcaccaccaagaagaagtacgacagaatggagaacctgaagctgatcgtgagatag

SEQ ID NO: 188515 - protein, 353 aa, Artificial Sequence
  derived and/or modified sequence
MPSPVGLLRALPLPWPQFLACTLRRLAGPRESTGPSQKPPPLCSVPCRVPAMTEEVAREALLSFVDSKCCYSSTVAGDLVIQELKRQTLCRYRLETFSESRISEWTFQPFTNHSVDGPQRGASPRLWDIKVQGPPMFQEDTRKFQVPHSSLVKECHKCHGRGRYKCSGCHGAGTVRCPSCCGAKRKAKQSRRCQLCAGSGRRRCSTCSGRGNKTCATCKGEKKLLHFIQLVIMWKNSLFEFVSEHRLNCPRELLAKAKGENLFKDENSVVYPIVDFPLRDISLASQRGIAEHSAALASRARVLQQRQTIELIPLTEVHYWYQGKTYVYYIYGTDHQVYAVDYPERYCCGCTIV

SEQ ID NO: 188516 - protein, 315 aa, Artificial Sequence
  derived and/or modified sequence
MPSPVGLLRALPLPWPQFLACTLRRLAGPRESTGPSQKPPPLCSVPCRVPAMTEEVAREALLSFVDSKCCYSSTVAGDLVIQELKRQTLCRYRLETFSESRISEWTFQPFTNHSVDGPQRGASPRLWDIKVQGPPMFQEDTRKFQVPHSSLVKECHKCHGRGRYKCSGCHGAGTVRCPSCCGAKRKAKQSRRCQLCAGSGRRRCSTCSGRGNKTCATCKGEKKLLHFIQLVIMWKNSLFEFVSEHRLNCPRELLAKAKGENLFKDENSVVYPIVDFPLRDISLASQRGIAEHSAALASRARVLQQVSQGGGAIWL

SEQ ID NO: 188517 - DNA, 2561 bp, Artificial Sequence
  derived and/or modified sequence
ctcctaagaattctctcacctgccttctgcccttaggctctgctagattgcaaatgacctgctttctttctgatcctgggctgcgttcccacccctgtcagatagtaaatcccaagtaaggtacctgctttcggcagctctgagctttcttcttggacacctaaaacccacagtcctccaggctccgatagattgcaaatgacctgctttctttctgatcctgggctgcgttcagacccctgtgggatagtaaatcccaagtaaggtacttgccttccgcagatctgagctttcttcttagacacctaatacccacagtcctccaggctccgatagattgcaaatgacctgctttctttctgatcccgggctgctgagttcggacccctgttggatagtaaatcccaagtaaggtacctgccttcggcagctctgagatttcttcttggacacctaatacccacagtcctccaggggcaagaggatgctattactgcaaagagtacagaggatgtacacccgtctataatatagttggtgatttccagaggctgagaagatattactgacaatcccgtcaacatgctgtgtgaccaccgtggattgtaatatccaggaaaacgttactgctaatgtcacaggacgtgtagaccctgccatcaaattcgtaatatcctagcgggacttcactagtcatttcacaatgcgtgtgcaccctttgatattattcgtattgtcctgaagagatgttactactgatgtcccaatgcagttacctgtgtgtcccctgtggtacctatggaaaccagttgttgggaaatccttgttaagaaaatgggccttgtaatagtacctcttagggctgctgtgaaggaaggataacatggaagcaacatgcctatcatagtgctttgtgtatgcccctgtcaaccatcactctactttgtgtgtgtgagtttgaccacctgaatctttttggcaccatctcaagtataattcaaatcacgaggcatttgtgcatatcgacaatacacccatcgtggtgtggtggacctcagttttgaggccgagagtcctctggcgccccccacagagctcctggagagactgcccagctatgactggcttcttcaagggggcagaggacagatattcttcccacctttggaggccccagggaggccccaggagcaaaggtcctggccctcgttcctggaacacaggagatgccctccccagttggactgctgagggctttaccactaccgtggcctcagtttctcgcctgcacgttgaggaggctggctggcccgcgtgagtccacaggcccttcccagaagcccccgcctctctgttcggtcccctgcagagtccctgcgatgacggaggaggtggcccgggaagccctcctcagctttgtggactctaagtgctgctacagcagcacggtggctggagacctcgtcatccaggagctgaagcggcagaccctctgcaggtaccgtctggagacctttagtgaatccaggataagcgagtggacatttcaaccctttactaaccactctgtggatgggccgcaaagaggcgcctcccccaggctctgggacatcaaggttcaaggtcctccgatgtttcaggaagacaccaggaagttccaggtccctcactcgtcactggtcaaggaatgccacaaatgccatgggcgtgggcggtacaagtgcagcggctgccacggggcgggcacggtgcggtgcccatcctgctgcggagccaagcgcaaagccaagcagtcccggagatgtcagctgtgcgcggggtccggcaggcgaagatgcagcacttgctcagggagagggaacaagacctgcgccacctgcaagggggagaagaagctgttgcacttcatccagcttgtcatcatgtggaagaacagcttgtttgagtttgtgtctgagcaccggctcaactgccccagggagctccttgctaaagccaaaggagaaaacctctttaaggatgaaaactcggtggtgtaccccatcgtggacttccctctgcgagacatctctcttgcctcccagaggggcattgcagagcacagcgctgccttggcctcccgtgcccgcgtcctgcagcagcgccagaccattgagctgatccccctcacagaagttcactattggtaccaaggaaagacttatgtctactacatctatggcactgaccaccaggtgtatgcggtggactatcctgagcggtattgctgtggctgtaccatcgtgtgacatagcatggctgtccccagagcctgccattcacgtttgccaaggaagatggccgacactctctgagtgtgttcactgttggctgcattggacaatcacatacaaaccctggcatgtccttccagaaaaaccagcttatcatctatcaagctccaaccccttatacagctcctctggtggaatccatgactcatatgtttaacctacaataattcagctatacacattcctgtagaacaaatgagagaaataatttaaatggcaaggactttg

SEQ ID NO: 188518 - DNA, 1799 bp, Artificial Sequence
  derived and/or modified sequence
atgcgggacacgctgtagaacagctcacactggctggcactgctaagcaggtgcggaggggagtcagagacccccggatggaggggtgtggtggacctcagttttgaggccgagagtcctctggcgccccccacagagctcctggagagactgcccagctatgactggcttcttcaagggggcagaggacagatattcttcccacctttggaggccccagggaggccccaggagcaaaggtcctggccctcgttcctggaacacaggagatgccctccccagttggactgctgagggctttaccactaccgtggcctcagtttctcgcctgcacgttgaggaggctggctggcccgcgtgagtccacaggcccttcccagaagcccccgcctctctgttcggtcccctgcagagtccctgcgatgacggaggaggtggcccgggaagccctcctcagctttgtggactctaagtgctgctacagcagcacggtggctggagacctcgtcatccaggagctgaagcggcagaccctctgcaggtaccgtctggagacctttagtgaatccaggataagcgagtggacatttcaaccctttactaaccactctgtggatgggccgcaaagaggcgcctcccccaggctctgggacatcaaggttcaaggtcctccgatgtttcaggaagacaccaggaagttccaggtccctcactcgtcactggtcaaggaatgccacaaatgccatgggcgtgggcggtacaagtgcagcggctgccacggggcgggcacggtgcggtgcccatcctgctgcggagccaagcgcaaagccaagcagtcccggagatgtcagctgtgcgcggggtccggcaggcgaagatgcagcacttgctcagggagagggaacaagacctgcgccacctgcaagggggagaagaagctgttgcacttcatccagcttgtcatcatgtggaagaacagcttgtttgagtttgtgtctgagcaccggctcaactgccccagggagctccttgctaaagccaaaggagaaaacctctttaaggatgaaaactcggtggtgtaccccatcgtggacttccctctgcgagacatctctcttgcctcccagaggggcattgcagagcacagcgctgccttggcctcccgtgcccgcgtcctgcagcagcgccagaccattgagctgatccccctcacagaagttcactattggtaccaaggaaagacttatgtctactacatctatggcactgaccaccaggtgtatgcggtggactatcctgagcggtattgctgtggctgtaccatcgtgtgacatagcatggctgtccccagagcctgccattcacgtttgccaaggaagatggccgacactctctgagtgtgttcactgttggctgcattggacaatcacatacaaaccctggcatgtccttccagaaaaaccagcttatcatctatcaagctccaaccccttatacagctcctctggtggaatccatgactcatatgtttaacctacaataattcagctatacacattcctgtagaacaaatgagagaaataatttaaatggcaaggactttgcctctggtctccaagttaatgccccgatgatgcgtgtgatttgattttgctttttccctttgtcggtcttggttctggtgtgcttcttctagtgggagcctcttgacgatctgagtattactgaaatgttcaaggatacacacaaatatctggccctaatgcacaataaatactgcacttaggcataaagtgcaa

SEQ ID NO: 188519 - DNA, 1645 bp, Artificial Sequence
  derived and/or modified sequence
ataacatggaagcaacatgcctatcatagtgctttgtgtatggtgtggtggacctcagttttgaggccgagagtcctctggcgccccccacagagctcctggagagactgcccagctatgactggcttcttcaagggggcagaggacagatattcttcccacctttggaggccccagggaggccccaggagcaaaggtcctggccctcgttcctggaacacaggagatgccctccccagttggactgctgagggctttaccactaccgtggcctcagtttctcgcctgcacgttgaggaggctggctggcccgcgtgagtccacaggcccttcccagaagcccccgcctctctgttcggtcccctgcagagtccctgcgatgacggaggaggtggcccgggaagccctcctcagctttgtggactctaagtgctgctacagcagcacggtggctggagacctcgtcatccaggagctgaagcggcagaccctctgcaggtaccgtctggagacctttagtgaatccaggataagcgagtggacatttcaaccctttactaaccactctgtggatgggccgcaaagaggcgcctcccccaggctctgggacatcaaggttcaaggtcctccgatgtttcaggaagacaccaggaagttccaggtccctcactcgtcactggtcaaggaatgccacaaatgccatgggcgtgggcggtacaagtgcagcggctgccacggggcgggcacggtgcggtgcccatcctgctgcggagccaagcgcaaagccaagcagtcccggagatgtcagctgtgcgcggggtccggcaggcgaagatgcagcacttgctcagggagagggaacaagacctgcgccacctgcaagggggagaagaagctgttgcacttcatccagcttgtcatcatgtggaagaacagcttgtttgagtttgtgtctgagcaccggctcaactgccccagggagctccttgctaaagccaaaggagaaaacctctttaaggatgaaaactcggtggtgtaccccatcgtggacttccctctgcgagacatctctcttgcctcccagaggggcattgcagagcacagcgctgccttggcctcccgtgcccgcgtcctgcagcaggtgagccagggcggaggggccatctggctctgacgtctcttcctgggctgctgagccctctttcctgagaacgtcggagcggaaggatgaggacgtagagcgccagaccattgagctgatccccctcacagaagttcactattggtaccaaggaaagacttatgtctactacatctatggcactgaccaccaggtgtatgcggtggactatcctgagcggtattgctgtggctgtaccatcgtgtgacatagcatggctgtccccagagcctgccattcacgtttgccaaggaagatggccgacactctctgagtgtgttcactgttggctgcattggacaatcacatacaaaccctggcatgtccttccagaaaaaccagcttatcatctatcaagctccaaccccttatacagctcctctggtggaatccatgactcatatgtttaacctacaataattcagctatacacattcctgtagaacaaatgagagaaataattta

SEQ ID NO: 188520 - DNA, 1062 bp, Artificial Sequence
  derived and/or modified sequence
atgcccagccccgtgggcctgctgagagccctgcccctgccctggccccagttcctggcctgcaccctgagaagactggccggccccagagagagcaccggccccagccagaagcccccccccctgtgcagcgtgccctgcagagtgcccgccatgaccgaggaggtggccagagaggccctgctgagcttcgtggacagcaagtgctgctacagcagcaccgtggccggcgacctggtgatccaggagctgaagagacagaccctgtgcagatacagactggagaccttcagcgagagcagaatcagcgagtggaccttccagcccttcaccaaccacagcgtggacggcccccagagaggcgccagccccagactgtgggacatcaaggtgcagggcccccccatgttccaggaggacaccagaaagttccaggtgccccacagcagcctggtgaaggagtgccacaagtgccacggcagaggcagatacaagtgcagcggctgccacggcgccggcaccgtgagatgccccagctgctgcggcgccaagagaaaggccaagcagagcagaagatgccagctgtgcgccggcagcggcagaagaagatgcagcacctgcagcggcagaggcaacaagacctgcgccacctgcaagggcgagaagaagctgctgcacttcatccagctggtgatcatgtggaagaacagcctgttcgagttcgtgagcgagcacagactgaactgccccagagagctgctggccaaggccaagggcgagaacctgttcaaggacgagaacagcgtggtgtaccccatcgtggacttccccctgagagacatcagcctggccagccagagaggcatcgccgagcacagcgccgccctggccagcagagccagagtgctgcagcagagacagaccatcgagctgatccccctgaccgaggtgcactactggtaccagggcaagacctacgtgtactacatctacggcaccgaccaccaggtgtacgccgtggactaccccgagagatactgctgcggctgcaccatcgtgtag

SEQ ID NO: 188521 - DNA, 948 bp, Artificial Sequence
  derived and/or modified sequence
atgcccagccccgtgggcctgctgagagccctgcccctgccctggccccagttcctggcctgcaccctgagaagactggccggccccagagagagcaccggccccagccagaagcccccccccctgtgcagcgtgccctgcagagtgcccgccatgaccgaggaggtggccagagaggccctgctgagcttcgtggacagcaagtgctgctacagcagcaccgtggccggcgacctggtgatccaggagctgaagagacagaccctgtgcagatacagactggagaccttcagcgagagcagaatcagcgagtggaccttccagcccttcaccaaccacagcgtggacggcccccagagaggcgccagccccagactgtgggacatcaaggtgcagggcccccccatgttccaggaggacaccagaaagttccaggtgccccacagcagcctggtgaaggagtgccacaagtgccacggcagaggcagatacaagtgcagcggctgccacggcgccggcaccgtgagatgccccagctgctgcggcgccaagagaaaggccaagcagagcagaagatgccagctgtgcgccggcagcggcagaagaagatgcagcacctgcagcggcagaggcaacaagacctgcgccacctgcaagggcgagaagaagctgctgcacttcatccagctggtgatcatgtggaagaacagcctgttcgagttcgtgagcgagcacagactgaactgccccagagagctgctggccaaggccaagggcgagaacctgttcaaggacgagaacagcgtggtgtaccccatcgtggacttccccctgagagacatcagcctggccagccagagaggcatcgccgagcacagcgccgccctggccagcagagccagagtgctgcagcaggtgagccagggcggcggcgccatctggctgtag

SEQ ID NO: 188522 - DNA, 1062 bp, Artificial Sequence
  derived and/or modified sequence
atgccttcccctgtggggctgctgcgggccctgccactgccatggccccaattcctcgcttgtactctccgacgcttagccggccctagagaatcaactggaccttctcagaagccccctccattgtgctccgttccatgccgcgtgccggccatgactgaagaagtggcacgggaggccttgctcagttttgtggactccaagtgctgttattcctctaccgtggctggagacttagtgatacaggagctcaaacgtcagacattatgtcgatataggctggagacctttagcgagagcagaatatccgaatggacttttcaaccttttactaaccattctgtagatggcccacagcgtggcgctagcccaagactatgggacattaaggtgcagggtcctccgatgttccaggaggacactaggaagttccaagtgccccactcctctttagtaaaggaatgccataaatgccacggcagaggaagatacaagtgcagtggctgtcatggcgccggtacagttaggtgtccaagctgttgtggtgccaaaaggaaagcaaagcagagtagacgatgtcagctttgcgccggaagtggacggagaaggtgctctacctgcagtggcaggggaaataagacatgtgcaacctgcaaaggcgaaaagaagctactacacttcattcagctggtgattatgtggaaaaactccttatttgaatttgtgtcggagcatcgactgaattgcccacgagaactgcttgctaaggctaagggcgagaacttgttcaaagatgagaactcagttgtgtatccaatcgtcgatttcccattgcgcgatatttctctggccagccagcgtgggatcgctgaacatagcgccgcactagcatctagagcccgggttcttcagcagagacaaacaatagaactgattccactgactgaagtgcattattggtatcagggaaaaacctatgtgtactacatatatggcaccgatcatcaggtttacgctgtcgattaccccgaaaggtactgctgtggctgcaccatcgtatag

SEQ ID NO: 188523 - DNA, 1062 bp, Artificial Sequence
  derived and/or modified sequence
atgccttcccccgtgggactgcttagagctttaccactgccgtggccacagtttttagcctgcactctacgcagattagctggaccacgtgagtcgaccggcccatcccagaaaccaccaccgctgtgtagcgtgccatgtagggttcccgctatgacagaggaagtggccagggaggctcttctctcatttgttgacagtaagtgctgttactcttccacagtggccggtgacttagtgatacaagagttgaaacgccagaccctctgtcgataccggctcgaaaccttcagcgaatcaagaatttcagagtggactttccaaccctttactaatcattctgtggacgggccacaacggggcgccagtcctagactgtgggatattaaagtgcaagggcctccgatgttccaggaggatacccggaagtttcaggtgccgcatagctcgctggtgaaagagtgccacaaatgccacggaaggggccgctataaatgctctggatgtcatggtgccgggacggttaggtgtccctcctgctgtggcgctaagcgcaaagcaaaacaatctcggcgatgtcagctctgcgctgggtcgggtcgcaggaggtgttccacctgtagcggccgtggaaacaagacttgtgcaacatgtaagggcgaaaaaaagctgctgcacttcatccagctcgtgatcatgtggaagaactcgctgttcgaatttgtgtccgaacatcggctaaattgccccagagagctgctggctaaagcgaaaggagagaacctgtttaaggatgaaaattcagttgtctatcccattgtggacttcccgctacgggacatatcattagcctcccagcgcgggatcgccgagcacagtgcagcgttggcatccagggcacgtgtcctacagcagcgccagactatcgaactgataccgctcaccgaggtgcactactggtaccaaggtaagacatacgtatactatatttatggaaccgaccaccaagtgtacgccgtggattatcccgagagatattgttgcggctgtactattgtatag

SEQ ID NO: 188524 - DNA, 948 bp, Artificial Sequence
  derived and/or modified sequence
atgccttcgcccgtcgggctactgagagccctgcccttgccttggcctcagttcctggcctgcactttaaggcgtctggcgggaccccgggagagcacaggaccaagccagaaacctccacccctctgctccgttccttgtcgcgtgccggcaatgaccgaagaggttgcaagagaggccctgctttctttcgtcgattcaaaatgctgctatagcagcacggtcgcgggcgaccttgtcatccaggaattaaagaggcaaactctctgccgttataggctcgaaaccttttctgaatctcggatatccgagtggacattccaacctttcaccaatcatagtgtggatgggccacagaggggggctagtccgagactctgggacattaaggttcagggtcctcccatgttccaagaagatactcgcaaattccaggtcccccactctagcttggtcaaagaatgtcataagtgtcatggtcggggcaggtataaatgctcggggtgtcacggagccggcacagtaagatgcccttcttgctgtggcgcaaagagaaaagctaaacagtcacggcggtgtcaactgtgtgcgggtagcggtcgtcgccggtgttcaacgtgcagcggacgaggaaataagacctgtgcgacatgtaaaggagaaaaaaagctgctgcacttcatccaactggtgatcatgtggaaaaactcattgttcgagttcgtgagtgaacatcgcttgaactgcccccgggaacttctggcaaaggcaaaaggagagaatctgttcaaggatgagaactctgtcgtgtatcctatcgtggattttcctctgcgtgacatttctttggcgagtcaacggggaatcgcggagcattcagctgccctggcgtctcgggcaagggtcctgcaacaggttagccaaggcggaggcgccatctggttatag

SEQ ID NO: 188525 - DNA, 1062 bp, Artificial Sequence
  derived and/or modified sequence
atgcccagccctgtgggcctgctgcgggccctgcccctgccctggccccagttcctggcctgcaccctgcggcggctggccggcccccgggagagcacaggccccagccagaagcccccacccctgtgcagcgtgccctgccgggtgcctgccatgacagaggaggtggcccgggaggccctgctgagctttgtggacagcaagtgctgctacagcagcacagtggccggggacctggtgatccaggagctgaagaggcagaccctgtgccgctaccgcctggagaccttcagcgagagccgcatcagcgagtggaccttccagcccttcaccaaccacagcgtggatggcccccagagaggagccagcccccggctgtgggacatcaaggtgcagggcccccccatgttccaggaggacaccaggaagttccaggtgccccacagcagcctggtgaaggagtgccacaagtgccacggccggggccgctacaagtgcagcggctgccacggggccggcaccgtgcgctgccccagctgctgcggggccaagaggaaggccaagcagagccgccgctgccagctgtgtgccggcagcggcagaagacgctgcagcacctgcagcggccggggcaacaagacctgtgccacctgcaagggggagaagaagctgctgcacttcatccagctggtgatcatgtggaagaacagcctgtttgaatttgtgtctgagcaccggctgaactgcccccgggagctgctggccaaggccaagggggagaacctcttcaaggatgagaacagcgtggtgtaccccatcgtggacttccccctgcgggacatcagcctggccagccagaggggcattgctgagcacagcgctgccctggccagccgggcccgggtgctgcagcagaggcagaccatcgagctgatccccctgacagaggtgcactactggtaccagggcaagacctacgtgtactacatctatggaacagaccaccaggtgtatgctgtggactacccagagcgctactgctgcggctgcaccatcgtgtag

SEQ ID NO: 188526 - DNA, 948 bp, Artificial Sequence
  derived and/or modified sequence
atgcccagccctgtgggcctgctgcgggccctgcccctgccctggccccagttcctggcctgcaccctgcggcggctggccggcccccgggagagcacaggccccagccagaagcccccacccctgtgcagcgtgccctgccgggtgcctgccatgacagaggaggtggcccgggaggccctgctgagctttgtggacagcaagtgctgctacagcagcacagtggccggggacctggtgatccaggagctgaagaggcagaccctgtgccgctaccgcctggagaccttcagcgagagccgcatcagcgagtggaccttccagcccttcaccaaccacagcgtggatggcccccagagaggagccagcccccggctgtgggacatcaaggtgcagggcccccccatgttccaggaggacaccaggaagttccaggtgccccacagcagcctggtgaaggagtgccacaagtgccacggccggggccgctacaagtgcagcggctgccacggggccggcaccgtgcgctgccccagctgctgcggggccaagaggaaggccaagcagagccgccgctgccagctgtgtgccggcagcggcagaagacgctgcagcacctgcagcggccggggcaacaagacctgtgccacctgcaagggggagaagaagctgctgcacttcatccagctggtgatcatgtggaagaacagcctgtttgaatttgtgtctgagcaccggctgaactgcccccgggagctgctggccaaggccaagggggagaacctcttcaaggatgagaacagcgtggtgtaccccatcgtggacttccccctgcgggacatcagcctggccagccagaggggcattgctgagcacagcgctgccctggccagccgggcccgggtgctgcagcaggtgtcccagggcggcggggccatctggctgtag

SEQ ID NO: 188527 - DNA, 1062 bp, Artificial Sequence
  derived and/or modified sequence
atgcccagccccgtgggcctgctgcgggccctgcccctgccctggcctcagttcctggcttgtaccctgcggcggctggccgggccaagagagtctactggtcctagccaaaagccacccccactctgcagcgtaccatgcagggtacctgccatgaccgaggaggttgcacgggaggcccttctctcctttgtggattctaaatgttgctattcctccaccgtcgccggggacctggtgattcaggaactgaagagacagactctttgccgctacagactggagacgtttagcgaaagcaggatcagcgaatggaccttccagccctttacaaaccacagcgtggatggacctcagagaggtgcctcccctcgcctttgggatatcaaagttcaaggacccccaatgtttcaagaagacacaagaaagttccaggtcccccattcttccctggtgaaagagtgccacaagtgccatggacgcggtaggtacaaatgttctggctgccacggtgcaggcactgtccgatgccctagctgctgtggagctaagaggaaagctaaacagagcaggaggtgccagttgtgcgctggttctgggcgcaggagatgcagcacctgcagtggtaggggcaacaaaacctgtgcgacttgcaagggagagaaaaagttactgcatttcatacaactggtaattatgtggaaaaactccctgtttgagtttgtcagcgagcaccgactcaattgtccgcgagagctccttgctaaggctaagggagagaatctgtttaaagatgaaaattccgtggtctaccctattgtggacttcccactcagggacatttcacttgcttctcaacgggggatcgcagagcattccgcggcactggcaagccgggcacgggttctgcaacagcgccagaccatagaactaatcccgctgaccgaggtgcattattggtatcagggcaaaacatatgtttattatatttacggtacagaccaccaggtctatgccgtagattaccccgaacgatactgctgtggctgtactattgtatag

SEQ ID NO: 188528 - DNA, 1062 bp, Artificial Sequence
  derived and/or modified sequence
atgcccagccccgtgggcctgctgcgggccctgcccctgccctggccacagtttctggcctgcactttgcgccgactggcaggcccaagagagtctaccgggccgtcacagaagcctcctcccctgtgttctgtgccatgtagggtcccggcaatgaccgaagaagtcgcacgagaagcgctcctctctttcgtcgattccaaatgctgctatagttccaccgtggccggcgatctcgtcatccaggaactgaagagacagaccctgtgccgttaccgcctggagactttttcagagtctagaatatccgagtggacctttcagccattcactaaccacagcgttgatggtccccaaaggggcgcctcgcctcgcctctgggacataaaggtacaggggcccccaatgttccaggaagacacgagaaaatttcaagtgccccacagctctttagtgaaagaatgtcacaagtgtcatggccgtggcagatataaatgcagtgggtgtcacggcgcaggaactgtgaggtgcccttcatgctgcggggctaaacggaaagccaagcaatcgaggcgatgccaactatgtgctgggagcgggcggcgcagatgctccacatgcagcggccgagggaataaaacttgtgccacatgcaagggggagaagaagttgctccatttcattcagctagtgattatgtggaagaactctctattcgaatttgtgtctgagcacagactgaactgtcctcgtgaacttctagcgaaggctaaaggagagaatctgtttaaagatgaaaactctgtcgtctaccccatcgtggattttcctctgcgcgatatctcattagcatcccagaggggtatcgcagagcattccgcggcactggcgtcacgcgcaagagttctccagcagcgccaaaccattgagctgatcccgctcactgaggtgcactactggtaccagggcaagacctacgtgtactatatttatgggaccgatcaccaggtgtatgccgtggactacccagagagatactgttgcggatgtaccattgtgtag

SEQ ID NO: 188529 - DNA, 948 bp, Artificial Sequence
  derived and/or modified sequence
atgcccagccccgtgggcctgctgcgggccctgcccctgccctggccccagttcctcgcttgtacccttcgacggctggccggcccgcgtgaaagtactgggccaagccagaaaccacctccattatgttctgttccctgccgtgtgccagcgatgaccgaagaagtcgcaagagaggcacttttatcgtttgtcgactccaagtgctgttactcctccacagtagccggtgatctggtgattcaggagctgaagaggcaaaccttgtgcagatatagattggagaccttctctgagagccgtatatctgagtggactttccagcctttcactaaccatagcgtcgacggtccacagcgtggagcttctcccagactctgggatataaaggtacaaggaccccccatgtttcaagaggatacaagaaagttccaggtgccccactcctctctggtgaaagagtgccacaaatgccatggcaggggcaggtataagtgttccggctgccatggcgcaggcactgtaaggtgtccctcttgttgtggagcgaagcgcaaggcgaaacaatcaagacggtgtcagttatgtgcgggttcggggcggcgacggtgtagcacgtgcagcggtcgcgggaataagacctgcgccacctgtaaaggcgagaagaagctgctccatttcattcaattggttattatgtggaaaaactcgctgttcgaattcgtgagcgagcaccggctaaactgccctcgggaactgttggcaaaggctaaaggagagaatctgttcaaggatgagaactccgtggtgtaccccatagtggacttccctttgagagacatcagtctggcctctcaaaggggaatcgcggagcattcagccgcgttggcctcccgggcccgggtgcttcagcaggtttcccaaggcggaggtgcgatttggctgtag

SEQ ID NO: 188530 - DNA, 1062 bp, Artificial Sequence
  derived and/or modified sequence
atgccctctcctgtcggtctgctccgcgctttaccattgccgtggccacaattcctagcatgcaccctgaggaggttggccggtcccagggagtccaccggaccctcccagaagccacccccactctgctctgtcccctgtagagtgcctgctatgactgaggaggtcgccagggaagctctgctgtcgtttgtggattccaagtgctgttacagtagcaccgtagcaggagatctggtgatacaggaactgaagaggcagaccctgtgccgttaccgacttgagaccttcagtgagtcaaggatttcagagtggaccttccagccctttacgaatcactctgtggacggcccacagagaggtgcatctcctaggctatgggacattaaagtgcagggacctcctatgtttcaggaagacactcgaaaattccaggttccccacagctctttagtaaaagagtgtcataagtgtcacgggagagggcgttataaatgctcgggatgccacggcgctggcacagtgcgatgtccatcgtgttgcggcgcaaagagaaaagccaaacagtcacgacggtgtcagctttgcgccggaagtggacggaggaggtgttcaacttgcagtggcagggggaacaagacttgtgccacgtgtaagggtgaaaagaaattgctccattttatccaattggtcatcatgtggaaaaatagtttgtttgaattcgtgagtgaacacagactcaactgcccccgagagctgctcgcgaaggctaagggtgaaaacctctttaaagatgaaaattccgtcgtctatcccatcgttgactttcctctaagggatatctctctggctagccaaagagggatagccgagcacagcgcagcactggcctctcgggcacgtgtgttgcagcagcggcagacaatcgaacttatccctcttacggaagttcactactggtaccaaggcaaaacttacgtatactacatctacgggaccgaccatcaagtctacgccgtagactaccctgagcggtattgttgtggatgtactatcgtatag

SEQ ID NO: 188531 - DNA, 1062 bp, Artificial Sequence
  derived and/or modified sequence
atgccttcacccgtcggacttctgagagccttgcctctgccatggcctcagttccttgcgtgcacactgaggcgcctggcaggtcctcgggagtctacgggaccgagtcagaaacccccacccctgtgttcagtgccttgccgggtcccagccatgactgaggaggtcgctcgggaggcgctgctgtccttcgtggatagtaaatgttgctacagctctaccgtcgccggagacctcgttattcaggagttaaagagacaaaccctctgcaggtatcgattagagacattcagcgagtctcggatcagcgagtggacgtttcaacccttcacgaatcactcagttgacggtcctcagagaggcgcttctcctagactttgggacattaaggtgcaaggaccgccaatgttccaggaggatacgagaaagtttcaggtcccacattccagtctcgtgaaagagtgccacaagtgtcatggcagaggacgttacaaatgctcaggctgccacggtgccggaacagttagatgtccctcatgctgtggcgcaaaaaggaaggccaaacaaagccgtcgctgccagctgtgcgccggttctggacggagacggtgctcaacctgctctgggcgaggaaataaaacctgcgctacttgtaaaggtgagaaaaaacttctacacttcattcagctcgttatcatgtggaagaactccctatttgaattcgtgagtgagcatcgtctgaactgcccgagggagctgcttgccaaggccaagggcgaaaatctgtttaaagacgagaatagcgtcgtgtatcccattgtagattttcctctgagagatatatcattagcatcccaacgcggtattgcagaacacagcgccgctctggcgtcacgcgcacgtgtgcttcagcaaagacaaacaattgaattgatcccactgactgaggtacattattggtatcagggtaagacatacgtctactatatttatgggactgaccatcaggtgtacgcagtggattatccagaaagatactgttgcggctgtaccatcgtgtag

SEQ ID NO: 188532 - DNA, 948 bp, Artificial Sequence
  derived and/or modified sequence
atgccaagtccagtgggtctgcttagagcacttcctctcccctggccccagtttttagcctgtacactccggagactagccggacccagggagagcaccggtccttctcaaaaacctcccccactgtgttccgtgccctgccgagttccagccatgactgaagaagtggctagagaagcgcttctctccttcgtcgactccaagtgttgttacagttctactgtagccggtgatctcgttatccaggaactgaaacggcaaacattatgcagataccgcctggagaccttctcagaatctcgtatatcggagtggaccttccagccttttaccaaccatagtgtggacggaccccagaggggcgcaagcccgagactatgggacattaaggtgcaagggccacctatgttccaggaagacacccgcaagtttcaggtaccgcacagttccctagtgaaagaatgtcataagtgtcatggcagaggccgatataagtgttcgggatgccatggggctggcactgtgcgatgcccatcctgttgtggggctaagcgcaaagccaaacagtcccgaagatgtcagctttgtgccggaagtggcagaagacgctgcagcacctgtagcggcaggggaaacaagacttgcgccacttgcaaaggtgagaagaagttgctccacttcattcaactagttattatgtggaagaactcgttgtttgaattcgtctccgagcatagactcaattgtcctagggaactgctggccaaggcgaagggagagaacctgttcaaagatgaaaactctgtagtgtatccgattgtggatttcccgttgagggacatatctttagcaagccagagggggatagccgaacactcggccgctctggcaagccgggcaagggttctgcagcaggtctctcaggggggtggcgcaatctggttatag

SEQ ID NO: 188533 - protein, 141 aa, Artificial Sequence
  derived and/or modified sequence
MNARGLGSELKDSIPVTELSASGPFESHDLLRKGFSCVKNELLPSHPLELSEKNFQLNQDKMNFSTLRNIQGLFAPLKLQMEFKAVQQVQRLPFLSSSNLSLDVLRGNDETIGFEDILNDPSQSEVMGEPHLMVEYKLGLL

SEQ ID NO: 188534 - DNA, 426 bp, Artificial Sequence
  derived and/or modified sequence
atgaacgctaggggacttgggagtgagttaaaggattcaatccccgtgaccgaactgtctgctagcggtcccttcgaatcccacgatctgctgcgcaaggggttctcctgcgttaaaaatgagctactgccgtcccatccactcgagttaagtgaaaagaactttcagctcaatcaggataagatgaacttcagcaccttgcgcaatatccaaggtttgttcgccccgttgaaactgcagatggagttcaaagcagtacagcaggttcagcgactcccatttttgagcagtagcaatctcagtctcgatgtgctccgcggaaatgacgaaacaatcggctttgaagatattcttaatgacccttcacagagcgaagtcatgggtgagccgcatctcatggtggaatacaagcttgggctgctctag

SEQ ID NO: 188535 - DNA, 426 bp, Artificial Sequence
  derived and/or modified sequence
atgaatgcccggggcctgggcagcgagctgaaggacagcatccctgtgacagagctgagcgccagcggcccctttgagagccatgacctgctgaggaagggcttcagctgtgtgaagaatgagctgctgcccagccaccccctggagctgtctgagaagaacttccagctgaaccaggacaagatgaacttcagcaccctgaggaacatccagggcctgtttgcccccctgaagctgcagatggagttcaaggctgtgcagcaggtgcagaggctgcccttcctgagcagcagcaacctgagcctggatgtgctgcggggaaatgatgagaccatcggctttgaggacatcctgaatgaccccagccagagcgaggtgatgggagagccccacctgatggtggagtacaagctgggcctgctgtag

SEQ ID NO: 188536 - DNA, 426 bp, Artificial Sequence
  derived and/or modified sequence
atgaacgcccggggcctgggcagcgagctgaaggacagcatccccgtgacagaattgtccgcaagtggccccttcgaaagccacgatttgctcagaaaaggcttttcctgcgtgaagaatgagctgctgccctcccatccactggagttgagtgagaaaaattttcagctgaaccaagataagatgaacttctccaccctccgtaacatccaggggttgttcgcccctctcaaactgcagatggaattcaaagctgtacagcaggtccagcgactgccatttctatctagtagcaatttaagcctcgacgtcctgagaggcaatgacgaaaccatcgggtttgaagacattctcaatgacccgtctcagagcgaagttatgggggagccccacctgatggtggaatacaaactcgggcttctctag

SEQ ID NO: 188537 - DNA, 426 bp, Artificial Sequence
  derived and/or modified sequence
atgaatgcccgtgggttgggctctgagctgaaggactccatcccggtaactgagttgagcgcctctggccctttcgagtcacacgatttgcttagaaagggattctcctgtgtgaagaacgaacttctcccatcacacccattggagctctctgagaaaaactttcagctgaaccaagacaaaatgaactttagtacactacgcaacattcaagggttgtttgccccacttaagcttcagatggaattcaaggcagtacagcaggttcagaggttaccctttctgtcctcctctaatctgagcctggatgtcctccggggaaacgacgaaactatcggatttgaagacatcctaaacgatccaagtcagagcgaggttatgggcgaaccacaccttatggtcgagtacaaactcggactactgtag

SEQ ID NO: 188538 - DNA, 1330 bp, Artificial Sequence
  derived and/or modified sequence
gccagccctcggaaacggaagtgagcggcggggtcgactgacggtaacggggcagagaggctgttcgcagagctgcggaagatgaatgccagaggacttggatctgagctaaaggacagtattccagttactgaactttcagcaagtggaccttttgaaagtcatgatcttcttcggaaaggtttttcttgtgtgaaaaatgaacttttgcctagtcatccccttgaattatcagaaaaaaatttccagctcaaccaagataaaatgaatttttccacactgagaaacattcagggtctatttgctccgctaaaattacagatggaattcaaggcagtgcagcaggttcagcgtcttccatttctttcaagctcaaatctttcactggatgttttgaggggtaatgatgagactattggatttgaggatattcttaatgatccatcacaaagcgaagtcatgggagagccacacttgatggtggaatataaacttggtttactgtaatagtgtgctgttcatggaaaccgagggctgcatcttgtttatagtcatctttgtactgtaatttgatgtacacaacattaaaagtactgacacctgagaatttctgctcaagtagtatcagtgatcatttaaaatttggaggggtctttggtttacagccatgtgacaattaaaagcactaaagggagatcatgttaaagctcttaatttatattaaaacagtagcctttgtctttaaaaaagttgttgctcatgaatattataaaatgatctacaggtttcaattcaacctgtttctaggtttttttgtaaatttagttttgattaagcattataagcatttgagtctataaactttatagtagcatctttcagaataaacatttttaattgatttcagtggcaactctcaaattgattacaatatgagatatatcagtgtcgtccattaacactcataagaataatatttactgtgtcagtgctattttaggattatagttattgtttgattatttcaggttgaaaagtagaagttccaaggttttgattttggtctggtctttaagtgaaaaattaaagcaaccagtagatgtaggttaaacttttacttcatagacttaatatgtaattaatatattgccaagcaacactgttaaagaaaagtaaaactcattttttcttgttcttaatttatatattacaagatactgtaaggtattctttatgaagttgatatataaaaatttacatttttagaacattagtgaatggatcatcttttacaattaaaagtatattttgattatcagtttcttaggaa

SEQ ID NO: 188539 - DNA, 426 bp, Artificial Sequence
  derived and/or modified sequence
atgaacgccagaggcctgggcagcgagctgaaggacagcatccccgtgaccgagctgagcgccagcggccccttcgagagccacgacctgctgagaaagggcttcagctgcgtgaagaacgagctgctgcccagccaccccctggagctgagcgagaagaacttccagctgaaccaggacaagatgaacttcagcaccctgagaaacatccagggcctgttcgcccccctgaagctgcagatggagttcaaggccgtgcagcaggtgcagagactgcccttcctgagcagcagcaacctgagcctggacgtgctgagaggcaacgacgagaccatcggcttcgaggacatcctgaacgaccccagccagagcgaggtgatgggcgagccccacctgatggtggagtacaagctgggcctgctgtag

SEQ ID NO: 188540 - protein, 699 aa, Artificial Sequence
  derived and/or modified sequence
MNLLPKSSREFGSVDYWEKFFQQRGKKAFEWYGTYLELCGVLHKYIKPREKVLVIGCGNSELSEQLYDVGYRDIVNIDISEVVIKQMKECNATRRPQMSFLKMDMTQMEFPDASFQVVLDKGTLDAVLTDEEEKTLQQVDRMLAEVGRVLQVGGRYLCISLAQAHILKKAVGHFSREGWMVRVHQVANSQDQVLEAEPQFSLPVFAFIMTKFRPVPGSALQIFELCAQEQRKPVRLESAERLAEAVQERQQYAWLCSQLRRKARLGSVSLDLCDGDTGEPRYTLHVVDSPTVKPSRDNHFAIFIIPQGRETEWLFGMDEGRKQLAASAGFRRLITVALHRGQQYESMDHIQAELSARVMELAPAGMPTQQQVPFLSVGGDIGVRTVQHQDCSPLSGDYVIEDVQGDDKRYFRRLIFLSNRNVVQSEARLLKDVSHKAQKKRKKDRKKQRPADAEDLPAAPGQSIDKSYLCCEHHKAMIAGLALLRNPELLLEIPLALLVVGLGGGSLPLFVHDHFPKSCIDAVEIDPSMLEVATQWFGFSQSDRMKVHIADGLDYIASLAGGGEARPCYDVIMFDVDSKDPTLGMSCPPPAFVEQSFLQKVKSILTPEGVFILNLVCRDLGLKDSVLAGLKAVFPLLYVRRIEGEVNEILFCQLHPEQKLATPELLETAQALERTLRKPGRGWDDTYVLSDMLKTVKIV

SEQ ID NO: 188541 - protein, 613 aa, Artificial Sequence
  derived and/or modified sequence
MKECNATRRPQMSFLKMDMTQMEFPDASFQVVLDKGTLDAVLTDEEEKTLQQVDRMLAEVGRVLQVGGRYLCISLAQAHILKKAVGHFSREGWMVRVHQVANSQDQVLEAEPQFSLPVFAFIMTKFRPVPGSALQIFELCAQEQRKPVRLESAERLAEAVQERQQYAWLCSQLRRKARLGSVSLDLCDGDTGEPRYTLHVVDSPTVKPSRDNHFAIFIIPQGRETEWLFGMDEGRKQLAASAGFRRLITVALHRGQQYESMDHIQAELSARVMELAPAGMPTQQQVPFLSVGGDIGVRTVQHQDCSPLSGDYVIEDVQGDDKRYFRRLIFLSNRNVVQSEARLLKDVSHKAQKKRKKDRKKQRPADAEDLPAAPGQSIDKSYLCCEHHKAMIAGLALLRNPELLLEIPLALLVVGLGGGSLPLFVHDHFPKSCIDAVEIDPSMLEVATQWFGFSQSDRMKVHIADGLDYIASLAGGGEARPCYDVIMFDVDSKDPTLGMSCPPPAFVEQSFLQKVKSILTPEGVFILNLVCRDLGLKDSVLAGLKAVFPLLYVRRIEGEVNEILFCQLHPEQKLATPELLETAQALERTLRKPGRGWDDTYVLSDMLKTVKIV

SEQ ID NO: 188542 - protein, 698 aa, Artificial Sequence
  derived and/or modified sequence
MRAFVVSREFGSVDYWEKFFQQRGKKAFEWYGTYLELCGVLHKYIKPREKVLVIGCGNSELSEQLYDVGYRDIVNIDISEVVIKQMKECNATRRPQMSFLKMDMTQMEFPDASFQVVLDKGTLDAVLTDEEEKTLQQVDRMLAEVGRVLQVGGRYLCISLAQAHILKKAVGHFSREGWMVRVHQVANSQDQVLEAEPQFSLPVFAFIMTKFRPVPGSALQIFELCAQEQRKPVRLESAERLAEAVQERQQYAWLCSQLRRKARLGSVSLDLCDGDTGEPRYTLHVVDSPTVKPSRDNHFAIFIIPQGRETEWLFGMDEGRKQLAASAGFRRLITVALHRGQQYESMDHIQAELSARVMELAPAGMPTQQQVPFLSVGGDIGVRTVQHQDCSPLSGDYVIEDVQGDDKRYFRRLIFLSNRNVVQSEARLLKDVSHKAQKKRKKDRKKQRPADAEDLPAAPGQSIDKSYLCCEHHKAMIAGLALLRNPELLLEIPLALLVVGLGGGSLPLFVHDHFPKSCIDAVEIDPSMLEVATQWFGFSQSDRMKVHIADGLDYIASLAGGGEARPCYDVIMFDVDSKDPTLGMSCPPPAFVEQSFLQKVKSILTPEGVFILNLVCRDLGLKDSVLAGLKAVFPLLYVRRIEGEVNEILFCQLHPEQKLATPELLETAQALERTLRKPGRGWDDTYVLSDMLKTVKIV

SEQ ID NO: 188543 - DNA, 2100 bp, Artificial Sequence
  derived and/or modified sequence
atgaacctgctgcccaagagcagcagagagttcggcagcgtggactactgggagaagttcttccagcagagaggcaagaaggccttcgagtggtacggcacctacctggagctgtgcggcgtgctgcacaagtacatcaagcccagagagaaggtgctggtgatcggctgcggcaacagcgagctgagcgagcagctgtacgacgtgggctacagagacatcgtgaacatcgacatcagcgaggtggtgatcaagcagatgaaggagtgcaacgccaccagaagaccccagatgagcttcctgaagatggacatgacccagatggagttccccgacgccagcttccaggtggtgctggacaagggcaccctggacgccgtgctgaccgacgaggaggagaagaccctgcagcaggtggacagaatgctggccgaggtgggcagagtgctgcaggtgggcggcagatacctgtgcatcagcctggcccaggcccacatcctgaagaaggccgtgggccacttcagcagagagggctggatggtgagagtgcaccaggtggccaacagccaggaccaggtgctggaggccgagccccagttcagcctgcccgtgttcgccttcatcatgaccaagttcagacccgtgcccggcagcgccctgcagatcttcgagctgtgcgcccaggagcagagaaagcccgtgagactggagagcgccgagagactggccgaggccgtgcaggagagacagcagtacgcctggctgtgcagccagctgagaagaaaggccagactgggcagcgtgagcctggacctgtgcgacggcgacaccggcgagcccagatacaccctgcacgtggtggacagccccaccgtgaagcccagcagagacaaccacttcgccatcttcatcatcccccagggcagagagaccgagtggctgttcggcatggacgagggcagaaagcagctggccgccagcgccggcttcagaagactgatcaccgtggccctgcacagaggccagcagtacgagagcatggaccacatccaggccgagctgagcgccagagtgatggagctggcccccgccggcatgcccacccagcagcaggtgcccttcctgagcgtgggcggcgacatcggcgtgagaaccgtgcagcaccaggactgcagccccctgagcggcgactacgtgatcgaggacgtgcagggcgacgacaagagatacttcagaagactgatcttcctgagcaacagaaacgtggtgcagagcgaggccagactgctgaaggacgtgagccacaaggcccagaagaagagaaagaaggacagaaagaagcagagacccgccgacgccgaggacctgcccgccgcccccggccagagcatcgacaagagctacctgtgctgcgagcaccacaaggccatgatcgccggcctggccctgctgagaaaccccgagctgctgctggagatccccctggccctgctggtggtgggcctgggcggcggcagcctgcccctgttcgtgcacgaccacttccccaagagctgcatcgacgccgtggagatcgaccccagcatgctggaggtggccacccagtggttcggcttcagccagagcgacagaatgaaggtgcacatcgccgacggcctggactacatcgccagcctggccggcggcggcgaggccagaccctgctacgacgtgatcatgttcgacgtggacagcaaggaccccaccctgggcatgagctgccccccccccgccttcgtggagcagagcttcctgcagaaggtgaagagcatcctgacccccgagggcgtgttcatcctgaacctggtgtgcagagacctgggcctgaaggacagcgtgctggccggcctgaaggccgtgttccccctgctgtacgtgagaagaatcgagggcgaggtgaacgagatcctgttctgccagctgcaccccgagcagaagctggccacccccgagctgctggagaccgcccaggccctggagagaaccctgagaaagcccggcagaggctgggacgacacctacgtgctgagcgacatgctgaagaccgtgaagatcgtgtag

SEQ ID NO: 188544 - DNA, 1842 bp, Artificial Sequence
  derived and/or modified sequence
atgaaggagtgcaacgccaccagaagaccccagatgagcttcctgaagatggacatgacccagatggagttccccgacgccagcttccaggtggtgctggacaagggcaccctggacgccgtgctgaccgacgaggaggagaagaccctgcagcaggtggacagaatgctggccgaggtgggcagagtgctgcaggtgggcggcagatacctgtgcatcagcctggcccaggcccacatcctgaagaaggccgtgggccacttcagcagagagggctggatggtgagagtgcaccaggtggccaacagccaggaccaggtgctggaggccgagccccagttcagcctgcccgtgttcgccttcatcatgaccaagttcagacccgtgcccggcagcgccctgcagatcttcgagctgtgcgcccaggagcagagaaagcccgtgagactggagagcgccgagagactggccgaggccgtgcaggagagacagcagtacgcctggctgtgcagccagctgagaagaaaggccagactgggcagcgtgagcctggacctgtgcgacggcgacaccggcgagcccagatacaccctgcacgtggtggacagccccaccgtgaagcccagcagagacaaccacttcgccatcttcatcatcccccagggcagagagaccgagtggctgttcggcatggacgagggcagaaagcagctggccgccagcgccggcttcagaagactgatcaccgtggccctgcacagaggccagcagtacgagagcatggaccacatccaggccgagctgagcgccagagtgatggagctggcccccgccggcatgcccacccagcagcaggtgcccttcctgagcgtgggcggcgacatcggcgtgagaaccgtgcagcaccaggactgcagccccctgagcggcgactacgtgatcgaggacgtgcagggcgacgacaagagatacttcagaagactgatcttcctgagcaacagaaacgtggtgcagagcgaggccagactgctgaaggacgtgagccacaaggcccagaagaagagaaagaaggacagaaagaagcagagacccgccgacgccgaggacctgcccgccgcccccggccagagcatcgacaagagctacctgtgctgcgagcaccacaaggccatgatcgccggcctggccctgctgagaaaccccgagctgctgctggagatccccctggccctgctggtggtgggcctgggcggcggcagcctgcccctgttcgtgcacgaccacttccccaagagctgcatcgacgccgtggagatcgaccccagcatgctggaggtggccacccagtggttcggcttcagccagagcgacagaatgaaggtgcacatcgccgacggcctggactacatcgccagcctggccggcggcggcgaggccagaccctgctacgacgtgatcatgttcgacgtggacagcaaggaccccaccctgggcatgagctgccccccccccgccttcgtggagcagagcttcctgcagaaggtgaagagcatcctgacccccgagggcgtgttcatcctgaacctggtgtgcagagacctgggcctgaaggacagcgtgctggccggcctgaaggccgtgttccccctgctgtacgtgagaagaatcgagggcgaggtgaacgagatcctgttctgccagctgcaccccgagcagaagctggccacccccgagctgctggagaccgcccaggccctggagagaaccctgagaaagcccggcagaggctgggacgacacctacgtgctgagcgacatgctgaagaccgtgaagatcgtgtag

SEQ ID NO: 188545 - DNA, 2097 bp, Artificial Sequence
  derived and/or modified sequence
atgagagccttcgtggtgagcagagagttcggcagcgtggactactgggagaagttcttccagcagagaggcaagaaggccttcgagtggtacggcacctacctggagctgtgcggcgtgctgcacaagtacatcaagcccagagagaaggtgctggtgatcggctgcggcaacagcgagctgagcgagcagctgtacgacgtgggctacagagacatcgtgaacatcgacatcagcgaggtggtgatcaagcagatgaaggagtgcaacgccaccagaagaccccagatgagcttcctgaagatggacatgacccagatggagttccccgacgccagcttccaggtggtgctggacaagggcaccctggacgccgtgctgaccgacgaggaggagaagaccctgcagcaggtggacagaatgctggccgaggtgggcagagtgctgcaggtgggcggcagatacctgtgcatcagcctggcccaggcccacatcctgaagaaggccgtgggccacttcagcagagagggctggatggtgagagtgcaccaggtggccaacagccaggaccaggtgctggaggccgagccccagttcagcctgcccgtgttcgccttcatcatgaccaagttcagacccgtgcccggcagcgccctgcagatcttcgagctgtgcgcccaggagcagagaaagcccgtgagactggagagcgccgagagactggccgaggccgtgcaggagagacagcagtacgcctggctgtgcagccagctgagaagaaaggccagactgggcagcgtgagcctggacctgtgcgacggcgacaccggcgagcccagatacaccctgcacgtggtggacagccccaccgtgaagcccagcagagacaaccacttcgccatcttcatcatcccccagggcagagagaccgagtggctgttcggcatggacgagggcagaaagcagctggccgccagcgccggcttcagaagactgatcaccgtggccctgcacagaggccagcagtacgagagcatggaccacatccaggccgagctgagcgccagagtgatggagctggcccccgccggcatgcccacccagcagcaggtgcccttcctgagcgtgggcggcgacatcggcgtgagaaccgtgcagcaccaggactgcagccccctgagcggcgactacgtgatcgaggacgtgcagggcgacgacaagagatacttcagaagactgatcttcctgagcaacagaaacgtggtgcagagcgaggccagactgctgaaggacgtgagccacaaggcccagaagaagagaaagaaggacagaaagaagcagagacccgccgacgccgaggacctgcccgccgcccccggccagagcatcgacaagagctacctgtgctgcgagcaccacaaggccatgatcgccggcctggccctgctgagaaaccccgagctgctgctggagatccccctggccctgctggtggtgggcctgggcggcggcagcctgcccctgttcgtgcacgaccacttccccaagagctgcatcgacgccgtggagatcgaccccagcatgctggaggtggccacccagtggttcggcttcagccagagcgacagaatgaaggtgcacatcgccgacggcctggactacatcgccagcctggccggcggcggcgaggccagaccctgctacgacgtgatcatgttcgacgtggacagcaaggaccccaccctgggcatgagctgccccccccccgccttcgtggagcagagcttcctgcagaaggtgaagagcatcctgacccccgagggcgtgttcatcctgaacctggtgtgcagagacctgggcctgaaggacagcgtgctggccggcctgaaggccgtgttccccctgctgtacgtgagaagaatcgagggcgaggtgaacgagatcctgttctgccagctgcaccccgagcagaagctggccacccccgagctgctggagaccgcccaggccctggagagaaccctgagaaagcccggcagaggctgggacgacacctacgtgctgagcgacatgctgaagaccgtgaagatcgtgtag

SEQ ID NO: 188546 - DNA, 2100 bp, Artificial Sequence
  derived and/or modified sequence
atgaatttacttccgaaaagctcaagagagtttggaagtgtggattactgggaaaaatttttccagcagaggggcaaaaaagccttcgagtggtatggaacatatctcgaactgtgtggggttcttcacaagtacattaagccaagagaaaaagtgctggtcattggctgtggcaattccgaactctcagagcaactgtacgacgtcggatatagagacattgttaacatcgacatcagtgaggtcgtaatcaagcagatgaaggaatgcaatgccacaaggagaccgcagatgagctttctgaagatggacatgacccagatggagtttcccgacgcgagcttccaggtagtgctcgacaaggggaccctggatgccgtcctaaccgatgaggaggaaaagacacttcaacaggtggatcggatgctggccgaagtcggacgcgtattacaagtggggggtagatacctctgtatttccctcgctcaggctcacatcctgaaaaaagctgttggacatttctcgagagagggatggatggtgcgggttcaccaggtcgccaactctcaggatcaggtgctcgaggccgaacctcagtttagtctcccagtattcgcttttatcatgactaagtttcggccagttcctgggtcagccctgcaaatatttgagctttgcgctcaggaacagcgaaagccagtgaggctggagagtgctgagcgcctcgctgaagcagtccaggaaaggcagcagtatgcttggctgtgctcccagctcagaaggaaggcacgtctgggcagcgttagtcttgacttgtgcgatggagataccggggagccaaggtacacactccacgtcgtggatagcccgaccgttaaaccatcacgggataaccactttgcgatttttattatcccccagggacgtgaaactgaatggcttttcgggatggatgagggcagaaaacagttagctgcaagcgctggctttcgtagactcatcaccgtggcgttacatcgtggccagcagtatgagagcatggatcacatccaggccgaactcagcgctcgggtgatggagttagctcccgctggcatgcctacacaacagcaggtgccattcttgtccgtcggaggcgatatcggggtaagaactgttcagcatcaggactgcagtccgctgagcggcgattatgtcatcgaggatgtgcagggtgatgataagcgatactttcgccgcctgatcttcctgtcgaacaggaatgtggtgcaatctgaggctagactcctgaaggacgtctcccataaggcccagaagaagcgaaagaaggatcgcaaaaaacaacggcccgcagacgctgaggatcttcctgccgcccccggacagagcattgataagtcttacctttgctgtgagcaccataaggccatgatagccggactggccctcctgcggaaccctgaacttcttcttgagatccccctcgcgctgctggtggttgggctgggcgggggaagtctgccattgtttgtgcatgatcactttccgaagagttgtatcgatgcggttgaaatcgacccctctatgctggaggtggctacccagtggttcggcttctcacagtcggatagaatgaaagtacacatcgcagatggcctggattacatcgctagtctggcaggtggcggggaggcccgcccctgctacgatgttattatgttcgacgtggatagcaaggatcctaccctcggcatgtcatgtccgccccctgcattcgtggagcaaagctttcttcaaaaggtcaaatctatcctgacccccgaaggggtgtttattctcaatttggtctgccgggatctaggcctcaaggacagtgtcctggcggggttgaaggccgtattcccgctcctctacgtgcgacggatcgaaggcgaggtcaatgaaatattattctgtcaattacacccagagcagaaacttgccacaccagagttgctcgagactgcccaggctctggaacgcacccttagaaaacccgggcggggctgggacgacacttacgttctatcagacatgctgaagaccgtcaagatagtttag

SEQ ID NO: 188547 - DNA, 1842 bp, Artificial Sequence
  derived and/or modified sequence
atgaaagaatgcaacgccaccagaagaccacagatgtctttcttaaaaatggatatgacccagatggagtttcccgacgcttcgtttcaagtggtgttggataagggaaccttggacgcagtcctgacagacgaagaggaaaaaacattacagcaggtcgatagaatgctggctgaagtcggaagggtcttgcaagttggcggaaggtacctctgtatcagtctcgcccaagcacatattctaaagaaagccgtgggacatttcagccgcgaggggtggatggtacgcgtgcatcaagtggccaattcccaggaccaggtgctagaagctgagccccaattctcgctgcctgtgttcgcattcattatgaccaaatttagaccagtgccgggcagtgccctgcagatcttcgagttatgcgcccaagagcaacgcaagccagttcggctggaaagcgccgagagactggccgaggcggtccaagaaaggcagcagtacgcatggctatgttcgcagcttcgccggaaggctcgcttgggttcagtgtccctcgacctgtgtgatggtgatacaggcgagccacgttacaccctgcacgtcgtggacagcccgactgttaaaccctcccgtgataaccactttgcgatttttattataccacagggcagggagacagagtggctttttgggatggatgagggtaggaagcagctcgctgcgagtgctggattccggcgcttaatcaccgttgccctacatagagggcagcagtacgagagcatggaccatatccaggctgagctgagcgcccgagtaatggagttggctcccgccgggatgcctacacagcaacaggtcccttttctgagcgtggggggggacattggtgtgagaaccgtgcaacatcaggactgtagccctctttctggcgattacgttatcgaggatgtgcagggagacgataaacgttactttagacggctgatcttcctgagcaaccgcaatgtggtgcaatccgaagcacgcttactgaaagacgtgtcccacaaggcacagaaaaaacggaagaaagacaggaaaaagcaaaggcctgccgatgccgaggacttgcctgccgcccctggccagagcattgacaagagctatctctgctgtgagcatcataaggcaatgatcgccgggctggctctactccggaatcctgaactccttcttgaaatcccgctggccctgctcgtggtgggtcttggaggagggagcttgcctttgtttgtccacgaccacttccccaaatcatgcatcgacgcagtagagatagaccccagcatgctggaggtggcaacacaatggttcggcttcagccagagtgataggatgaaggtgcatatcgccgatggactggactacattgctagccttgccgggggaggcgaggctcggccctgctacgatgtgatcatgttcgacgtcgattcaaaggacccaactttaggcatgtcttgcccccctcccgccttcgtagagcaaagctttttacagaaagtgaagtcaatcctcacgccggagggggtgtttatcttgaacttggtctgcagggacctcggccttaaggacagcgtcctggctggcctcaaggctgtcttccctcttctctatgtccgccgaatagaaggggaagttaatgaaattctcttctgccagctacatcctgaacaaaagcttgccacgcctgagctccttgagacagctcaagccctggagcgcacactgcggaaaccgggtcgcggctgggacgatacctacgtgctcagtgacatgctcaaaaccgttaagatcgtgtag

SEQ ID NO: 188548 - DNA, 2097 bp, Artificial Sequence
  derived and/or modified sequence
atgcgagccttcgtggtgtctagagagtttggtagcgtcgattactgggagaagttcttccagcagcgcggtaaaaaggcatttgagtggtacgggacatatctcgagctgtgtggggtgctgcacaagtacatcaaacccagggaaaaggtgcttgttattgggtgcggcaattccgaattgtctgaacagctgtacgacgtaggttaccgggatattgtaaacattgacatttcggaagttgtcatcaagcagatgaaggaatgcaatgcaactcggagaccacagatgtctttcttgaagatggacatgactcagatggagttccctgacgccagttttcaggtggtactagataaaggcacccttgacgccgtgttaacggatgaggaggagaagactttgcagcaagttgacagaatgctcgccgaggttggcagggttcttcaagtgggaggaaggtatttgtgtatttcgttagcccaggcgcacatattaaaaaaggccgtcggccatttctcacgagagggatggatggtgagggtccaccaagtcgcaaacagtcaagaccaggtcttggaggctgagccacagttttctctgcctgtgtttgcttttattatgacgaaattccgtcccgttccaggtagcgccttgcagatcttcgagctctgcgcccaggaacaacggaaacctgtgcggttagaaagcgctgaacggttagcagaggctgtccaggagcgtcaacagtatgcctggctctgttctcagctcaggcgaaaagcacgactcggttccgtttctctggacctgtgcgatggcgatactggggagccccgatatactctccacgtggtggactcacctactgttaagccatcccgcgataatcacttcgctatctttatcatcccccaagggagagaaaccgaatggctgtttggaatggatgaaggccggaaacagctggccgccagtgctgggttccgccggctgatcaccgtggctttacatcgcggacagcagtacgaatccatggatcacatccaggccgaactttctgctagggttatggagctcgctccagccgggatgcccacccagcagcaggtgccatttcttagtgtcggcggtgacattggggtgagaacagtgcaacatcaggattgctctccccttagcggagactacgtcatcgaggacgtacaaggagatgataagagatatttccgcagattgatctttcttagtaacaggaacgtggtccagtcagaggctcgcttacttaaagacgtaagccataaggctcagaaaaagcggaagaaagacagaaaaaaacagcgcccagctgatgcggaggatttgcctgctgcacccggccagtccattgataaatcatatctttgctgtgagcatcacaaggctatgattgccggtctggcgctgctgcggaatccggagctcttgcttgagattccacttgcacttctggtggttggactgggaggcggatcactgcccctattcgtgcacgaccacttccccaagagttgtattgatgctgtggagatcgaccctagtatgctggaagtggccacccaatggttcggcttcagtcagtccgatcggatgaaagtccacatcgctgacggattggattacattgcctcgcttgcagggggaggcgaggctaggccttgttacgatgtgatcatgtttgatgttgacagtaaagaccctactctgggaatgtcttgccctcctccagctttcgtcgagcaatcctttttgcagaaagttaagagcatactcacacccgagggcgtcttcattctcaacctggtctgccgggacttaggccttaaggacagtgtgctggctggacttaaggccgtgtttcccctgctctacgtgagacgcattgagggggaggtgaatgaaatcctcttctgccaactccacccagaacagaaacttgcaacgcccgagctgctcgagaccgcgcaggctctagaacgcacgttgcggaagccggggaggggctgggacgacacttacgttctgtccgacatgctcaagaccgtcaaaatcgtttag

SEQ ID NO: 188549 - DNA, 2100 bp, Artificial Sequence
  derived and/or modified sequence
atgaacctgctgcccaagagcagccgggagtttggatctgtggactactgggagaagttcttccagcagaggggcaagaaggcctttgagtggtacggcacctacctggagctgtgtggggtgctgcacaagtacatcaagccccgggagaaggtgctggtgattggctgcggcaacagcgagctgtctgagcagctgtatgatgtgggctacagagacatcgtgaacatcgacatcagcgaggtggtgatcaagcagatgaaggaatgtaatgccacccggcggccccagatgtccttcctgaagatggacatgacccagatggagttcccagatgccagcttccaggtggtgctggacaagggcaccctggatgctgtgctgacagatgaggaggagaagaccctgcagcaggtggacaggatgctggccgaggtgggccgggtgctgcaggtgggcggccgctacctgtgcatcagcctggcccaggcccacatcctgaagaaggctgtgggccacttcagccgggagggctggatggtgcgggtgcaccaggtggccaacagccaggaccaggtgctggaggccgagccccagttcagcctgcctgtgtttgccttcatcatgaccaagttccggcctgtgcccggcagcgccctgcagatctttgagctgtgtgcccaggagcagaggaagcctgtgcggctggagagcgctgagcggctggccgaggccgtgcaggagcggcagcagtatgcctggctgtgcagccagctgcggaggaaggcccggctgggctctgtgtccctggacctgtgtgatggagacacaggagagccccgctacaccctgcacgtggtggacagccccaccgtgaagcccagccgggacaaccactttgccatcttcatcatcccccagggccgggagacagagtggctgtttggcatggatgagggcaggaagcagctggccgccagcgctggcttcagaagactcatcaccgtggccctgcaccggggccagcagtatgagagcatggaccacatccaggccgagctgagcgcccgggtgatggagctggccccagctggcatgcccacccagcagcaggtgcccttcctgtctgtgggcggggacattggagtgaggacagtgcagcaccaggactgcagccccctgagcggggactatgtgattgaagatgtgcagggagatgacaagcgctacttccggcggctcatcttcctgagcaacagaaatgtggtgcagagcgaggcccggctgctgaaggatgtgagccacaaggcccagaagaagaggaagaaggacaggaagaagcagaggcctgcagatgctgaggacctgcctgctgcccctggccagagcattgacaagagctacctgtgctgtgagcaccacaaggccatgattgctggcctggccctgctgagaaatcctgagctgctgctggagatccccctggccctgctggtggtgggcctgggcggcggcagcctgcccctgtttgtgcatgaccacttccccaagagctgcattgatgctgtggagattgaccccagcatgctggaggtggccacccagtggtttggcttcagccagagcgacaggatgaaggtgcacatcgcagatggcctggactacatcgccagcctggccggcggcggggaggcccggccctgctatgatgtgatcatgtttgatgtggacagcaaggaccccaccctgggcatgagctgccccccaccagcctttgtggagcagagcttcctgcagaaggtgaagagcatcctgaccccagagggcgtcttcatcctgaacctggtgtgccgggacctgggcctgaaggacagcgtgctggccggcctgaaggctgtgttccccctgctgtatgtgcggcgcatcgagggggaggtgaatgagatcctcttctgccagctgcaccctgagcagaagctggccaccccagagctgctggagacagcccaggccctggagaggaccctgaggaagccaggccggggctgggatgacacctacgtgctgagtgacatgctgaagacagtgaagatcgtgtag

SEQ ID NO: 188550 - DNA, 1842 bp, Artificial Sequence
  derived and/or modified sequence
atgaaggaatgtaatgccacccggcggccccagatgtccttcctgaagatggacatgacccagatggagttcccagatgccagcttccaggtggtgctggacaagggcaccctggatgctgtgctgacagatgaggaggagaagaccctgcagcaggtggacaggatgctggccgaggtgggccgggtgctgcaggtgggcggccgctacctgtgcatcagcctggcccaggcccacatcctgaagaaggctgtgggccacttcagccgggagggctggatggtgcgggtgcaccaggtggccaacagccaggaccaggtgctggaggccgagccccagttcagcctgcctgtgtttgccttcatcatgaccaagttccggcctgtgcccggcagcgccctgcagatctttgagctgtgtgcccaggagcagaggaagcctgtgcggctggagagcgctgagcggctggccgaggccgtgcaggagcggcagcagtatgcctggctgtgcagccagctgcggaggaaggcccggctgggctctgtgtccctggacctgtgtgatggagacacaggagagccccgctacaccctgcacgtggtggacagccccaccgtgaagcccagccgggacaaccactttgccatcttcatcatcccccagggccgggagacagagtggctgtttggcatggatgagggcaggaagcagctggccgccagcgctggcttcagaagactcatcaccgtggccctgcaccggggccagcagtatgagagcatggaccacatccaggccgagctgagcgcccgggtgatggagctggccccagctggcatgcccacccagcagcaggtgcccttcctgtctgtgggcggggacattggagtgaggacagtgcagcaccaggactgcagccccctgagcggggactatgtgattgaagatgtgcagggagatgacaagcgctacttccggcggctcatcttcctgagcaacagaaatgtggtgcagagcgaggcccggctgctgaaggatgtgagccacaaggcccagaagaagaggaagaaggacaggaagaagcagaggcctgcagatgctgaggacctgcctgctgcccctggccagagcattgacaagagctacctgtgctgtgagcaccacaaggccatgattgctggcctggccctgctgagaaatcctgagctgctgctggagatccccctggccctgctggtggtgggcctgggcggcggcagcctgcccctgtttgtgcatgaccacttccccaagagctgcattgatgctgtggagattgaccccagcatgctggaggtggccacccagtggtttggcttcagccagagcgacaggatgaaggtgcacatcgcagatggcctggactacatcgccagcctggccggcggcggggaggcccggccctgctatgatgtgatcatgtttgatgtggacagcaaggaccccaccctgggcatgagctgccccccaccagcctttgtggagcagagcttcctgcagaaggtgaagagcatcctgaccccagagggcgtcttcatcctgaacctggtgtgccgggacctgggcctgaaggacagcgtgctggccggcctgaaggctgtgttccccctgctgtatgtgcggcgcatcgagggggaggtgaatgagatcctcttctgccagctgcaccctgagcagaagctggccaccccagagctgctggagacagcccaggccctggagaggaccctgaggaagccaggccggggctgggatgacacctacgtgctgagtgacatgctgaagacagtgaagatcgtgtag

SEQ ID NO: 188551 - DNA, 2097 bp, Artificial Sequence
  derived and/or modified sequence
atgagggcctttgtggtgtcccgggagtttggatctgtggactactgggagaagttcttccagcagaggggcaagaaggcctttgagtggtacggcacctacctggagctgtgtggggtgctgcacaagtacatcaagccccgggagaaggtgctggtgattggctgcggcaacagcgagctgtctgagcagctgtatgatgtgggctacagagacatcgtgaacatcgacatcagcgaggtggtgatcaagcagatgaaggagtgcaatgccacccggcggccccagatgtccttcctgaagatggacatgacccagatggagttcccagatgccagcttccaggtggtgctggacaagggcaccctggatgctgtgctgacagatgaggaggagaagaccctgcagcaggtggacaggatgctggccgaggtgggccgggtgctgcaggtgggcggccgctacctgtgcatcagcctggcccaggcccacatcctgaagaaggctgtgggccacttcagccgggagggctggatggtgcgggtgcaccaggtggccaacagccaggaccaggtgctggaggccgagccccagttcagcctgcctgtgtttgccttcatcatgaccaagttccggcctgtgcccggcagcgccctgcagatctttgagctgtgtgcccaggagcagaggaagcctgtgcggctggagagcgctgagcggctggccgaggccgtgcaggagcggcagcagtatgcctggctgtgcagccagctgcggaggaaggcccggctgggctctgtgtccctggacctgtgtgatggagacaccggggagccccgctacaccctgcacgtggtggacagccccaccgtgaagcccagccgggacaaccactttgccatcttcatcatcccccagggccgggagacagagtggctgtttggcatggatgagggcaggaagcagctggccgccagcgctggcttccggcggctcatcaccgtggccctgcaccggggccagcagtatgaatccatggaccacatccaggccgagctgagcgcccgggtgatggagctggccccagctggcatgcccacccagcagcaggtgcccttcctgtctgtgggcggggacatcggcgtgaggacagtgcagcaccaggactgcagccccctgagcggggactatgtgattgaagatgtgcagggagatgacaagcgctacttcagaagactcatcttcctgagcaacagaaatgtggtgcagagcgaggcccggctgctgaaggatgtgagccacaaggcccagaagaagaggaagaaggacaggaagaagcagaggcctgcagatgctgaggacctgcctgctgcccctggccagagcattgacaagagctacctgtgctgtgagcaccacaaggccatgattgctggcctggccctgctgaggaaccctgagctgctgctggagatccccctggccctgctggtggtgggcctgggcggcggcagcctgcccctgtttgtgcatgaccacttccccaagagctgcattgatgctgtggagattgaccccagcatgctggaggtggccacccagtggtttggcttcagccagagcgacaggatgaaggtgcacatcgcagatggcctggactacatcgccagcctggccggcggcggggaggcccggccctgctatgatgtgatcatgtttgatgtggacagcaaggaccccaccctgggcatgagctgccccccaccagcctttgtggagcagagcttcctgcagaaggtgaagagcatcctgaccccagagggcgtcttcatcctgaacctggtgtgccgggacctgggcctgaaggacagcgtgctggccggcctgaaggctgtgttccccctgctgtatgtgagaagaattgaaggagaggtgaatgagatcctcttctgccagctgcaccctgagcagaagctggccaccccagagctgctggagacagcccaggccctggagaggaccctgaggaagccaggccggggctgggatgacacctacgtgctgagtgacatgctgaagacagtgaagatcgtgtag

SEQ ID NO: 188552 - DNA, 2100 bp, Artificial Sequence
  derived and/or modified sequence
atgaacctgctgcccaagagcagccgggagttcggcagcgtggactactgggagaaattctttcagcaacgcgggaagaaggcattcgaatggtatggcacctaccttgaactgtgcggggttcttcacaaatacatcaagccgagggaaaaggtgctggtgatcgggtgcggtaactccgaactgtcagaacaattatacgacgtgggctacagagacattgttaacatcgacataagcgaggttgtcattaaacagatgaaggagtgcaacgctacacgccgccctcaaatgagcttcctgaagatggacatgacacaaatggagttccccgacgccagctttcaggtcgttctcgataaaggcacccttgatgctgtcctgactgatgaagaggaaaagacactacagcaggttgaccggatgcttgcagaggttggcagggtgcttcaagtggggggtaggtatctctgcatcagccttgctcaggctcacatccttaagaaagcagtgggacacttctctcgggaaggctggatggtgagagtgcatcaagtcgcgaatagtcaggatcaggtgcttgaagccgaaccccagttctccttgcccgtatttgcatttatcatgaccaaattcagacctgttccaggcagcgctctccagatctttgagctctgtgcccaggagcagaggaaacccgtgagactggagtcggctgagcggctggctgaggcagtgcaggaaaggcaacagtacgcctggctgtgcagtcagctccgacggaaggcacgtctcggatcagttagcttggacttgtgcgatggcgacaccggagaaccccgctatacattgcatgtggtcgactcacctactgtgaaaccgagtcgggataaccattttgccatctttatcattccacagggacgtgagaccgagtggttgttcggaatggatgaaggcaggaaacagttagcagctagtgctggctttcggcgcttaatcacggtggccctacaccgggggcagcagtacgaaagtatggatcatatccaggccgaactgagtgctagagtgatggagcttgctcctgcaggcatgccaacccagcagcaagtgcctttcctctcagtgggaggggatattggcgtgcgcaccgtgcagcaccaggactgctcgcccctgtccggggactacgtgatcgaagatgtgcagggagatgacaaaaggtatttccgcagactgatattcctgtccaaccgcaacgtggtccagtctgaagcacgcctcttaaaggacgtgagccacaaggctcaaaaaaaacgcaaaaaagacagaaagaagcagcgccctgcagatgcagaagatttgcctgcagcgcccgggcaatccatcgacaagtcttacttgtgttgcgaacaccataaagccatgatcgcaggcctggctctacttagaaaccctgagctgctgctggaaattcctctggctctgctggtggtgggcctagggggaggaagtctgcccctgtttgtgcacgatcattttccaaaaagttgcattgacgccgttgaaattgacccttctatgctggaggtagccacacagtggtttggcttcagccagtccgaccgcatgaaggtccacattgcagatggtctagactacatcgcgagcctggccggagggggtgaggcaagaccttgctatgacgttatcatgttcgatgtggattcgaaagaccctaccctgggcatgagctgtccccctcccgccttcgtcgagcagtcgtttctgcaaaaggtgaagtccattctgactccagagggtgtgtttatactgaacctggtttgtcgggacttaggcctgaaagactcagtgcttgccggactcaaagctgtgttcccactgctctatgtgagacgcattgaaggcgaggtgaatgagatcctgttctgccagctgcatccagaacaaaaacttgccacaccagagttattggaaactgcacaggccctcgagagaactctgcgtaaacctgggagaggatgggatgacacctacgtcctatcggacatgctgaaaactgtaaaaattgtgtag

SEQ ID NO: 188553 - DNA, 1842 bp, Artificial Sequence
  derived and/or modified sequence
atgaaggagtgcaacgccacccggcggccccagatgagcttcctgaagatggacatgacccagatggagtttccagacgcctcatttcaggtggtcttggacaagggaaccttggatgcagtcctgacagacgaggaggagaaaacactgcagcaggttgacaggatgctggctgaagtaggccgggtgctgcaagtggggggcagatatctgtgcatatccttggcacaggcacacattctgaagaaggccgtggggcactttagcagggagggctggatggttcgggtccaccaggtagcgaatagccaggatcaggtattggaggcagaaccacagttcagcttgcctgtttttgccttcatcatgactaagtttcggcctgtccccggttccgctttgcagatattcgagctgtgtgcacaggagcagcgtaaacccgtacgactcgaatctgcggagcgtcttgcagaggcggtgcaggaacgccaacagtacgcatggttgtgtagccaattgaggagaaaggccaggcttggatcagtgagtcttgacctctgtgacggggataccggagaaccccggtacactctccacgtcgtcgattcccctacggtgaaacctagtcgcgataaccatttcgctatcttcatcattcctcagggcagagaaacagagtggctcttcggtatggatgaggggcggaagcaactagcagcatcagccggcttcagacgactgatcaccgtggccctgcacagaggacagcagtatgaaagcatggaccacatacaggctgaattatcagccagggtaatggagctcgccccagctggaatgccgactcagcagcaggtcccctttcttagtgtgggtggcgacatcggtgtgagaactgttcagcatcaagattgctcacccctgagtggagactatgtgatagaggacgtacagggcgatgataaacgatattttaggaggctgatctttctgagtaacaggaatgtggtccaatcagaagctcgcctgcttaaagatgtgtctcacaaagctcagaaaaaacggaaaaaggaccgcaaaaagcaacgacctgccgacgctgaagatctgccggctgcccctggacagtccattgacaagtcatacctttgctgcgagcaccataaggccatgatagctggtctggccctcctgcggaaccctgaacttctgctcgaaatccctctcgccctgctagtggtcggcctcggcgggggtagtttgcctctgttcgttcacgatcactttccgaaatcctgcattgatgcagtagaaatcgacccttccatgcttgaggtcgccacacagtggtttggattttcccaatcggatcgcatgaaggttcatatcgccgatggcctggactatattgctagcctggctggaggcggggaggcccgtccatgttatgacgtgattatgttcgacgtcgatagcaaggatccaacacttggtatgagctgtcctccccctgcatttgtggagcagagctttcttcagaaggtaaaatctatcctgactccagagggcgtctttatcctaaacctggtgtgccgcgaccttggtttgaaagacagtgtgctcgctggtcttaaagcagtatttccacttctctacgttaggcgaatcgagggagaggtgaacgagatccttttctgccagcttcacccggagcaaaagctcgctactcccgaactgttggaaaccgctcaggccctagagagaacactgaggaagcccggtcgaggttgggatgatacgtatgtgctatctgatatgcttaagaccgtcaaaatagtatag

SEQ ID NO: 188554 - DNA, 2097 bp, Artificial Sequence
  derived and/or modified sequence
atgcgggccttcgtggtgagccgggagttcggcagcgtggactactgggaaaagttcttccagcaaagagggaaaaaagcgttcgagtggtacggcacatatctggagctttgtggagtattacacaaatacatcaaaccgcgggagaaggttttggtcatcggctgcggcaactctgaactgagcgagcagctgtacgacgtagggtatcgagacatcgtgaatattgacatcagtgaagtggtgatcaagcagatgaaagaatgcaatgcaacaagacgcccacagatgtcttttttgaaaatggatatgacacaaatggagttcccagatgcgagttttcaggtggtcctggataaaggaacgttagacgcggtcttgaccgatgaggaggaaaagaccctccagcaggtggatagaatgttggccgaagtcgggagggtgcttcaggtgggcgggcgatacttgtgcatctcgctcgctcaggcgcacattctgaaaaaagcggtgggacactttagccgggaaggatggatggtgcgtgttcatcaggtggcaaatagccaggatcaggtccttgaggcggagccccagtttagtttgcctgtgttcgcgttcatcatgacaaagtttcgccctgttccaggctcagccttacaaattttcgagctttgcgcacaggaacagagaaagcctgtcaggttggaaagcgcagaacggttagctgaggctgtccaggaaagacagcaatacgcttggctttgctctcagcttcgccgtaaggcacggctcgggtcagtgagcctggatctgtgcgatggcgatactggcgagcctagatacaccctccacgttgttgactctccaactgtcaaacccagcagagataatcactttgcgatctttattattcctcaggggagagagactgagtggctttttgggatggacgagggcaggaagcagcttgctgcctctgccggtttccggcgcctgatcactgttgctctccataggggtcagcagtacgaaagtatggaccacatacaggcagaattgtctgctagggtgatggagctggcacctgccggcatgcccacccagcaacaggtgcccttcctgagcgtggggggagatattggcgtgcgtacggtgcagcaccaggattgttccccattgagtggcgattatgtgatcgaggacgtgcagggggacgataaacgatacttccgtcggttgatctttctgtcaaaccgaaacgtggtgcagagcgaagcaaggctcctcaaggatgtatctcacaaagcccagaagaaaagaaaaaaagaccgcaaaaagcaaaggcctgctgatgcggaggacctgcccgccgctcctggccagtctatagacaaatcttatttgtgttgtgagcaccacaaggcaatgatcgctggcctggcactcctgcgaaaccccgaactgctcttggagatccctctagcactgttagttgtaggtctggggggtgggtctctccctctctttgtacacgatcatttccccaagtcatgtatagacgcagttgagatagacccctctatgttggaggtggctacccaatggttcggctttagccaaagcgaccggatgaaggtacacatcgcggatggactggactacatcgccagcttggctggtgggggcgaggcccgaccctgctatgacgtgattatgtttgatgtcgattccaaagacccgaccttgggaatgagctgccccccacccgcctttgttgagcagagcttcctacagaaagtgaaaagtatccttacccctgagggtgtgttcatccttaatcttgtttgcagggacctcggtctaaaagatagcgtgctggccgggttaaaggctgtcttccccctcctgtatgttcgccgtattgagggagaagtgaacgaaattctgttttgtcagctccacccagagcagaaactggctacaccagagttgctcgagactgcacaggctctggagcgcacactcagaaagcctggaagaggctgggacgatacctacgtgctatcggatatgctgaaaacggtgaagatagtgtag

SEQ ID NO: 188555 - DNA, 3327 bp, Artificial Sequence
  derived and/or modified sequence
gtgtgaggggctcttcacgtggggaaggaacagcaggcgcggaggagggggcaagcgtgtgtgagattcagtggtccatgcgtgcgtttgtcgtgtaagggtcattcctggggtttggagtgggggaacaaatcaatgtggctgtttttccgtggaaagaattcccactgcagtgtcccggagcctgcgtgtggtgggcaagctcctcaaatggtatctcacagggaataggggagtcttgaaaacgcagcttcggcagtaggaacatgaacctcttacctaaaagttccagggagtttggctccgttgactattgggagaagttcttccagcagcgaggaaagaaagctttcgagtggtatggaacctacctggaactgtgcggggtgctacataaatatatcaagcccagggaaaaggtgctggtgattgggtgtggcaactcagaactgagtgagcaactgtatgatgtgggctatcgggatatagtgaacatcgacatcagtgaggttgtcatcaagcaaatgaaggaatgtaatgccacccgacggccccagatgagcttcttgaagatggacatgacgcagatggagtttcctgatgcctcgttccaggtggtgttggacaagggcaccctggatgctgtcctgacagatgaggaagagaagaccttacaacaggtggacaggatgctggctgaggttggccgtgtcctgcaggtgggcggtcgctatctctgcatctccctggctcaggctcacatcctgaagaaagcagtgggccacttctcccgggaggggtggatggtgagggtgcaccaagtggccaacagccaggaccaggtgttggaagcagagcctcagttctccttgcctgtctttgccttcatcatgaccaagttcaggccagtccctggctctgcccttcagatctttgagctgtgtgctcaggagcagcgcaagcctgtgcggctggagagtgccgagcggctggccgaggcggtgcaggagcgacagcagtatgcctggctgtgcagccagctgcgccgcaaggccaggctggggagtgtgtctctggacttgtgcgatggggacacgggggagccacgctacaccctccacgtggtggacagccccactgtgaaaccatcgcgggacaatcattttgcgattttcatcatccctcagggccgggagaccgagtggctctttggcatggatgagggccggaaacagctggcggccagtgctggcttcaggaggttgattacagtggcccttcaccgaggtcagcagtatgaaagcatggaccacatccaagctgagctgtcggctagagtcatggagctggccccagctgggatgcccacccagcagcaggtcccctttctgtctgtgggtggggacattggggtccggaccgttcagcaccaagactgcagccccttgagcggtgactatgtcattgaggatgtgcaaggggatgacaagcgatacttccgtcgactgatcttcctcagcaacaggaatgtggtgcagtccgaagccaggttgctgaaggatgtgtctcacaaagcccagaagaagcggaaaaaggacaggaagaagcagcggcctgctgatgcggaggacctccctgcagccccggggcagtccattgataagagttacctgtgttgtgaacaccacaaagccatgatcgctggccttgccctgctgagaaacccagagctactcctagagatcccactggcattgttggtggtaggcctgggcgggggcagcctccccctctttgtccacgatcattttccaaagtcctgcattgatgctgtggagatcgatccctccatgttggaagtggccacccagtggtttggcttctcccagagtgaccgaatgaaggtccacattgcagatggcctggactatatcgccagcttggcaggaggaggagaagcacggccttgctacgatgtcataatgtttgatgttgacagtaaggacccaacactgggaatgagttgtccgcccccagcatttgtggagcaatcttttctacagaaggttaaaagcatcttgactcctgaaggtgtttttattctcaaccttgtgtgccgagacttggggctaaaagactcagtgctggctgggctcaaggcagtgttccccctcctatatgtccggcgaattgagggtgaagtgaatgagatcctgttctgtcagctgcaccctgagcaaaaacttgccacaccagagctcctagaaacagcccaggctttggagcggaccctgaggaagcctgggaggggttgggatgacacgtatgtcttgtcagatatgctcaagacggtgaaaattgtgtgactgcttaggccaagcagccctcctgcctagactgaccttggactcccagcctgccagagaatgaagaaatacaacgcacagtacttttgaagcttcgtatttttcttggtttcacactcagctacatgtgacctccagcttggtgaggttgcctgaagattagggaaaataaaaatgtccttcccatcttgtcctcttcagtaccacttgggttggtttgtctttgcttcctacaccacgtccttgagtggagttccctgctgaagcccctagcacacactgcatgccttaacaagtgtgtgcaagcccctcagaactcaagacatccaaattttattgcgtctctacttatactggtttgcttttgatttattcctctattagttctataggagtgatctcaagtgagatagcagagcaagatgccaaaagaccataaatagagtaaggtttctatagatgtgagacagatttgagagagcatttactctgtctccctgtggatgaaactgctgctgaaatggttccaatttttaggaatctgcttacccacttcattatttgacagctttccttggtgacccaaaccttgtagcctaagccatttgtctttttctcagtggagggagtgtatggacctggccccatggctttgcatgttagagacctggcagactaaagtctctagtgtttgtttgctcacatttgctgagtgacagctatgtgccagactgcataaagggtggtggcagaagtgaaaatgtttaagaatgaccaaaaacattagtaatgaaagttaatgtgttccaggcattcttctaagtggtttacatgcactgtctcatttaatctgagataaaggatacttaagcccaaactatatctaaacccaaatctcacttggctggaaacatcaatcttaaccatttattcagaaccattaaaccaatgattccaagac

SEQ ID NO: 188556 - DNA, 3022 bp, Artificial Sequence
  derived and/or modified sequence
ggaaatctagttcgggaaaagtgtgaggggctcttcacgtggggaaggaacagcaggcgcggaggagggggcaagcgtgtgtgagattcagtggtccatgcgtgcgtttgtcgtgtgctggtgattgggtgtggcaactcagaactgagtgagcaactgtatgatgtgggctatcgggatatagtgaacatcgacatcagtgaggttgtcatcaagcaaatgaaggaatgtaatgccacccgacggccccagatgagcttcttgaagatggacatgacgcagatggagtttcctgatgcctcgttccaggtggtgttggacaagggcaccctggatgctgtcctgacagatgaggaagagaagaccttacaacaggtggacaggatgctggctgaggttggccgtgtcctgcaggtgggcggtcgctatctctgcatctccctggctcaggctcacatcctgaagaaagcagtgggccacttctcccgggaggggtggatggtgagggtgcaccaagtggccaacagccaggaccaggtgttggaagcagagcctcagttctccttgcctgtctttgccttcatcatgaccaagttcaggccagtccctggctctgcccttcagatctttgagctgtgtgctcaggagcagcgcaagcctgtgcggctggagagtgccgagcggctggccgaggcggtgcaggagcgacagcagtatgcctggctgtgcagccagctgcgccgcaaggccaggctggggagtgtgtctctggacttgtgcgatggggacacgggggagccacgctacaccctccacgtggtggacagccccactgtgaaaccatcgcgggacaatcattttgcgattttcatcatccctcagggccgggagaccgagtggctctttggcatggatgagggccggaaacagctggcggccagtgctggcttcaggaggttgattacagtggcccttcaccgaggtcagcagtatgaaagcatggaccacatccaagctgagctgtcggctagagtcatggagctggccccagctgggatgcccacccagcagcaggtcccctttctgtctgtgggtggggacattggggtccggaccgttcagcaccaagactgcagccccttgagcggtgactatgtcattgaggatgtgcaaggggatgacaagcgatacttccgtcgactgatcttcctcagcaacaggaatgtggtgcagtccgaagccaggttgctgaaggatgtgtctcacaaagcccagaagaagcggaaaaaggacaggaagaagcagcggcctgctgatgcggaggacctccctgcagccccggggcagtccattgataagagttacctgtgttgtgaacaccacaaagccatgatcgctggccttgccctgctgagaaacccagagctactcctagagatcccactggcattgttggtggtaggcctgggcgggggcagcctccccctctttgtccacgatcattttccaaagtcctgcattgatgctgtggagatcgatccctccatgttggaagtggccacccagtggtttggcttctcccagagtgaccgaatgaaggtccacattgcagatggcctggactatatcgccagcttggcaggaggaggagaagcacggccttgctacgatgtcataatgtttgatgttgacagtaaggacccaacactgggaatgagttgtccgcccccagcatttgtggagcaatcttttctacagaaggttaaaagcatcttgactcctgaaggtgtttttattctcaaccttgtgtgccgagacttggggctaaaagactcagtgctggctgggctcaaggcagtgttccccctcctatatgtccggcgaattgagggtgaagtgaatgagatcctgttctgtcagctgcaccctgagcaaaaacttgccacaccagagctcctagaaacagcccaggctttggagcggaccctgaggaagcctgggaggggttgggatgacacgtatgtcttgtcagatatgctcaagacggtgaaaattgtgtgactgcttaggccaagcagccctcctgcctagactgaccttggactcccagcctgccagagaatgaagaaatacaacgcacagtacttttgaagcttcgtatttttcttggtttcacactcagctacatgtgacctccagcttggtgaggttgcctgaagattagggaaaataaaaatgtccttcccatcttgtcctcttcagtaccacttgggttggtttgtctttgcttcctacaccacgtccttgagtggagttccctgctgaagcccctagcacacactgcatgccttaacaagtgtgtgcaagcccctcagaactcaagacatccaaattttattgcgtctctacttatactggtttgcttttgatttattcctctattagttctataggagtgatctcaagtgagatagcagagcaagatgccaaaagaccataaatagagtaaggtttctatagatgtgagacagatttgagagagcatttactctgtctccctgtggatgaaactgctgctgaaatggttccaatttttaggaatctgcttacccacttcattatttgacagctttccttggtgacccaaaccttgtagcctaagccatttgtctttttctcagtggagggagtgtatggacctggccccatggctttgcatgttagagacctggcagactaaagtctctagtgtttgtttgctcacatttgctgagtgacagctatgtgccagactgcataaagggtggtggcagaagtgaaaatgtttaagaatgaccaaaaacattagtaatgaaagttaatgtgttccaggcattcttctaagtggtttacatgcactgtctcatttaatctgagataaaggatacttaagcccaaactatatctaaacccaaatctcacttggctggaaacatcaatcttaaccatttattcagaaccattaaaccaatgattccaagac

SEQ ID NO: 188557 - DNA, 2433 bp, Artificial Sequence
  derived and/or modified sequence
acgaggcttcgcacccggatatggttatgggctcggaaatctagttcgggaaaagtgtgaggggctcttcacgtggggaaggaacagcaggcgcggaggagggggcaagcgtgtgtgagattcagtggtccatgcgtgcgtttgtcgtttccagggagtttggctccgttgactattgggagaagttcttccagcagcgaggaaagaaagctttcgagtggtatggaacctacctggaactgtgcggggtgctacataaatatatcaagcccagggaaaaggtgctggtgattgggtgtggcaactcagaactgagtgagcaactgtatgatgtgggctatcgggatatagtgaacatcgacatcagtgaggttgtcatcaagcaaatgaaggaatgtaatgccacccgacggccccagatgagcttcttgaagatggacatgacgcagatggagtttcctgatgcctcgttccaggtggtgttggacaagggcaccctggatgctgtcctgacagatgaggaagagaagaccttacaacaggtggacaggatgctggctgaggttggccgtgtcctgcaggtgggcggtcgctatctctgcatctccctggctcaggctcacatcctgaagaaagcagtgggccacttctcccgggaggggtggatggtgagggtgcaccaagtggccaacagccaggaccaggtgttggaagcagagcctcagttctccttgcctgtctttgccttcatcatgaccaagttcaggccagtccctggctctgcccttcagatctttgagctgtgtgctcaggagcagcgcaagcctgtgcggctggagagtgccgagcggctggccgaggcggtgcaggagcgacagcagtatgcctggctgtgcagccagctgcgccgcaaggccaggctggggagtgtgtctctggacttgtgcgatggggacacgggggagccacgctacaccctccacgtggtggacagccccactgtgaaaccatcgcgggacaatcattttgcgattttcatcatccctcagggccgggagaccgagtggctctttggcatggatgagggccggaaacagctggcggccagtgctggcttcaggaggttgattacagtggcccttcaccgaggtcagcagtatgaaagcatggaccacatccaagctgagctgtcggctagagtcatggagctggccccagctgggatgcccacccagcagcaggtcccctttctgtctgtgggtggggacattggggtccggaccgttcagcaccaagactgcagccccttgagcggtgactatgtcattgaggatgtgcaaggggatgacaagcgatacttccgtcgactgatcttcctcagcaacaggaatgtggtgcagtccgaagccaggttgctgaaggatgtgtctcacaaagcccagaagaagcggaaaaaggacaggaagaagcagcggcctgctgatgcggaggacctccctgcagccccggggcagtccattgataagagttacctgtgttgtgaacaccacaaagccatgatcgctggccttgccctgctgagaaacccagagctactcctagagatcccactggcattgttggtggtaggcctgggcgggggcagcctccccctctttgtccacgatcattttccaaagtcctgcattgatgctgtggagatcgatccctccatgttggaagtggccacccagtggtttggcttctcccagagtgaccgaatgaaggtccacattgcagatggcctggactatatcgccagcttggcaggaggaggagaagcacggccttgctacgatgtcataatgtttgatgttgacagtaaggacccaacactgggaatgagttgtccgcccccagcatttgtggagcaatcttttctacagaaggttaaaagcatcttgactcctgaaggtgtttttattctcaaccttgtgtgccgagacttggggctaaaagactcagtgctggctgggctcaaggcagtgttccccctcctatatgtccggcgaattgagggtgaagtgaatgagatcctgttctgtcagctgcaccctgagcaaaaacttgccacaccagagctcctagaaacagcccaggctttggagcggaccctgaggaagcctgggaggggttgggatgacacgtatgtcttgtcagatatgctcaagacggtgaaaattgtgtgactgcttaggccaagcagccctcctgcctagactgaccttggactcccagcctgccagagaatgaagaaatacaacgcacagtacttttgaagcttcgtatttttcttggtttcacactcagctacatgtgacctccagcttggtgaggttgcctgaagattagggaaaataaaaatgtccttcccatcttgtcctcttcagtacc

SEQ ID NO: 188558 - DNA, 2100 bp, Artificial Sequence
  derived and/or modified sequence
atgaatctgcttccgaaatcctctagagagtttggaagcgtggattattgggaaaaatttttccaacagcggggtaagaaggctttcgagtggtacggcacctacctcgagttgtgtggcgtgctgcacaaatacattaagccacgcgaaaaggtgcttgtaatcggctgtggcaattccgagttatccgaacagctgtacgacgtcggttaccgggacatcgtcaacatcgacatctccgaagtggtcattaagcagatgaaggagtgcaatgctacaagacggccacagatgtcgttccttaaaatggacatgacacagatggaatttcctgatgcaagctttcaggtcgtgctcgataagggaactctagatgctgtcttaactgatgaagaagaaaaaaccctccagcaggtggatcggatgctggcggaagttggcagagtcttacaggttggaggtagatacctgtgcatctctctggcccaggctcacatacttaaaaaggccgtgggacatttcagccgggaaggctggatggtgcgggtacaccaggtcgccaatagccaggaccaagttctagaagcagaaccccagttctcgctccctgtcttcgccttcattatgacaaagtttaggccggtacctggatctgctttgcaaatttttgagttgtgtgcccaggaacagaggaagcctgtgcggctcgagtctgctgagagactcgccgaagccgtgcaagaacggcagcagtatgcatggctgtgcagccagcttcgcagaaaggctcgcttgggctcagtctccctggacttatgcgatggggacactggagaaccgcgttacacacttcacgtggtagacagtcctactgttaagccctcccgggacaaccacttcgcgattttcatcataccacagggcagggagacagaatggctgtttggcatggacgaggggaggaagcaactcgcagcttctgctggttttcgaagactgatcacggtggccttgcataggggccagcagtacgaaagcatggatcacattcaggcggaactctcagcccgtgtgatggaactggcccctgctggcatgccgacccagcagcaggtgcctttcttatctgtcggcggagatatcggggtgaggactgtccagcatcaggattgttcaccactctccggtgactacgttattgaagatgtccagggagatgacaagcgctactttcggaggctgatattcttgagcaacagaaatgttgttcagtccgaggcccgactgctaaaggacgtcagccacaaagcgcagaaaaagcgcaaaaaggaccggaagaaacagcgtcctgccgacgctgaggatctgcctgccgcacctggacagagtatagacaaatcctatctatgttgtgagcaccataaagccatgattgccggactagcactgttgagaaacccagagctactgctcgagatccctctcgcactactagtggtggggcttgggggagggtcactccctctgttcgtccacgatcacttccctaagtcttgtatcgacgctgttgagatcgatccttctatgttggaggtggccacccaatggtttggattttctcaaagtgacaggatgaaggtgcacatcgcagatggccttgactacattgcctcactcgcaggtgggggtgaggctaggccatgctacgacgtgattatgtttgacgttgactccaaagaccctactctgggcatgagctgtcccccacccgcattcgtggaacaatctttcctgcagaaggtgaaatctattctgactccagagggggttttcattctgaacctcgtttgtcgcgatttaggtctgaaggactccgtcctcgccggtttaaaagccgtgtttccacttttgtacgttcgcaggatcgaaggagaagttaatgagatcctgttttgccagctgcacccagagcagaagctcgccaccccagaactgcttgaaaccgcccaggccctcgagagaaccctgaggaagcccggtcgcggatgggacgacacatacgtgctttccgacatgctgaaaacggtgaagatcgtttag

SEQ ID NO: 188559 - DNA, 1842 bp, Artificial Sequence
  derived and/or modified sequence
atgaaggagtgcaatgcaaccaggagaccccaaatgagtttcttgaagatggatatgacgcagatggaattccctgacgcttcttttcaggtcgtgctggacaaagggacccttgacgctgttctgacagatgaggaagagaaaactctgcagcaggtcgaccgcatgctggcagaagtggggcgtgtacttcaggtgggcggaagatatctgtgtatcagtcttgcacaggcccatattctaaagaaagccgtgggccacttttcacgggaagggtggatggttagggtgcaccaggtggccaacagccaggatcaggtcttggaggctgagcctcagttcagccttccggtgttcgcgtttatcatgactaaatttcggcctgtgcctggcagcgccctacagatattcgagttatgtgcacaggaacaacgcaagcctgttcgtctcgaaagcgccgaacggcttgctgaggctgtgcaggaaagacagcagtacgcctggctgtgttcccagctccggagaaaggcccgattggggagtgtcagcctggatctgtgcgacggagacaccggggaacctcgctataccctacatgtggtcgattcacccactgtgaagccttcacgggataaccattttgctatctttattataccccaggggagagaaactgaatggctcttcggcatggacgaaggccgaaaacagctggcggcttcagccggattccggagactgattaccgtagctcttcaccgcggacaacagtatgagagcatggatcacattcaggctgaactctcagcaagggtgatggaactggcacctgctggcatgcccactcagcaacaggtgccttttctctccgttgggggtgacataggagtgaggacagtccagcaccaagactgttctcccctgtctggcgactatgtgattgaagacgttcagggggatgataagcgctacttccgaagattaattttcttgtctaataggaatgtggttcagtctgaggcgagactcctgaaggatgtgagccataaagcccaaaaaaagaggaagaaggatcgcaaaaagcagcgtcctgccgatgccgaagatttgcccgctgctccagggcagtccatcgacaagtcttatctgtgttgtgagcatcataaggccatgattgcaggcctggctttattgagaaatcctgagctgttattggaaattccgctggccttattggtcgttgggctcggtgggggatcactcccactttttgtgcacgaccatttccccaaatcctgtatcgacgccgtggagattgatccctctatgctagaggtcgctacccaatggttcggcttcagccagtcagatcggatgaaggttcatatcgctgacggcctggactacattgccagtctcgccggagggggtgaggcacggccatgctacgatgttatcatgttcgacgttgatagtaaggaccccactctaggcatgagttgtccgcctccggcatttgtggagcagtctttcctgcagaaggtgaagtctatactgaccccagagggcgttttcattctgaatctggtttgcagagacttggggctgaaggatagtgttcttgctggcctcaaggctgttttccccttgctgtacgttcgtcggatcgagggggaggtcaacgagattctgttctgtcagctacaccccgagcagaaactcgcaacaccagaactgctcgagacagcccaagcccttgagagaaccctgaggaagccaggccgaggctgggatgacacatatgtattgtctgatatgcttaagaccgtgaaaattgtgtag

SEQ ID NO: 188560 - DNA, 2097 bp, Artificial Sequence
  derived and/or modified sequence
atgcgagcatttgtggtgagcagagagttcggaagcgttgattactgggagaaattcttccagcagaggggaaaaaaggcctttgaatggtatggtacatatcttgaactttgtggcgttttacacaaatacatcaaacccagagaaaaagtcctggtcatcggttgtggaaattccgagctttctgaacagctgtatgatgtgggctacagagacattgtgaacattgacatttctgaggttgtaataaagcagatgaaggagtgtaatgcaacaaggagaccacagatgtcctttctaaagatggacatgacgcaaatggagtttccggacgcttcctttcaggtagttctggacaaggggaccctggacgccgttctcacagacgaggaggagaaaaccctgcagcaggtggatcgcatgctcgccgaggtcggcagagttttacaggttgggggtagatacctttgcatctcccttgcacaggcccacatattgaagaaggcggtgggccatttcagtcgggaggggtggatggtccgggtacaccaagtggcaaacagccaggatcaggtcttggaggcggaaccccaattctctcttccagtgttcgcctttatcatgacaaagtttcgcccagtgcccggatccgcactccagatcttcgagctgtgcgcccaagaacagaggaagcctgtgagattagaatctgctgaacggctcgcagaagccgtgcaagagcggcagcagtacgcatggctgtgcagtcaactcagacgtaaggcacgcctgggctcggtatctctggacctgtgtgatggggatacaggcgaacctagatacaccctacacgttgtcgactctcccacagtcaagccctcacgcgataatcacttcgccatatttattatccctcaaggacgggaaaccgaatggctttttggaatggacgagggcaggaagcaactggctgcttcagctggttttcgcagacttattaccgtcgccttacaccgcggacagcaatatgaatctatggatcacatccaagccgaacttagcgctcgcgtgatggagttggcgcctgcaggcatgcctacacagcaacaggtgccctttctaagcgtcgggggagacatcggagtgcgtacagtgcagcaccaagattgttcccccttgtcgggagactacgtcattgaggatgtacaaggggacgataaaagatactttagacgcctgatcttcctgagcaatagaaacgtggtgcagagcgaggcgaggttactaaaggatgtgtcccacaaagctcagaaaaaacggaagaaagacaggaagaagcagagacccgctgatgccgaagatctaccagccgcacccggacagagtattgataagagttatttgtgctgcgaacaccacaaggctatgatcgccggtctggcacttctccgcaatccagagcttctgctagaaatcccactagcgttgttagtggtggggctcggaggcggatccttgcctctgtttgtgcacgaccacttcccaaagtcctgtatcgatgccgtcgagatcgatccaagcatgctggaagttgcgacccagtggtttgggttttcacagtctgataggatgaaggtgcacatcgctgacggactcgattatatcgcctcgctcgcaggaggtggtgaagctaggccttgttatgatgtcattatgttcgatgtcgattcgaaggatcccacactgggtatgagctgtccccctcccgcattcgttgagcagagcttcctgcagaaggtcaagagcatactgacaccggaaggcgttttcatcctgaatcttgtctgtcgcgacctgggactaaaggattcggtgttggctggactgaaagcagtcttcccccttctgtacgtgcggagaattgaaggcgaggtaaacgagatcctattttgtcaactgcacccggagcagaagttagccactcccgaattgctcgaaactgctcaggccctagagcgcacgttgcggaagcccggacgcggatgggatgacacctacgttctgagcgatatgttgaaaacagtgaaaattgtgtag

SEQ ID NO: 188561 - protein, 578 aa, Artificial Sequence
  derived and/or modified sequence
MAAAMPLALLVLLLLGPGGWCLAEPPRDSLREELVITPLPSGDVAATFQFRTRWDSELQREGVSHYRLFPKALGQLISKYSLRELHLSFTQGFWRTRYWGPPFLQAPSGAELWVWFQDTVTDVDKSWKELSNVLSGIFCASLNFIDSTNTVTPTASFKPLGLANDTDHYFLRYAVLPREVVCTENLTPWKKLLPCSSKAGLSVLLKADRLFHTSYHSQAVHIRPVCRNARCTSISWELRQTLSVVFDAFITGQGKKDWSLFRMFSRTLTEPCPLASESRVYVDITTYNQDNETLEVHPPPTTTYQDVILGTRKTYAIYDLLDTAMINNSRNLNIQLKWKRPPENEAPPVPFLHAQRYVSGYGLQKGELSTLLYNTHPYRAFPVLLLDTVPWYLRLYVHTLTITSKGKENKPSYIHYQPAQDRLQPHLLEMLIQLPANSVTKVSIQFERALLKWTEYTPDPNHGFYVSPSVLSALVPSMVAAKPVDWEESPLFNSLFPVSDGSNYFVRLYTEPLLVNLPTPDFSMPYNVICLTCTVVAVCYGSFYNLLTRTFHIEEPRTGGLAKRLANLIRRARGVPPL

SEQ ID NO: 188562 - protein, 316 aa, Artificial Sequence
  derived and/or modified sequence
MFSRTLTEPCPLASESRVYVDITTYNQDNETLEVHPPPTTTYQDVILGTRKTYAIYDLLDTAMINNSRNLNIQLKWKRPPENEAPPVPFLHAQRYVSGYGLQKGELSTLLYNTHPYRAFPVLLLDTVPWYLRLYVHTLTITSKGKENKPSYIHYQPAQDRLQPHLLEMLIQLPANSVTKVSIQFERALLKWTEYTPDPNHGFYVSPSVLSALVPSMVAAKPVDWEESPLFNSLFPVSDGSNYFVRLYTEPLLVNLPTPDFSMPYNVICLTCTVVAVCYGSFYNLLTRTFHIEEPRTGGLAKRLANLIRRARGVPPL

SEQ ID NO: 188563 - DNA, 1737 bp, Artificial Sequence
  derived and/or modified sequence
atggccgccgccatgcccctggccctgctggtgctgctgctgctgggccccggcggctggtgcctggccgagccccccagagacagcctgagagaggagctggtgatcacccccctgcccagcggcgacgtggccgccaccttccagttcagaaccagatgggacagcgagctgcagagagagggcgtgagccactacagactgttccccaaggccctgggccagctgatcagcaagtacagcctgagagagctgcacctgagcttcacccagggcttctggagaaccagatactggggcccccccttcctgcaggcccccagcggcgccgagctgtgggtgtggttccaggacaccgtgaccgacgtggacaagagctggaaggagctgagcaacgtgctgagcggcatcttctgcgccagcctgaacttcatcgacagcaccaacaccgtgacccccaccgccagcttcaagcccctgggcctggccaacgacaccgaccactacttcctgagatacgccgtgctgcccagagaggtggtgtgcaccgagaacctgaccccctggaagaagctgctgccctgcagcagcaaggccggcctgagcgtgctgctgaaggccgacagactgttccacaccagctaccacagccaggccgtgcacatcagacccgtgtgcagaaacgccagatgcaccagcatcagctgggagctgagacagaccctgagcgtggtgttcgacgccttcatcaccggccagggcaagaaggactggagcctgttcagaatgttcagcagaaccctgaccgagccctgccccctggccagcgagagcagagtgtacgtggacatcaccacctacaaccaggacaacgagaccctggaggtgcaccccccccccaccaccacctaccaggacgtgatcctgggcaccagaaagacctacgccatctacgacctgctggacaccgccatgatcaacaacagcagaaacctgaacatccagctgaagtggaagagaccccccgagaacgaggccccccccgtgcccttcctgcacgcccagagatacgtgagcggctacggcctgcagaagggcgagctgagcaccctgctgtacaacacccacccctacagagccttccccgtgctgctgctggacaccgtgccctggtacctgagactgtacgtgcacaccctgaccatcaccagcaagggcaaggagaacaagcccagctacatccactaccagcccgcccaggacagactgcagccccacctgctggagatgctgatccagctgcccgccaacagcgtgaccaaggtgagcatccagttcgagagagccctgctgaagtggaccgagtacacccccgaccccaaccacggcttctacgtgagccccagcgtgctgagcgccctggtgcccagcatggtggccgccaagcccgtggactgggaggagagccccctgttcaacagcctgttccccgtgagcgacggcagcaactacttcgtgagactgtacaccgagcccctgctggtgaacctgcccacccccgacttcagcatgccctacaacgtgatctgcctgacctgcaccgtggtggccgtgtgctacggcagcttctacaacctgctgaccagaaccttccacatcgaggagcccagaaccggcggcctggccaagagactggccaacctgatcagaagagccagaggcgtgccccccctgtag

SEQ ID NO: 188564 - DNA, 1737 bp, Artificial Sequence
  derived and/or modified sequence
atggcggccgccatgccacttgctcttctggtgctgctgttgctagggccgggcgggtggtgcctggcagaaccccctcgtgatagtctccgcgaagagctggttatcactcctttgccatcaggcgacgtggctgccaccttccagttccgcacacgttgggatagcgagctgcaaagagagggggtgtctcattacaggctctttcctaaggcgttaggacaactgattagcaaatactccctcagggaattgcacctgagcttcacacagggcttctggcggacccgttactgggggcctcctttcctacaggctccctctggtgctgagctttgggtctggtttcaagataccgtgactgatgtcgacaaaagttggaaggagctgtcaaacgtcctctctggcattttttgcgcttcactgaactttatcgacagtaccaacacagtgaccccaacagcttcatttaagccccttggcctggccaacgacacagatcattacttccttcgctatgctgtgctgcccagggaggtcgtctgcactgagaacctcacaccctggaagaaactgttgccctgctcttccaaagccggcctgtccgtgctgctaaaggctgaccgtctgttccatactagctaccattcacaagcagtgcatattcgcccggtgtgcaggaacgcccgctgcacatccatttcttgggaattgcggcaaaccctttctgtggtgttcgatgcttttattacaggtcagggcaagaaggattggagtctttttcgaatgttctcacgcaccctgaccgaaccctgcccgcttgcttccgagagtagggtgtacgtagatatcacaacctataatcaggacaatgaaacactggaggtgcacccaccgccaacaaccacataccaagacgtgatcttgggaaccaggaagacctacgccatttatgacctgctagatacagcgatgatcaataatagccgaaatcttaatatccagcttaagtggaagagaccacctgagaatgaagcgcctccagtaccttttctccatgctcagagatatgtgagcggatacggacttcaaaaaggcgaactttccaccttattatataatacacatccgtatcgtgcctttcccgtgctcttgctcgacacagtgccatggtatctgcggctgtacgtgcatactcttactattacctcgaaaggcaaagagaacaagccctcttacatccattaccagcccgcacaggataggttgcaaccgcacctgcttgagatgctgattcaactccctgctaatagtgttacaaaggtgtcgatccaattcgagcgggctctgttgaagtggactgagtatactccagaccccaaccatggcttttatgtgtccccttcagttctgagtgcccttgtcccaagcatggtggcggccaagcccgttgactgggaggagtcccctctatttaactccttgttccccgtaagtgacggaagcaactacttcgtgaggttgtataccgagcccttgcttgttaacctaccaaccccggacttcagcatgccatacaacgtcatctgtttaacttgcaccgtggtggccgtgtgctacggatcattttacaacttgctgacccggacatttcatatcgaagagccacgtacaggtgggctggcaaagaggctagctaacctgatcagacgcgccaggggcgtcccccctctgtag

SEQ ID NO: 188565 - DNA, 1737 bp, Artificial Sequence
  derived and/or modified sequence
atggctgctgccatgcccctggccctgctggtgctgctgctgctgggccctgggggctggtgcctggccgagcccccccgggacagcctgcgggaggagctggtgatcacccccctgcccagcggagatgtggccgccaccttccagttccgcacccgctgggacagcgagctgcagcgggagggcgtgagccactaccgcctcttccccaaggccctgggccagctgatcagcaagtacagcctgcgggagctgcacctgtccttcacccagggcttctggaggacccgctactggggcccccccttcctgcaggcccccagcggggctgagctgtgggtgtggttccaggacacagtgacagatgtggacaagtcctggaaggagctgagcaatgtgctgagcggcatcttctgtgccagcctgaacttcatcgacagcaccaacacagtgacccccacagccagcttcaagcccctgggcctggccaatgacacagaccactacttcctgcgctatgctgtgctgccccgggaggtggtgtgcacagagaacctgaccccctggaagaagctgctgccctgcagcagcaaggccggcctgtctgtgctgctgaaggctgacaggctcttccacaccagctaccacagccaggccgtgcacatccggcctgtgtgcagaaatgcccgctgcaccagcatctcctgggagctgcggcagaccctgtctgtggtgtttgatgccttcatcaccggccagggcaagaaggactggagcctcttcaggatgttcagcaggaccctgacagagccctgccccctggccagcgagagccgggtgtatgtggacatcaccacctacaaccaggacaatgagaccctggaggtgcaccccccacccaccaccacctaccaggacgtcatcctgggcaccaggaagacctacgccatctatgacctgctggacacagccatgatcaacaacagcaggaacctgaacatccagctgaagtggaagaggcccccagaaaatgaggcccctcctgtgcccttcctgcacgcccagagatatgtgtctggctacggcctgcagaagggggagctgagcaccctgctgtacaacacccacccctaccgggccttccctgtgctgctgctggacacagtgccctggtacctgcggctgtatgtgcacaccctgaccatcaccagcaagggcaaggagaacaagcccagctacatccactaccagcctgcccaggaccggctgcagccccacctgctggagatgctgatccagctgcctgccaacagcgtgaccaaggtgtccatccagtttgagcgggccctgctgaagtggacagagtacaccccagaccccaaccacggcttctacgtgagccccagcgtgctgagcgccctggtgcccagcatggtggccgccaagcctgtggactgggaggagagccccctcttcaacagcctcttccctgtgtctgatggcagcaactactttgtgcggctgtacacagagcccctgctggtgaacctgcccaccccagacttctccatgccctacaacgtcatctgcctgacctgcaccgtggtggccgtgtgctacggcagcttctacaacctgctgaccaggaccttccacatcgaggagcccaggactggaggcctggccaagaggctggccaacctgatccggcgggcccggggcgtgccccccctgtag

SEQ ID NO: 188566 - DNA, 1737 bp, Artificial Sequence
  derived and/or modified sequence
atggccgccgccatgcccctggccctgctggtgctgctgctgctgggtccaggtggttggtgcctcgctgagcctccgcgagacagcctcagggaggagctggttatcaccccgctgcccagtggagatgtcgccgccacctttcagtttagaacacgctgggacagtgagctccagcgggagggagtgtcgcattatagactgtttcccaaggctttagggcagctgatcagcaaatattcactgcgggaactgcatctgagcttcacgcaggggttttggagaacccggtactggggccctccctttctccaggcccccagtggcgctgagctgtgggtgtggtttcaggacacagtgaccgacgttgataaaagttggaaggaattgtccaacgttcttagtgggatattctgtgcctccttgaacttcatcgatagtaccaacacggtgaccccaactgcttctttcaagcctctggggcttgccaacgataccgaccactatttcctgcggtatgcagtacttccacgtgaagttgtctgcaccgagaacctgactccctggaaaaagctgttgccctgttcatccaaagctgggttaagtgtgctcctgaaagctgatagattgtttcatacatcataccacagccaggctgtccacatccgacctgtctgtcggaatgctaggtgtacctcaatctcctgggaactccggcaaacacttagcgtcgttttcgacgcctttatcacagggcagggaaagaaggactggagcctgtttcgtatgttctcccgcacattgactgagccttgccccctcgcatctgaatctagggtgtacgtggatatcactacttacaaccaggacaacgaaacactcgaggtgcaccctcctcctacaacaacttaccaggatgtgatactgggcactaggaagacgtacgccatttatgacctcttggatacggctatgatcaacaacagtcgcaacttgaacattcaactgaaatggaagagacccccagaaaatgaggccccacctgttccattcctgcatgcccagagatacgttagtgggtacggactccagaaaggggaactctccactctgctgtacaatactcacccttaccgggcctttcctgtcctgctcctggatacggtgccatggtatttgcgcctgtacgtccacacactgactattacgagcaagggcaaagagaacaagcctagctacatccactatcaaccagctcaagacagacttcagcctcatctgctggaaatgctgatacagttgccagccaattcagttacaaaggtttccatccagtttgaaagagctctgttgaaatggactgagtacactcctgatcctaaccacgggttctatgtttcaccttctgttctgtcagccctggttccttctatggttgcggccaaaccggtagattgggaggagtcaccactgtttaactctcttttcccagtgtcagacggatcaaactacttcgtgcgactgtatacagaacctctattggtaaacctcccaacccccgatttctccatgccctataacgttatttgcctgacctgcaccgttgtggccgtgtgttacggctctttttataatctgttaactcgaactttccatattgaagagcccagaacagggggcctggcaaagcgactggccaacctaatcaggcgcgccaggggcgtgccccccttatag

SEQ ID NO: 188567 - DNA, 2235 bp, Artificial Sequence
  derived and/or modified sequence
acttctcacacgcctttcttattggataccggcttttcatggggccgagcgccgctgggtaggcggaagtagccgcaggcatggcggcggctatgccgcttgctctgctcgtcctgttgctcctggggcccggcggctggtgccttgcagaacccccacgcgacagcctgcgggaggaacttgtcatcaccccgctgccttccggggacgtagccgccacattccagttccgcacgcgctgggattcggagcttcagcgggaaggagtgtcccattacaggctctttcccaaagccctggggcagctgatctccaagtattctctacgggagctgcacctgtcattcacacaaggcttttggaggacccgatactgggggccacccttcctgcaggccccatcaggtgcagagctgtgggtctggttccaagacactgtcactgatgtggataaatcttggaaggagctcagtaatgtcctctcagggatcttctgcgcctctctcaacttcatcgactccaccaacacagtcactcccactgcctccttcaaacccctgggtctggccaatgacactgaccactactttctgcgctatgctgtgctgccgcgggaggtggtctgcaccgaaaacctcaccccctggaagaagctcttgccctgtagttccaaggcaggcctctctgtgctgctgaaggcagatcgcttgttccacaccagctaccactcccaggcagtgcatatccgccctgtttgcagaaatgcacgctgtactagcatctcctgggagctgaggcagaccctgtcagttgtatttgatgccttcatcacggggcagggaaagaaagactggtccctcttccggatgttctcccgaaccctcacggagccctgccccctggcttcagagagccgagtctatgtggacatcaccacctacaaccaggacaacgagacattagaggtgcacccacccccgaccactacatatcaggacgtcatcctaggcactcggaagacctatgccatctatgacttgcttgacaccgccatgatcaacaactctcgaaacctcaacatccagctcaagtggaagagacccccagagaatgaggcccccccagtgcccttcctgcatgcccagcggtacgtgagtggctatgggctgcagaagggggagctgagcacactgctgtacaacacccacccataccgggccttcccggtgctgctgctggacaccgtaccctggtatctgcggctgtatgtgcacaccctcaccatcacctccaagggcaaggagaacaaaccaagttacatccactaccagcctgcccaggaccggctgcaaccccacctcctggagatgctgattcagctgccggccaactcagtcaccaaggtttccatccagtttgagcgggcgctgctgaagtggaccgagtacacgccagatcctaaccatggcttctatgtcagcccatctgtcctcagcgcccttgtgcccagcatggtagcagccaagccagtggactgggaagagagtcccctcttcaacagcctgttcccagtctctgatggctctaactactttgtgcggctctacacggagccgctgctggtgaacctgccgacaccggacttcagcatgccctacaacgtgatctgcctcacgtgcactgtggtggccgtgtgctatggctccttctacaatctcctcacccgaaccttccacatcgaggagccccgcacaggtggcctggccaagcggctggccaaccttatccggcgcgcccgaggtgtccccccactctgattcttgccctttccagcagctgcagctgccgtttctctctggggaggggagcccaagggctgtttctgccacttgctctcctcagagttggcttttgaaccaaagtgccctggaccaggtcagggcctacagctgtgttgtccagtacaggagccacgagccaaatgtggcatttgaatttgaattaacttagaaattcatttcctcacctgtagtggccacctctatattgaggtgctcaataagcaaaagtggtcggtggctgctgtattggacagcacagaaaaagatttccatcaccacagaaaggtcggctggcagcactggccaaggtgatggggtgtgctacacagtgtatgtcactgtgtagtggatggagtttactgtttgtggaataaaaacggctgtttccgtggtt

SEQ ID NO: 188568 - DNA, 1691 bp, Artificial Sequence
  derived and/or modified sequence
aagtagccgcaggcatggcggcggctatgccgcttgctctgctcgtcctgttgctcctggggcccggcggctggtgccttgcagaacccccacgcgacagcctgcgggaggaacttgtcatcaccccgctgccttccggggacgtagccgccacattccagttccgcacgcgctgggattcggagcttcagcgggaaggagtgtcccattacaggctctttcccaaagccctggggcagctgatctccaagtattctctacgggagctgcacctgtcattcacacaaggcttttggaggacccgatactgggggccacccttcctgcaggccccatcaggtgcagagctgtgggtctggttccaagacactgtcactgatgtggataaatcttggaaggagctcagtaatgtcctctcagggatcttctgcgcctctctcaacttcatcgactccaccaacacagtcactcccactgcctccttcaaacccctgggtctggccaatggcaggcctctctgtgctgctgaaggcagatcgcttgttccacaccagctaccactcccaggcagtgcatatccgccctgtttgcagaaatgcacgctgtactagcatctcctgggagctgaggcagaccctgtcagttgtatttgatgccttcatcacggggcagggaaagaaagactggtccctcttccggatgttctcccgaaccctcacggagccctgccccctggcttcagagagccgagtctatgtggacatcaccacctacaaccaggacaacgagacattagaggtgcacccacccccgaccactacatatcaggacgtcatcctaggcactcggaagacctatgccatctatgacttgcttgacaccgccatgatcaacaactctcgaaacctcaacatccagctcaagtggaagagacccccagagaatgaggcccccccagtgcccttcctgcatgcccagcggtacgtgagtggctatgggctgcagaagggggagctgagcacactgctgtacaacacccacccataccgggccttcccggtgctgctgctggacaccgtaccctggtatctgcggctgtatgtgcacaccctcaccatcacctccaagggcaaggagaacaaaccaagttacatccactaccagcctgcccaggaccggctgcaaccccacctcctggagatgctgattcagctgccggccaactcagtcaccaaggtttccatccagtttgagcgggcgctgctgaagtggaccgagtacacgccagatcctaaccatggcttctatgtcagcccatctgtcctcagcgcccttgtgcccagcatggtagcagccaagccagtggactgggaagagagtcccctcttcaacagcctgttcccagtctctgatggctctaactactttgtgcggctctacacggagccgctgctggtgaacctgccgacaccggacttcagcatgccctacaacgtgatctgcctcacgtgcactgtggtggccgtgtgctatggctccttctacaatctcctcacccgaaccttccacatcgaggagccccgcacaggtggcctggccaagcggctggccaaccttatccggcgcgcccgaggtgtccccccactctgattcttgccctttccagcagctgcagctgccgtttctctctg

SEQ ID NO: 188569 - DNA, 1737 bp, Artificial Sequence
  derived and/or modified sequence
atggcagccgctatgcccctggccctccttgtactccttctgcttggacccggtggctggtgcctagcagaaccacctcgggatagtcttagggaagagttggtgatcacgcccttaccctctggagacgttgcagcaacctttcaatttaggacccgctgggattctgagctgcaaagggagggggtgtctcactacagactgtttcccaaagctctgggccagttgatctcaaagtattcactcagagagttacacttgagcttcacccaaggattttggcgcactcgctactggggtcctcctttcttgcaggcgccaagcggcgcagaactgtgggtatggttccaggatactgttacagacgtggacaagagttggaaagaactgagtaatgtactgtcagggattttctgcgcctcgctcaacttcatcgattccaccaatactgtgactccgacggccagttttaaacctttagggctcgctaacgatacagaccattactttctccgctacgccgtgctgccccgtgaagtcgtgtgcaccgagaatctaaccccttggaaaaaactgctaccctgttcttctaaggccggactcagcgtgttgctgaaagcagaccgtctcttccacaccagctaccactcccaagccgtacatatcagacctgtttgccgcaatgccagatgcacctctatatcatgggagttaaggcagactttatcggtcgtgtttgatgcgtttattacaggacaaggcaaaaaagactggagcctgtttcggatgttctcgcgtactctgacagaaccatgtcccctggccagtgagtctagagtatacgttgacatcacaacatataaccaggataacgagacattggaggtgcatcccccaccaaccaccacataccaggatgtgatcctgggcactcgaaaaacttacgccatctatgacctgctcgacaccgccatgataaataatagtcgaaacctgaatatccagctgaaatggaagcgcccacccgaaaacgaggctccccctgtccctttcctacacgcccagcgatatgtaagtggatatgggttgcagaaaggcgagctgagtacgcttctgtacaatacgcacccgtaccgagcctttcctgtgctgctgctcgatactgtcccgtggtatctcagactctacgttcatacactgaccattacttccaaagggaaagaaaacaaacccagttatattcattatcagcccgctcaagatcggcttcagccccacctgctcgaaatgctgattcaactgcctgcaaactctgtaacgaaggtatccatccagtttgaacgcgcactcctcaagtggaccgagtataccccggacccaaaccacgggttctatgtttccccatccgtgctttcagcgctcgtgcccagcatggttgcggctaagcccgttgactgggaagagagcccactattcaacagcttgtttcccgtatccgacggatcaaattatttcgtgagattgtacactgaaccgttactggtaaacctacctacacctgacttttctatgccatacaacgtaatttgcctcacttgtacggtcgtggctgtttgttatgggagcttctacaatctgttgacgcgcactttccacattgaggagcctcgtaccggcggactggcaaaacgtctggccaatttgattagacgtgccaggggtgtccccccactgtag

SEQ ID NO: 188570 - protein, 327 aa, Artificial Sequence
  derived and/or modified sequence
MAAAAAMAEQESARNGGRNRGGVQRVEGKLRASVEKGDYYEAHQMYRTLFFRYMSQSKHTEARELMYSGALLFFSHGQQNSAADLSMLVLESLEKAEVEVADELLENLAKVFSLMDPNSPERVTFVSRALKWSSGGSGKLGHPRLHQLLALTLWKEQNYCESRYHFLHSADGEGCANMLVEYSTSRGFRSEVDMFVAQAVLQFLCLKNKSSASVVFTTYTQKHPSIEDGPPFVEPLLNFIWFLLLAVDGGKLTVFTVLCEQYQPSLRRDPMYNEYLDRIGQLFFGVPPKQTSSYGGLLGNLLTSLMGSSEQEDGEESPSDGSPIELD

SEQ ID NO: 188571 - DNA, 984 bp, Artificial Sequence
  derived and/or modified sequence
atggcagcggcggctgccatggcagagcaggaaagtgcaaggaacggtgggagaaatcgcggcggcgttcagcgagtggaaggtaagctcagagcctctgtggaaaaaggagactattatgaggcccaccagatgtaccgaactctctttttcaggtatatgtcacagagtaagcacactgaagcccgtgaactgatgtattcaggagccctgttgtttttcagccacggtcagcaaaactccgccgccgacctctctatgctcgtcctggagagcttggagaaagccgaagtggaggtagctgatgagctattggagaatctcgcaaaggttttctcccttatggatccaaattccccagagagggtgacctttgtttccagggcgcttaagtggagctccggtggttctggcaagttaggacatccgcgcctacatcaattactggctcttacactttggaaggagcagaattactgcgagtctcgctaccattttctgcacagcgctgatggcgagggatgcgccaacatgctggtggagtatagcacttcgagagggttcagatctgaagtcgatatgttcgttgcgcaggccgtcttgcagttcctctgtctgaagaataagtccagcgcctctgtcgtcttcactacttatactcaaaagcatcccagcattgaggatggccctccgtttgttgagccccttcttaatttcatctggttcctgctgctggctgttgatggaggaaagttaaccgtgtttacagtgctttgcgagcagtaccagccttccttgcggagagaccccatgtacaatgagtatctggatagaattggacagctgttttttggcgttccgccgaaacagacctcaagctacggagggttactggggaatctgctcaccagcctcatgggttctagtgaacaggaggatggtgaagaatcacccagtgacggttcccctatcgagctggactag

SEQ ID NO: 188572 - DNA, 2090 bp, Artificial Sequence
  derived and/or modified sequence
gtagaagggcgtcgggcggccgtcgggacggaagccgggaggcgctgccgaccgcgcctgcgacagcgtcagccctgcgcggagcgccggcccgatggcggcggcggcggcgatggccgagcaggagagcgcccggaacggcggccgcaaccgcggcggcgtccagcgtgtggagggcaagctgcgcgccagcgtcgagaagggcgactactacgaggcgcaccagatgtaccggaccctgttcttcaggtacatgtcccagagcaagcacacggaggcccgggagctcatgtactcgggagccctgctcttcttcagccatggccagcaaaacagtgcagcagacttgtccatgctggtcctggagtccctggagaaggcggaagtggaggtggctgacgagctgctggaaaatctggctaaagtgttcagcctgatggaccccaactctcctgagcgcgtgacctttgtgtccagagccctgaagtggtccagtgggggctccgggaagctgggccacccccggctgcaccagctgctggccctcaccctgtggaaagaacaaaactattgtgagtcgaggtatcattttctgcactcagcggacggggagggctgtgccaacatgctggtggagtattccacgtcccgcggcttccgcagcgaggtggacatgttcgtggcccaggccgtgctacagtttctctgtttaaaaaacaaaagtagcgcatcggtggtcttcacgacgtacacccagaagcacccgtccatcgaggacgggcctccgtttgtggagccgctgcttaacttcatctggttcctgctgctggctgtggacggtgggaagctgacggtgttcactgtgctgtgtgagcagtaccagccatccctccggcgggaccccatgtacaacgagtacctcgaccgcataggacagctgttcttcggcgtcccgcccaagcagacgtcttcctacgggggcctgctcgggaaccttctgaccagcctcatgggctcctcagagcaggaggatggggaggagagccccagcgacggcagccccatcgagctggactgaactggccaggccacgtggagacaccacggtcgacgacggctggagggacgtttcagaggcgagtcctgggtggctcctcgccttgggggctcctggccctgaggctggcggtggccgcatgccggcgcgtgtctgtttctgtgcggcggctcagggtggcgcggctgctgctcactgtgctgctgggacccaagagtggggcgtcgcccctgctggccgccgcgtcccccgagattgacccacaataaagcacaggccttaccgcggcgtcaccctctcccactcctttgttctgggtcctttcgggagggctgatgggcagcacaggaggcccgtcctcggggggctgcgcacatcacgctccttgccgggcgtccggcacagctgcggtcaccaaagcaggtgctggccctcggacctgagagcccagccagggcccatgtggtctgcaaatgggagcggctgtttttgaacacggggtcattctgcagtcaggacgaaccggtccccgtcgcagacggagtgcacgtgccctgcgccacatcctcacgctcggtggagggacgcgtgcggcgggacggtgcctacgggtacttgcagctgtgtcccatgtggcatcccagagctgcgccctgctggtctctgtgagcgccacgctgctgtgctggaaatgccgctttaaaaagggataccgtgggactctgcccgtctctttcataacgcaatatttatttgtattgggtgatgattgattctttcgacctaacattttgggttttaaccaaataaccggtccaggagtgagcagctccgttctgtcagatgctactccaaatgttaccagaacgatgacaaaaggggagacgctctattttttcacagttaaatgacagttgtagattgatacgcagttgtgcatgggaaggggaaacgcacagctttatttactgtaaagtggaatttcaggaaggcttgtgtgaaccgttgcgcataaataaaccctttctaccgg

SEQ ID NO: 188573 - DNA, 984 bp, Artificial Sequence
  derived and/or modified sequence
atggctgctgctgctgccatggccgagcaggagagcgccagaaatggaggcaggaacagaggaggagtgcagagggtggagggcaagctgcgggcctctgtggagaagggggactactatgaggcccaccagatgtaccgcaccctcttcttccgctacatgagccagagcaagcacacagaggcccgggagctgatgtacagcggggccctgctcttcttcagccacggccagcagaacagcgctgctgacctgtccatgctggtgctggagagcctggagaaggccgaggtggaggtggctgatgagctgctggagaacctggccaaggtgttcagcctgatggaccccaacagccctgagcgggtgacctttgtgtcccgggccctgaagtggagcagcggcggcagcggcaagctgggccacccccggctgcaccagctgctggccctgaccctgtggaaggagcagaactactgtgagagccgctaccacttcctgcacagcgcagatggagagggctgtgccaacatgctggtggagtacagcaccagccggggcttccgctctgaggtggacatgtttgtggcccaggccgtgctgcagttcctgtgcctgaagaacaagagcagcgcctctgtggtgttcaccacctacacccagaagcaccccagcattgaagatggccccccatttgtggagcccctgctgaacttcatctggttcctgctgctggccgtggatggcggcaagctgactgtgttcaccgtgctgtgtgagcagtaccagcccagcctgcggcgggaccccatgtacaatgagtacctggacagaattggccagctgttcttcggcgtgccccccaagcagaccagcagctatggaggcctgctgggcaacctgctgaccagcctgatgggcagcagcgagcaggaggatggagaggagagccccagtgatggcagccccatcgagctggactag

SEQ ID NO: 188574 - DNA, 984 bp, Artificial Sequence
  derived and/or modified sequence
atggccgccgccgccgccatggccgagcaggagagcgcccggaacggtggaagaaacagaggtggggtccagagggtcgagggcaagcttagagcttctgtggagaagggagattactacgaggcacaccaaatgtatcgcactctgttctttcgatacatgagccagtccaagcacaccgaagctagggagttgatgtattccggggcgctgcttttcttctcccacgggcagcaaaactctgccgctgatctgagcatgctggtgctagaaagtctggagaaggcagaagtagaagtggctgatgagctccttgagaacttagccaaggtattttcactgatggaccccaacagtcccgaacgcgttacctttgtgtctagggctctgaaatggagttccggaggttccggaaaactgggccatccccggctgcaccagttacttgccctgactctgtggaaggagcagaactattgcgagtcccgttaccacttcttgcatagcgccgatggggaagggtgcgcaaatatgttggtggagtacagtacatctagaggtttccgctctgaggtggatatgttcgtggcccaagcggtgctgcagtttctgtgcctgaagaataaatcaagtgcctccgtggtgttcacgacctatacgcagaagcatccaagcatcgaagatggaccgccctttgtggagccactcttaaacttcatttggttcctgcttctggctgtcgacgggggaaaactcacggtcttcacggtgctttgcgagcagtaccagccctccctgcgccgcgatccgatgtacaatgagtaccttgatcggattgggcaattgttttttggagtgccccccaagcagacgtcctcatacggcggcctgctaggtaacctgctgactagtttaatgggcagtagcgaacaagaagatggtgaggagtccccaagcgacggatctcctatcgagctagactag

SEQ ID NO: 188575 - DNA, 984 bp, Artificial Sequence
  derived and/or modified sequence
atggctgcggctgccgctatggccgagcaggagtccgcgaggaacggagggagaaacaggggcggtgttcaacgagttgaagggaagctgcgtgctagtgttgagaagggagactactacgaagctcatcagatgtaccgtacactgtttttccgatacatgagtcagagtaaacacaccgaggctagagagttgatgtactccggtgctctgctgtttttctctcacggacagcagaattccgcagcggaccttagtatgctggtgctggaaagtctggagaaggctgaggtggaagtggctgacgaactgctggaaaatctggctaaggttttcagtctgatggatcctaacagtcctgagagagttacctttgtttcaagagccctgaaatggtcttcgggtggcagtggaaagttgggacatcctcgtttgcatcagctgctcgcactgactctatggaaggaacagaattactgcgaatctcgctaccactttctgcacagcgccgacggtgagggatgtgccaatatgttggtggaatattctacgagtagaggcttccgttctgaagtggacatgtttgtggcacaggcagtactgcagttcctgtgtcttaagaataagtcctctgccagtgtcgtttttacaacatacacccagaagcacccatcgatcgaggatggcccacccttcgtggagccactgctgaattttatctggttcctcctgttagccgtcgatggcggtaaactaacagtgtttaccgttctgtgtgagcagtaccagccaagccttagaagggatcctatgtataatgaatatctggatagaatcgggcagctgttcttcggggtccccccaaagcaaacttcgtcttatggcggactcctggggaacttacttacatctctcatgggcagctcggagcaagaggatggtgaagaatctccgtccgacggctcccctatagagctggactag

SEQ ID NO: 188576 - DNA, 984 bp, Artificial Sequence
  derived and/or modified sequence
atggccgccgccgccgccatggccgagcaggagagcgccagaaacggcggcagaaacagaggcggcgtgcagagagtggagggcaagctgagagccagcgtggagaagggcgactactacgaggcccaccagatgtacagaaccctgttcttcagatacatgagccagagcaagcacaccgaggccagagagctgatgtacagcggcgccctgctgttcttcagccacggccagcagaacagcgccgccgacctgagcatgctggtgctggagagcctggagaaggccgaggtggaggtggccgacgagctgctggagaacctggccaaggtgttcagcctgatggaccccaacagccccgagagagtgaccttcgtgagcagagccctgaagtggagcagcggcggcagcggcaagctgggccaccccagactgcaccagctgctggccctgaccctgtggaaggagcagaactactgcgagagcagataccacttcctgcacagcgccgacggcgagggctgcgccaacatgctggtggagtacagcaccagcagaggcttcagaagcgaggtggacatgttcgtggcccaggccgtgctgcagttcctgtgcctgaagaacaagagcagcgccagcgtggtgttcaccacctacacccagaagcaccccagcatcgaggacggcccccccttcgtggagcccctgctgaacttcatctggttcctgctgctggccgtggacggcggcaagctgaccgtgttcaccgtgctgtgcgagcagtaccagcccagcctgagaagagaccccatgtacaacgagtacctggacagaatcggccagctgttcttcggcgtgccccccaagcagaccagcagctacggcggcctgctgggcaacctgctgaccagcctgatgggcagcagcgagcaggaggacggcgaggagagccccagcgacggcagccccatcgagctggactag

SEQ ID NO: 188577 - protein, 301 aa, Artificial Sequence
  derived and/or modified sequence
MTRHGKNCTAGAVYTYHEKKKDTAASGYGTQNIRLSRDAVKDFDCCCLSLQPCHDPVVTPDGYLYEREAILEYILHQKKEIARQMKAYEKQRGTRREEQKELQRAASQDHVRGFLEKESAIVSRPLNPFTAKALSGTSPDDVQPGPSVGPPSKDKDKVLPSFWIPSLTPEAKATKLEKPSRTVTCPMSGKPLRMSDLTPVHFTPLDSSVDRVGLITRSERYVCAVTRDSLSNATPCAVLRPSGAVVTLECVEKLIRKDMVDPVTGDKLTDRDIIVLQRGGTGFAGSGVKLQAEKSRPVMQA

SEQ ID NO: 188578 - DNA, 906 bp, Artificial Sequence
  derived and/or modified sequence
atgaccagacacggcaagaactgcaccgccggcgccgtgtacacctaccacgagaagaagaaggacaccgccgccagcggctacggcacccagaacatcagactgagcagagacgccgtgaaggacttcgactgctgctgcctgagcctgcagccctgccacgaccccgtggtgacccccgacggctacctgtacgagagagaggccatcctggagtacatcctgcaccagaagaaggagatcgccagacagatgaaggcctacgagaagcagagaggcaccagaagagaggagcagaaggagctgcagagagccgccagccaggaccacgtgagaggcttcctggagaaggagagcgccatcgtgagcagacccctgaaccccttcaccgccaaggccctgagcggcaccagccccgacgacgtgcagcccggccccagcgtgggcccccccagcaaggacaaggacaaggtgctgcccagcttctggatccccagcctgacccccgaggccaaggccaccaagctggagaagcccagcagaaccgtgacctgccccatgagcggcaagcccctgagaatgagcgacctgacccccgtgcacttcacccccctggacagcagcgtggacagagtgggcctgatcaccagaagcgagagatacgtgtgcgccgtgaccagagacagcctgagcaacgccaccccctgcgccgtgctgagacccagcggcgccgtggtgaccctggagtgcgtggagaagctgatcagaaaggacatggtggaccccgtgaccggcgacaagctgaccgacagagacatcatcgtgctgcagagaggcggcaccggcttcgccggcagcggcgtgaagctgcaggccgagaagagcagacccgtgatgcaggcctag

SEQ ID NO: 188579 - DNA, 987 bp, Artificial Sequence
  derived and/or modified sequence
acagttgaagaagcgaccgagggactgggagtcgttagtgaggatgacgcggcatggcaagaactgcaccgcaggggccgtctacacctaccacgagaagaagaaggacacagcggcctcgggctatgggacccagaacattcgactgagccgggatgccgtgaaggacttcgactgctgttgtctctccctgcagccttgccacgatcctgttgtcaccccagatggctacctgtatgagcgtgaggccatcctggagtacattctgcaccagaagaaggagattgcccggcagatgaaggcctacgagaagcagcggggcacccggcgcgaggagcagaaggagcttcagcgggcggcctcgcaggaccatgtgcggggcttcctggagaaggagtcggctatcgtgagccggcccctcaaccctttcacagccaaggccctctcgggcaccagcccagatgatgtccaacctgggcccagtgtgggtcctccaagtaaggacaaggacaaagtgctgcccagcttctggatcccgtcgctgacgcccgaagccaaggccaccaagctggagaagccgtcccgcacggtgacctgccccatgtcagggaagcccctgcgcatgtcggacctgacgcccgtgcacttcacaccgctagacagctccgtggaccgcgtggggctcatcacccgcagcgagcgctacgtgtgtgccgtgacccgcgacagcctgagcaacgccaccccctgcgctgtgctgcggccctctggggctgtggtcaccctcgaatgcgtggagaagctgattcggaaggacatggtggaccctgtgactggagacaaactcacagaccgcgacatcatcgtgctgcagcggggcggtaccggcttcgcgggctccggagtgaagctgcaagcggagaaatcacggccggtgatgcaggcctgagtgtgtgcgggagaccaaataaaccggcttgggtgcgc

SEQ ID NO: 188580 - DNA, 906 bp, Artificial Sequence
  derived and/or modified sequence
atgaccagacacggaaaaaattgtacagccggagcggtgtacacataccacgaaaaaaaaaaagacaccgctgccagtggctacggcacccaaaacatcagactctcacgggatgctgttaaagactttgattgctgctgcttaagcctccagccctgtcatgaccccgttgtgacccccgacgggtatctctatgagagagaagccatacttgagtatatcttgcatcagaagaaagagatcgcaagacagatgaaagcctatgagaaacagaggggcacccgtcgcgaggaacagaaggaactccagcgggctgcctctcaggaccacgttcggggtttcctggaaaaggaaagtgctatcgtttctcgccccctcaacccgttcacagctaaagccctttcaggaacttccccagatgacgtgcagcccgggccctccgtcggccctccttccaaagacaaggacaaagtgctgcccagcttctggattcctagtctgactcccgaggcaaaagcaacaaaactggaaaagccctccaggacagttacgtgccctatgtcggggaagccattgcgcatgagcgacctcacgcccgtgcactttacccctctggacagctctgtggacagagtcggtctgataacacgatcagaacggtatgtgtgtgcagtgacacgcgactctctgtccaacgcgacaccgtgcgccgttctgcgtcctagtggggcggtcgtgaccctcgagtgcgtggaaaaactgattaggaaggatatggtcgaccccgttactggcgacaagctgacggaccgcgacatcatcgttcttcagaggggtggaactggcttcgctggaagtggggtgaagctccaggccgagaaaagtaggccagtgatgcaggcctag

SEQ ID NO: 188581 - DNA, 906 bp, Artificial Sequence
  derived and/or modified sequence
atgacaaggcacggtaagaactgcacagcaggagccgtttatacatatcacgagaaaaaaaaagacacagcggcgtccggctatggcacacagaatattaggctgtcaagggacgccgtgaaggacttcgactgctgctgtttatccctgcaaccctgccacgatcctgtggtgacccctgacggctacctgtacgaaagagaagcgatcctggagtatattctgcaccagaaaaaagaaatcgcccgtcagatgaaagcatatgaaaaacagcgcgggactcgaagagaagagcaaaaagagctgcagagggctgcctcccaggaccatgtgagaggtttcttagaaaaagaatcagccatcgtaagcagacctcttaacccctttactgcgaaggcgctgtctgggactagccctgatgacgtgcagcccggtccttccgttgggccaccatccaaagacaaagataaagtcctcccatccttctggatcccatcactgaccccagaagccaaggcgactaaacttgagaaacctagccgcacggtcacctgccctatgagcggtaaacccctgcggatgagcgatctcacacccgtccattttacacctctagactcgtccgtggaccgagttggactgataacccggagtgaaagatatgtctgcgcagtgacgcgggacagcctaagtaacgcaacaccatgtgccgtgctgagacctagcggtgccgtggtaactctggaatgcgttgagaagctaatccgcaaggacatggtcgaccccgtcaccggcgataagcttactgaccgtgatatcattgtactgcagcgaggcgggaccggcttcgccgggtccggtgtgaagctgcaggcggagaaatctagaccagtaatgcaggcatag

SEQ ID NO: 188582 - DNA, 906 bp, Artificial Sequence
  derived and/or modified sequence
atgacaagacacggaaagaattgcacggccggggcagtatatacttaccatgaaaaaaaaaaggacaccgctgcaagcggttacgggactcagaacatcagactcagtcgagacgctgtgaaagattttgactgctgttgccttagccttcagccctgtcatgacccggttgtgactcccgacggatacctgtatgagcgcgaagctattctagagtatattctgcaccagaaaaaagagatcgccaggcagatgaaggcttatgagaaacagagggggacccgccgggaggaacagaaggagctgcagcgggccgcctcacaagaccacgtacgcggctttttggaaaaggagtccgcaatcgtcagtaggccgctcaacccctttaccgctaaagccctgagtggaacatccccagacgatgtgcagcccgggccttcagtgggcccaccaagcaaggataaagataaagtcctgcctagcttttggattccctcactcacacctgaagccaaggccactaaactggaaaagccttcccgcacggtgacctgtcctatgagcgggaaacccttgagaatgagcgatctaacgccagtccactttactcctttggactcttcagtggatcgtgtgggactcatcacacggagtgaaagatacgtgtgtgccgtaactcgggactctttgagtaacgcgaccccttgcgcagtgctccgcccgtcaggagcggtggtgacactggaatgcgtggagaagttaatacggaaggatatggtggacccggtcacgggcgacaagctgacagatcgggacatcattgtgcttcagcgcgggggaacagggttcgccggcagtggcgtcaagctacaagcggaaaagtcgaggcccgtgatgcaggcgtag

SEQ ID NO: 188583 - DNA, 906 bp, Artificial Sequence
  derived and/or modified sequence
atgaccaggcatggcaagaactgcacagctggagctgtgtacacctaccacgagaagaagaaggacacagctgccagcggctacggcacccagaacatccggctgagcagagatgctgtgaaggactttgactgctgctgcctgagcctgcagccctgccacgaccctgtggtgaccccagatggctacctgtatgagcgggaggccatcctggagtacatcctgcaccagaagaaggagatcgcccggcagatgaaggcctatgagaagcagaggggcacccggcgggaggagcagaaggagctgcagagagctgccagccaggaccacgtgcggggcttcctggagaaggagagcgccatcgtgtcccggcccctgaaccccttcaccgccaaggccctgagcggcaccagcccagatgatgtgcagcccggccccagcgtgggcccccccagcaaggacaaggacaaggtgctgcccagcttctggatccccagcctgaccccagaggccaaggccaccaagctggagaagcccagcaggacagtgacctgccccatgtctgggaagcccctgaggatgtctgacctgacccctgtgcacttcacccccctggacagctctgtggacagagtgggcctcatcaccaggagtgaaagatatgtgtgtgctgtgacccgggacagcctgagcaatgccaccccctgtgctgtgctgcggcccagcggggctgtggtgaccctggagtgtgtggagaagctgatcaggaaggacatggtggaccctgtgactggagacaagctgacagaccgggacatcatcgtgctgcagagaggaggcactggatttgctggcagcggcgtgaagctgcaggccgagaagagcaggcctgtgatgcaggcctag

SEQ ID NO: 188584 - DNA, 1096 bp, Artificial Sequence
  derived and/or modified sequence
aagcgaccgagggactgggagtcgttagtgagagtttcactcttgttgcctaggctggagtgcaatggtgcgatcttggctcatcacgaccttcgcctcccaggttcaagtgattgtcccatttcagcctcccgagtagctgggattacaggatgacgcggcatggcaagaactgcaccgcaggggccgtctacacctaccacgagaagaagaaggacacagcggcctcgggctatgggacccagaacattcgactgagccgggatgccgtgaaggacttcgactgctgttgtctctccctgcagccttgccacgatcctgttgtcaccccagatggctacctgtatgagcgtgaggccatcctggagtacattctgcaccagaagaaggagattgcccggcagatgaaggcctacgagaagcagcggggcacccggcgcgaggagcagaaggagcttcagcgggcggcctcgcaggaccatgtgcggggcttcctggagaaggagtcggctatcgtgagccggcccctcaaccctttcacagccaaggccctctcgggcaccagcccagatgatgtccaacctgggcccagtgtgggtcctccaagtaaggacaaggacaaagtgctgcccagcttctggatcccgtcgctgacgcccgaagccaaggccaccaagctggagaagccgtcccgcacggtgacctgccccatgtcagggaagcccctgcgcatgtcggacctgacgcccgtgcacttcacaccgctagacagctccgtggaccgcgtggggctcatcacccgcagcgagcgctacgtgtgtgccgtgacccgcgacagcctgagcaacgccaccccctgcgctgtgctgcggccctctggggctgtggtcaccctcgaatgcgtggagaagctgattcggaaggacatggtggaccctgtgactggagacaaactcacagaccgcgacatcatcgtgctgcagcggggcggtaccggcttcgcgggctccggagtgaagctgcaagcggagaaatcacggccggtgatgcaggcctgagtgtgtgcgggagaccaaataaaccggcttgggtgcgc

SEQ ID NO: 188585 - DNA, 906 bp, Artificial Sequence
  derived and/or modified sequence
atgacccggcacggcaagaactgcaccgccggcgccgtgtacacctatcacgaaaagaaaaaagataccgctgccagcgggtacgggacccagaacattagactctcgagggatgcggtgaaagattttgactgttgctgtctgtccttgcaaccatgccacgaccctgtagtgacaccggatggatatctatatgagagagaggcaatcctggagtatattttgcaccagaagaaggagatcgcccgccagatgaaagcttatgagaagcagcgaggcactcgacgagaggaacagaaggaactgcaacgcgccgcatcacaggatcatgttaggggcttcctggagaaggaatcagctatcgtctctagaccacttaacccttttacagccaaggccctgagcggtacgtccccggacgacgtgcagcctggaccaagcgtggggccgccgtccaaggataaggataaggtgttgcctagtttttggataccctctctcaccccagaagccaaggcaaccaagcttgaaaagccttcaaggactgtgacctgcccgatgtccggaaaacccctgcggatgtctgacctaacacctgtccacttcacgccactggattcctccgtggatagggtgggtctgatcacacggagcgagcgatatgtttgcgcagtgaccagagactctctctccaatgctacaccatgtgccgtcctcaggccaagcggcgctgtcgtaaccctggagtgcgtagagaaactcatacgcaaggatatggttgacccagttaccggtgataagttaacagatcgcgacatcattgttctgcagaggggaggtactgggttcgcaggatcgggagtcaaacttcaggctgagaagagccgccccgtgatgcaggcatag

SEQ ID NO: 188586 - DNA, 906 bp, Artificial Sequence
  derived and/or modified sequence
atgacccggcacggcaagaactgcaccgccggcgccgtgtacacctaccatgagaagaagaaagacactgccgccagtggctatggaactcagaatatccgccttagtcgcgatgcagtgaaagatttcgactgctgctgtctttcactacaaccatgtcatgatcctgtggtgacaccagacggctacctgtacgaaagggaagctatcctagaatacatcctacaccagaagaaagagattgccagacagatgaaggcctatgagaagcagagagggacacgccgggaggagcagaaagagctacaaagagcagcaagtcaggatcatgtgagaggctttctggagaaggagtctgccattgtgtccagacccctcaatccctttactgcgaaggcactgtccggcacatctccagacgatgttcagcctggcccaagtgtaggaccaccttctaaggacaaggacaaggtccttccatctttctggatcccctctctgacaccggaagccaaggcaacaaagctggaaaaaccctccagaacagttacgtgccctatgtcaggcaagccactgcgcatgtccgatctgacgccagtgcatttcacccccctagacagctcagtggatcgagtgggcctaataacaagaagtgagcgctatgtttgtgccgtgactcgcgattctttatctaatgcgactccttgcgcagtactgaggcctagcggtgctgtggtcacccttgagtgcgtggagaaattgatcagaaaggacatggttgatccagtgactggtgacaaattgacagatcgggacatcatagttcttcagcgaggcggaaccgggttcgctgggagcggggtcaagctgcaggccgagaagtctcgaccagtcatgcaagcctag

SEQ ID NO: 188587 - DNA, 906 bp, Artificial Sequence
  derived and/or modified sequence
atgacccggcacggcaagaactgcaccgccggcgccgtgtacacctatcacgaaaagaagaaagacaccgcggcctctgggtacgggacccagaacatccgtctgtcccgggacgctgtgaaagactttgattgctgttgcctgtctctgcagccatgccatgatcctgtggtcacaccagacggctacttatatgagcgggaggcgattctggaatacattttacatcaaaagaaggagattgcacgacagatgaaggcctatgaaaagcagagaggcacgaggagagaagagcagaaggagctgcaacgcgctgcctctcaagaccatgttagaggatttctggagaaagaaagcgccatcgttagccgccccttaaacccattcacagccaaagccttgtcaggaacttcccctgacgacgtccagcctggaccatctgtgggcccaccttccaaagacaaagacaaggtgctcccttcgttttggattccgagcctgactcccgaggccaaagccaccaagttagagaagccttcaaggaccgttacctgtcctatgagcggtaagccactgcgcatgtccgacttgacccccgtccatttcacccctttggactcttccgtagaccgagttggcctgattactcgttccgagcgatatgtctgcgcggttactcgtgattccctaagcaacgctacgccttgcgcggtacttagaccttctggcgcggtggtgaccctggaatgcgtggagaagctgatcaggaaagatatggtggatccagtgaccggagataagctgaccgacagagatatcatcgtacttcagcggggtgggactggattcgcaggttccggcgtgaaattgcaggcagaaaagtctagacccgtgatgcaggcttag

SEQ ID NO: 188588 - DNA, 906 bp, Artificial Sequence
  derived and/or modified sequence
atgacaagacatggcaagaattgtactgctggggcagtgtatacgtatcacgagaagaaaaaggacactgccgcatctggctacggaacacagaacattcgactcagtcgtgacgccgtgaaggacttcgattgttgctgtctgtcactgcagccgtgtcacgatcccgtcgtaacacccgacggatatctctacgaacgggaggcaatcctggagtacattctccaccaaaaaaaggaaattgccagacaaatgaaggcctatgaaaaacagcggggaacaaggagagaagagcagaaggagttgcaaagagctgcgtctcaggaccatgtcaggggcttcctagagaaggagtccgccattgtttcacgccctctcaacccctttactgcaaaagcattaagcggtaccagccccgatgacgtccaacccggtccctccgtagggcctccaagcaaagacaaggataaagtactaccgtcattctggatccctagtctgaccccagaggcaaaggctacaaagctcgaaaaacctagccgcaccgttacttgtccaatgagcggtaaaccattgagaatgtctgaccttactccagtgcacttcactccactcgactcaagcgttgaccgtgtggggctgattaccaggagcgagagatacgtgtgtgctgtgactcgagattcgttgtctaacgccacaccttgcgcggtactcagacctagcggtgccgtggtgaccctggagtgcgttgagaaacttatacgcaaggacatggttgatccagttacaggggataaactgaccgatagagatatcattgtactgcagcgcggaggtaccggattcgctgggagtggggtcaagctccaggccgagaaatcccggcctgtgatgcaagcctag

SEQ ID NO: 188589 - DNA, 906 bp, Artificial Sequence
  derived and/or modified sequence
atgacgaggcacggcaagaattgtaccgccggagctgtttacacgtatcatgagaagaaaaaagataccgccgcttccgggtacggcacacagaacatacggcttagcagggacgccgtcaaagactttgattgttgctgtttaagcctacaaccatgccacgaccccgtggtcacccccgacggttatctctacgagagggaagccatccttgagtatatactgcatcaaaaaaaagagatcgcacgccagatgaaagcttacgaaaagcagagaggtactaggcgagaagagcagaaggagctccagagggcagcctcccaggatcacgtgaggggtttcctagagaaagagtctgcaatcgtgagccggccactcaatccgtttacggcgaaggcactttctgggacctcccccgacgacgtgcagcctgggccatcagttggacctcctagtaaggacaaagacaaggttctgccatccttctggattccaagccttactcctgaagctaaggcaactaagctggagaaaccaagcagaacagtgacatgtcccatgagtggtaaaccactgaggatgtccgatctcacccccgtgcacttcacacctctggattcatcagtagacagagtcgggttgataacgcggtctgagaggtacgtctgtgccgtaacccgcgactccctctccaacgctacgccttgcgccgtcctcaggccatctggggcagtcgttactttagaatgcgtggagaagctgattagaaaggacatggttgaccccgtaactggggacaaactgactgacagggatattatagtcctgcagcggggagggacgggattcgccggttctggagttaaactccaggcagaaaaatcacgccctgtaatgcaggcctag

SEQ ID NO: 188590 - DNA, 906 bp, Artificial Sequence
  derived and/or modified sequence
atgacaagacatgggaagaattgcaccgctggggcagtgtatacataccacgaaaaaaaaaaggacacagccgcttctggatatggcacccagaatattaggttgagtcgggacgccgtgaaggatttcgactgttgttgcctctcgctgcagccgtgtcatgatcctgtggtgacacctgatggatatctgtacgaaagggaagccattttggaatacatcttgcatcagaagaaagaaatcgcccgacagatgaaggcatatgaaaagcagcgagggacccgcagggaagagcagaaagagcttcagcgcgctgctagccaggatcatgtgcgcggattccttgaaaaggaatccgctatagtgtcccggccacttaacccgtttacagcaaaggctctttctggaacttctcccgatgatgttcagcccggacccagcgtcggtcctccgtctaaagataaagacaaggtactgccaagtttctggatcccctccttgactcctgaggccaaggcgacaaagttggaaaagccttccagaaccgtaacctgtcccatgagcggaaaaccactaagaatgagcgacttgactcccgtgcacttcacgcctttggactcatctgttgatagggtaggcctcataactcgctcagaacggtatgtgtgtgcagtgacaagagactccttgtctaatgctaccccctgcgccgtcctgagacctagcggagccgtggtgaccttggagtgcgtggaaaaattgatcaggaaggacatggttgatcctgtgacaggagataagttaactgatagggatattatcgtacttcagcgcggaggcacaggttttgcaggttccggcgtcaagttacaggccgaaaagtcaaggcctgtcatgcaagcctag

SEQ ID NO: 188591 - DNA, 1005 bp, Artificial Sequence
  derived and/or modified sequence
tttccggtgtcggggcacagttgaagaagcgaccgagggactgggagtcgttagtgaggatgacgcggcatggcaagaactgcaccgcaggggccgtctacacctaccacgagaagaagaaggacacagcggcctcgggctatgggacccagaacattcgactgagccgggatgccgtgaaggacttcgactgctgttgtctctccctgcagccttgccacgatcctgttgtcaccccagatggctacctgtatgagcgtgaggccatcctggagtacattctgcaccagaagaaggagattgcccggcagatgaaggcctacgagaagcagcggggcacccggcgcgaggagcagaaggagcttcagcgggcggcctcgcaggaccatgtgcggggcttcctggagaaggagtcggctatcgtgagccggcccctcaaccctttcacagccaaggccctctcgggcaccagcccagatgatgtccaacctgggcccagtgtgggtcctccaagtaaggacaaggacaaagtgctgcccagcttctggatcccgtcgctgacgcccgaagccaaggccaccaagctggagaagccgtcccgcacggtgacctgccccatgtcagggaagcccctgcgcatgtcggacctgacgcccgtgcacttcacaccgctagacagctccgtggaccgcgtggggctcatcacccgcagcgagcgctacgtgtgtgccgtgacccgcgacagcctgagcaacgccaccccctgcgctgtgctgcggccctctggggctgtggtcaccctcgaatgcgtggagaagctgattcggaaggacatggtggaccctgtgactggagacaaactcacagaccgcgacatcatcgtgctgcagcggggcggtaccggcttcgcgggctccggagtgaagctgcaagcggagaaatcacggccggtgatgcaggcctgagtgtgtgcgggagaccaaataaaccggcttgggtgcgcaa

SEQ ID NO: 188592 - protein, 318 aa, Artificial Sequence
  derived and/or modified sequence
MSAHNRGTELDLSWISKIQVNHPAVLRRAEQIQARRTVKKEWQAAWLLKAVTFIDLTTLSGDDTSSNIQRLCYKAKYPIREDLLKALNMHDKGITTAAVCVYPARVCDAVKALKAAGCNIPVASVAAGFPAGQTHLKTRLEEIRLAVEDGATEIDVVINRSLVLTGQWEALYDEIRQFRKACGEAHLKTILATGELGTLTNVYKASMIAMMAGSDFIKTSTGKETVNATFPVAIVMLRAIRDFFWKTGNKIGFKPAGGIRSAKDSLAWLSLVKEELGDEWLKPELFRIGASTLLSDIERQIYHHVTGRYAAYHDLPMS

SEQ ID NO: 188593 - protein, 163 aa, Artificial Sequence
  derived and/or modified sequence
MHDKGITTAAVCVYPARVCDAVKALKAAGCNIPVASVAAGFPAGQTHLKTRLEEIRLAVEDGATEIDVVINRSLVLTGQWEALYDEIRQFRKACGEAHLKTILATGELGTLTNVYKASMIAMMAGSDFIKTSTGKETVNATFPVAIVMLRAIRDFFWKTGNKV

SEQ ID NO: 188594 - DNA, 957 bp, Artificial Sequence
  derived and/or modified sequence
atgagcgcccacaacagaggcaccgagctggacctgagctggatcagcaagatccaggtgaaccaccccgccgtgctgagaagagccgagcagatccaggccagaagaaccgtgaagaaggagtggcaggccgcctggctgctgaaggccgtgaccttcatcgacctgaccaccctgagcggcgacgacaccagcagcaacatccagagactgtgctacaaggccaagtaccccatcagagaggacctgctgaaggccctgaacatgcacgacaagggcatcaccaccgccgccgtgtgcgtgtaccccgccagagtgtgcgacgccgtgaaggccctgaaggccgccggctgcaacatccccgtggccagcgtggccgccggcttccccgccggccagacccacctgaagaccagactggaggagatcagactggccgtggaggacggcgccaccgagatcgacgtggtgatcaacagaagcctggtgctgaccggccagtgggaggccctgtacgacgagatcagacagttcagaaaggcctgcggcgaggcccacctgaagaccatcctggccaccggcgagctgggcaccctgaccaacgtgtacaaggccagcatgatcgccatgatggccggcagcgacttcatcaagaccagcaccggcaaggagaccgtgaacgccaccttccccgtggccatcgtgatgctgagagccatcagagacttcttctggaagaccggcaacaagatcggcttcaagcccgccggcggcatcagaagcgccaaggacagcctggcctggctgagcctggtgaaggaggagctgggcgacgagtggctgaagcccgagctgttcagaatcggcgccagcaccctgctgagcgacatcgagagacagatctaccaccacgtgaccggcagatacgccgcctaccacgacctgcccatgagctag

SEQ ID NO: 188595 - DNA, 492 bp, Artificial Sequence
  derived and/or modified sequence
atgcacgacaagggcatcaccaccgccgccgtgtgcgtgtaccccgccagagtgtgcgacgccgtgaaggccctgaaggccgccggctgcaacatccccgtggccagcgtggccgccggcttccccgccggccagacccacctgaagaccagactggaggagatcagactggccgtggaggacggcgccaccgagatcgacgtggtgatcaacagaagcctggtgctgaccggccagtgggaggccctgtacgacgagatcagacagttcagaaaggcctgcggcgaggcccacctgaagaccatcctggccaccggcgagctgggcaccctgaccaacgtgtacaaggccagcatgatcgccatgatggccggcagcgacttcatcaagaccagcaccggcaaggagaccgtgaacgccaccttccccgtggccatcgtgatgctgagagccatcagagacttcttctggaagaccggcaacaaggtgtag

SEQ ID NO: 188596 - DNA, 957 bp, Artificial Sequence
  derived and/or modified sequence
atgtccgcacacaaccggggcaccgagttagaccttagttggatatctaaaatccaggtgaatcacccagctgtcctgcggagagcagagcagatccaggcaagacgcacggtaaagaaggaatggcaggccgcttggttattgaaggccgtgacattcatcgatcttactactctgtcaggcgatgacacttcgagcaatattcagcgattatgttacaaagcaaaatatccaatccgcgaagacttattaaaagcactcaatatgcacgacaagggtattactactgctgccgtatgcgtctatcccgcaagagtatgtgacgcggtcaaagctctgaaagctgcagggtgcaacattcctgtggcctcggtggccgccggattccctgctggccaaactcacctcaagactagattagaggaaattcgcctcgcagtggaggacggggctactgagatcgacgtcgtgattaaccggagtcttgtcctgactggccagtgggaagccctgtacgatgagattcggcagtttagaaaggcctgtggggaggcccacctcaagactatcctggccacgggggagcttgggaccctcacaaatgtttacaaagcgagcatgatcgctatgatggcaggcagcgacttcatcaagacctcaacaggaaaggaaactgtaaatgccacattcccagtggcgatcgttatgctgcgcgctatcagggacttcttctggaaaactggaaataagatcgggtttaagcccgcaggcgggatacgctctgcaaaggacagcctggcttggctgtctctggttaaagaggagctgggtgacgagtggctgaagcctgagttgtttcgaattggagcgtcaacgcttctgtccgatatcgaacgacaaatataccatcacgtgaccggcaggtacgctgcttatcacgatctgcctatgtcctag

SEQ ID NO: 188597 - DNA, 492 bp, Artificial Sequence
  derived and/or modified sequence
atgcatgataagggcattaccaccgccgccgtgtgcgtgtatccggcgagggtatgtgatgccgttaaagctctgaaagccgcagggtgtaatattccagttgctagtgtggcagccgggttccctgcgggtcagacccatttaaagaccaggctggaagagatacggctcgctgtcgaggatggagcaacggaaatagacgtcgtgatcaaccggtccttggtgctgactggccaatgggaagcactgtatgacgagatacgccaattccggaaagcctgcggtgaggcccatctgaagaccatactggctactggcgaactggggacactgacaaatgtgtacaaagcttctatgattgccatgatggcaggttctgacttcattaagacatccactgggaaagaaaccgtgaacgctacctttccagtcgctattgtgatgctgagagcgataagagatttcttttggaagaccggtaataaggtttag

SEQ ID NO: 188598 - DNA, 957 bp, Artificial Sequence
  derived and/or modified sequence
atgtctgcccacaacagaggaacagagctggacctgtcctggatcagcaagatccaggtgaaccaccctgctgtgctgcggcgggcagagcagatccaggccaggagaacagtgaagaaggagtggcaggccgcctggctgctgaaggctgtgaccttcatcgacctgaccaccctgtctggagatgacaccagcagcaacatccagaggctgtgctacaaggccaagtaccccatccgggaggacctgctgaaggccctgaacatgcatgacaagggcatcaccacagctgctgtgtgtgtgtacccagcccgggtgtgtgatgctgtgaaggccctgaaggccgccggctgcaacatccctgtggcctctgtggccgccggcttccctgctggccagacccacctgaagacccggctggaggagatccggctggccgtggaggatggagccacagaaattgatgtggtgatcaacagaagcctggtgctgaccggccagtgggaggccctgtatgatgagatccggcagttcaggaaggcctgtggggaggcccacctgaagaccatcctggccactggagagctgggcaccctgaccaacgtgtacaaggcctccatgattgccatgatggccggcagtgacttcatcaagaccagcacaggcaaggagaccgtgaatgccaccttccctgtggccatcgtgatgctgcgggccatccgggacttcttctggaagacaggcaacaagattggcttcaagccagctgggggcatccgcagcgccaaggacagcctggcctggctgagcctggtgaaggaggagctgggagatgagtggctgaagccagagctgttccgcatcggggccagcaccctgctgagtgacatcgagcggcagatctaccaccacgtgacaggccgctatgctgcctaccatgacctgcccatgtcctag

SEQ ID NO: 188599 - DNA, 492 bp, Artificial Sequence
  derived and/or modified sequence
atgcatgacaagggcatcaccacagctgctgtgtgtgtgtacccagcccgggtgtgtgatgctgtgaaggccctgaaggccgccggctgcaacatccctgtggcctctgtggccgccggcttccctgctggccagacccacctgaagacccggctggaggagatccggctggccgtggaggatggagccacagaaattgatgtggtgatcaacagaagcctggtgctgaccggccagtgggaggccctgtatgatgagatccggcagttcaggaaggcctgtggggaggcccacctgaagaccatcctggccactggagagctgggcaccctgaccaacgtgtacaaggcctccatgattgccatgatggccggcagtgacttcatcaagaccagcacaggcaaggagaccgtgaatgccaccttccctgtggccatcgtgatgctgcgggccatccgggacttcttctggaagacaggcaacaaggtgtag

SEQ ID NO: 188600 - DNA, 957 bp, Artificial Sequence
  derived and/or modified sequence
atgagcgcccacaaccggggcaccgagctggacctgagctggatctcgaaaatccaggttaaccatcccgccgtccttagacgggctgagcagattcaagcacgtcgcaccgtgaaaaaggaatggcaagccgcatggctcttgaaagccgttactttcatcgacctaaccacgctgtcaggcgatgacacaagttctaatatccagagactatgttacaaagccaagtaccctatccgggaagaccttttaaaggctcttaacatgcacgataagggtatcaccaccgctgccgtttgcgtctatcctgcaagagtgtgtgatgctgttaaagcccttaaagcagccggatgtaatataccagtggcttcagtcgctgctggcttccctgctggacagactcacctgaagactcgtttagaggaaatccgactcgccgtagaggatggagctactgagatcgacgttgtcatcaaccgctcactggtgctgacagggcagtgggaggccttgtacgatgagatcaggcaattcaggaaagcatgtggggaggcccacctcaagacaattctggctaccggggagcttgggacgttgactaacgtgtataaggctagcatgatcgcaatgatggccggctcagattttataaagacgagcaccggcaaggaaacggtgaatgcaacttttcctgttgctatcgtgatgttgcgtgccattcgtgattttttctggaagactggaaataagatcggctttaaacctgcgggaggcattaggagcgctaaagattctttggcctggttatccttagtgaaagaagagctgggagacgagtggttgaaaccagaactcttcagaattggggcgtccaccctgctgagcgacatagagcgtcagatttaccatcatgtgaccgggcgatacgccgcttaccacgatctccccatgtcgtag

SEQ ID NO: 188601 - DNA, 492 bp, Artificial Sequence
  derived and/or modified sequence
atgcacgacaagggcatcaccaccgccgccgtgtgcgtgtaccccgctcgagtttgtgacgcggtgaaggccctaaaagctgctggctgcaatatacccgtggcgagcgttgctgccggatttcctgctggtcagacccatttgaagacacggttggaagagatccgtctggcagtggaagacggtgccaccgaaattgacgtagtgatcaacaggtcgttagtgttaactggccagtgggaagccctgtatgacgaaattaggcagtttcggaaggcttgtggggaagcccaccttaagactatccttgccacaggcgagctgggtactttgacaaatgtgtacaaggccagcatgatcgccatgatggctgggtcagatttcatcaagacaagcacagggaaggaaacggttaacgccacattcccggtagccatcgtgatgctgcgcgcaataagagatttcttctggaagacgggcaacaaagtgtag

SEQ ID NO: 188602 - DNA, 957 bp, Artificial Sequence
  derived and/or modified sequence
atgagcgcacacaatcgcggtactgagctggacttgagctggatttccaagatccaggtgaatcacccagcagtcctccggagggcagaacagattcaagccagaagaactgttaaaaaggaatggcaggccgcttggttgcttaaggccgtgacttttatagatctcacaaccctttctggtgatgacacatctagcaatattcagcggctgtgctataaggccaagtaccctatcagggaggacctgctgaaggccctgaacatgcacgataaaggcattactaccgctgccgtgtgcgtgtaccctgcaagagtttgtgatgcagttaaagccttgaaagcggcaggatgtaacatccccgtggcctcagtcgccgcagggtttcccgcaggtcagacgcatctgaagaccaggctggaggaaataagacttgcagttgaggacggggctaccgagatcgacgtagtgatcaatcgtagcctggtgctcaccggtcagtgggaagcactctatgatgagatccgtcagtttcgcaaggcctgcggcgaggcccaccttaaaaccattctcgccactggagaactgggaacactgaccaacgtctacaaggcttcaatgattgctatgatggcgggttctgactttatcaaaacctcaactggaaaggagacggttaacgcaaccttccctgtggcgattgtgatgctacgcgcaatcagggacttcttctggaagaccggaaataagattggctttaaacctgctggcggtattcggtccgctaaagatagccttgcctggctgagcctcgtgaaagaagagctgggtgacgaatggttaaagcccgagttatttaggatcggcgcttccactttgctttcagacatagagaggcagatttatcaccatgtgaccgggagatatgcagcgtatcatgatctgcctatgagttag

SEQ ID NO: 188603 - DNA, 1709 bp, Artificial Sequence
  derived and/or modified sequence
ggtacctcgtggagaagacgggggaggggagcagcgagatttccttgcggagcaatattcctagggtacagacctcgtagcccgggcccgcgactccgccccgggagcgggcaggggcggggcgagcgctccagctggcgggaaggaggaagggccgggcgcggcgcagaggcgggcgcctaccagccggcagctccggagctgcccgcgccatgtccgcgcacaatcggggcaccgagctcgaccttagctggatctccaaaatacaagtgaatcacccggcagttctgaggcgtgcggaacaaatccaggctcgcagaaccgtgaaaaaggagtggcaggctgcttggctcctgaaagctgttacctttatagatcttactacactttcaggtgatgatacatcttccaacattcaaaggctctgttataaagccaaatacccaatccgggaagatctcttaaaagctttaaatatgcatgataaaggcattactacagccgccgtttgtgtttatcccgcccgggtgtgtgatgctgtaaaagcactcaaggctgcaggctgtaatatccctgtggcatcagtggccgctggatttccagctggacagactcatttgaagacacgattagaagagatcagattggctgtggaagatggagctacagaaatcgacgtggtaattaacagaagcttggtgctgacaggccagtgggaagccctgtatgatgagattcgtcagtttcgcaaggcctgtggggaggctcatcttaaaactatattagcgacaggagaacttggaactcttactaatgtctataaagccagtatgatagcaatgatggcaggatcagattttattaagacctctactggaaaagaaacagtaaatgccaccttcccggtagctatagtaatgctgcgggccattagagatttcttctggaaaactggaaacaagatagggtttaaaccagcaggaggcatccgcagtgcaaaggattcccttgcttggctctctcttgtaaaggaggagcttggagatgagtggctgaagccagaactctttcgaataggtgccagtactctgctctcggacattgagaggcagatttaccatcatgtgactggaagatatgcagcttatcatgatcttccaatgtcttaaatcagtcaccagttccagaaaagttctttacgacaatgtttaaaaattatttttctacgtaattgctaaaattatttaattaaaaaattgggcagtaggtaactggcattcctctctttaaaatttctaccgaacttaatggaatggaaaaagcaaactcatccacatgtggtactcatttcaggcacatctgaaatgatcttaattactagaagatctgcactattaactttgtgaagagtttctcctaaaaactttaagtaaaatgttaatggtagctttgataacatcaaattctaagggagaaaaaaacaatattaaaccgcccaagcagtgtgccctagcagaggaaaatgcaacatctcgcaagcgctgctgtaacgacttcaggagtcactgattcagcactaatttcctgctgtgaaaactcatctttcatttttgccgtggataggcgcttttattaattgttgtcctaatgaaatttctgacattgtcatatacaacgatgaatatcattaaaatttttaaaataataaa

SEQ ID NO: 188604 - DNA, 492 bp, Artificial Sequence
  derived and/or modified sequence
atgcacgacaaaggcatcactaccgccgcagtgtgcgtgtatcccgctcgcgtctgcgacgccgtgaaagccttaaaagcagccggatgtaacatcccggtcgcgagtgtagcagccggattccctgctggtcagacacatctcaagacccggctcgaggagattcgattagctgttgaggacggtgcgactgagatcgacgtggttatcaatcggtcgcttgtcctgaccggacagtgggaggccctgtacgacgaaattaggcaattccgaaaggcctgcggtgaggcccatttgaaaacaatcttggctaccggtgaactgggcaccttgaccaatgtatacaaagcgagtatgattgcaatgatggcaggctcggattttattaagacatccacaggcaaggaaacggttaatgcaactttccccgtcgccatagtgatgctccgggctattcgggatttcttctggaagacgggcaacaaagtttag

SEQ ID NO: 188605 - DNA, 819 bp, Artificial Sequence
  derived and/or modified sequence
tgcctgacattgtgtagctgtatcaggctggctttctggaatagctcagtggccaaagattgatcacgaagggtttagagctgtgaaaatgccccagaccttagctggatctccaaaatacaagtgaatcacccggcagttctgaggcgtgcggaacaaatccaggctcgcagaaccgtgaaaaaggagtggcaggctgcttggctcctgaaagctgttacctttatagatcttactacactttcaggtgatgatacatcttccaacattcaaaggctctgttataaagccaaatacccaatccgggaagatctcttaaaagctttaaatatgcatgataaaggcattactacagccgccgtttgtgtttatcccgcccgggtgtgtgatgctgtaaaagcactcaaggctgcaggctgtaatatccctgtggcatcagtggccgctggatttccagctggacagactcatttgaagacacgattagaagagatcagattggctgtggaagatggagctacagaaatcgacgtggtaattaacagaagcttggtgctgacaggccagtgggaagccctgtatgatgagattcgtcagtttcgcaaggcctgtggggaggctcatcttaaaactatattagcgacaggagaacttggaactcttactaatgtctataaagccagtatgatagcaatgatggcaggatcagattttattaagacctctactggaaaagaaacagtaaatgccaccttcccggtagctatagtaatgctgcgggccattagagatttcttctggaaaactggaaacaaggta

SEQ ID NO: 188606 - protein, 242 aa, Artificial Sequence
  derived and/or modified sequence
MSGCDAREGDCCSRRCGAQDKEHPRYLIPELCKQFYHLGWVTGTGGGISLKHGDEIYIAPSGVQKERIQPEDMFVCDINEKDISGPSPSKKLKKSQCTPLFMNAYTMRGAGAVIHTHSKAAVMATLLFPGREFKITHQEMIKGIKKCTSGGYYRYDDMLVVPIIENTPEEKDLKDRMAHAMNEYPDSCAVLVRRHGVYVWGETWEKAKTMCECYDYLFDIAVSMKKVGLDPSQLPVGENGIV

SEQ ID NO: 188607 - DNA, 729 bp, Artificial Sequence
  derived and/or modified sequence
atgtcaggttgtgatgctcgtgagggggactgctgctcaaggagatgcggggcccaggacaaagagcacccaagatatctcattcctgaattgtgtaaacagttttatcacctggggtgggtcactggtactgggggcggcatctcccttaaacacggtgacgagatctatatcgccccatctggggtacagaaggagagaattcagccggaggacatgtttgtgtgcgatatcaatgaaaaagatatcagcggcccttcacccagtaagaaattgaaaaaaagccagtgtacaccactgttcatgaacgcctataccatgaggggcgccggggcggtcatccatactcattcgaaggccgccgtgatggctaccttgttattcccggggcgcgagtttaagatcactcaccaggagatgatcaaagggattaaaaaatgcacctcaggtgggtattatcggtacgacgacatgctggtcgtaccaatcattgaaaacacgccggaagagaaagacctcaaggaccgaatggctcacgctatgaatgaatacccagatagctgtgctgtgctcgttaggcgtcacggtgtttacgtctggggcgagacttgggaaaaggccaagaccatgtgtgagtgctacgattacctttttgacattgcggtgtccatgaaaaaggtggggctcgacccatcacagctcccagtgggtgagaacggcattgtttag

SEQ ID NO: 188608 - DNA, 729 bp, Artificial Sequence
  derived and/or modified sequence
atgagcggctgtgatgcccgggagggggactgctgcagccgccgctgtggggcccaggacaaggagcacccccgctacctgatccctgagctgtgcaagcagttctaccacctgggctgggtgacaggcaccggcggcggcatcagcctgaagcatggagatgagatctacatcgcccccagcggcgtgcagaaggagcgcatccagcctgaggacatgtttgtgtgtgacatcaatgagaaggacatcagcggccccagccccagcaagaagctgaagaagagccagtgcacccccctcttcatgaatgcctacaccatgagaggagctggggccgtcatccacacccacagcaaggctgctgtgatggccaccctgctcttccctggccgggagttcaagatcacccaccaggagatgatcaagggcatcaagaagtgcaccagcggcggctactaccgctatgatgacatgctggtggtgcccatcatcgagaacaccccagaggagaaggacctgaaggacaggatggcccacgccatgaatgagtacccagacagctgtgctgtgctggtgagaagacatggagtgtatgtgtggggcgagacctgggagaaggccaagaccatgtgtgagtgctatgactacctgtttgatattgctgtgtccatgaagaaggtgggcctggaccccagccagctgcctgtgggggagaatggaattgtgtag

SEQ ID NO: 188609 - DNA, 729 bp, Artificial Sequence
  derived and/or modified sequence
atgagcggctgcgacgcccgggagggcgactgctgcagccggcggtgcggagcgcaggacaaggagcaccccagatatctgatcccagagctgtgcaaacagttttaccacctgggctgggtgaccggcacaggaggcggcataagtctcaagcacggcgacgaaatttatatcgcacctagtggagttcagaaagagagaatccaaccggaagacatgttcgtgtgtgacatcaatgagaaagacatcagcggtcctagtcccagcaagaagcttaagaagagtcagtgcaccccgctgttcatgaatgcatatactatgcgaggggctggggcagtaatccatactcattcaaaagcggccgtgatggcaacattgctttttcctggaagagagttcaagattactcaccaggaaatgattaagggcatcaagaagtgtacctctggagggtactatagatatgatgacatgctcgtggtacctattatcgagaacacgccagaagagaaggacttgaaagaccggatggcccatgccatgaacgagtatccagacagttgcgccgtgcttgtgcggcggcacggggtgtatgtctggggcgaaacttgggagaaggcgaaaacaatgtgcgaatgctatgactatctgtttgacatcgctgtgagtatgaagaaagtgggactggacccttcccagctgcccgtaggggagaatggcatcgtgtag

SEQ ID NO: 188610 - DNA, 729 bp, Artificial Sequence
  derived and/or modified sequence
atgtctggttgcgacgccagagaaggggactgttgctcaaggaggtgtggggcacaagacaaagagcacccacggtatctgatcccggagctatgtaagcagttctatcacctcggctgggtcacaggaaccggcggagggattagcctgaagcatggggacgagatctacattgctcccagcggggttcaaaaggaaaggatccagccagaggacatgttcgtgtgtgatataaacgagaaagatatcagcggccctagccctagcaagaaactgaagaagtcccagtgtacgccactttttatgaatgcctacaccatgcgtggcgcaggggctgtgatccatactcactcgaaggcggctgtgatggccacccttctttttccaggaagagagtttaaaatcacacaccaagaaatgattaaagggattaaaaaatgcacttctgggggatactataggtacgatgatatgctggtggttcctatcattgaaaacacccccgaggagaaggatttaaaagatcgaatggcgcacgcaatgaatgagtatccagattcctgtgccgtactagtgagacggcacggcgtgtatgtgtggggcgaaacttgggagaaagccaagactatgtgcgagtgttatgattatctctttgacattgccgtcagcatgaagaaagtgggactggatcctagtcagctccccgtcggcgaaaatggtattgtctag

SEQ ID NO: 188611 - DNA, 1366 bp, Artificial Sequence
  derived and/or modified sequence
acgttggccttgcctcccgggaagtcaggtgcgccgctggatatctcagccggcggggccttaccagaccccggcccccgccccgttcgccccgcccccgggctgccctcagcgccgcctgattgcatttgcggcctcgctgccgtatcccaggctaagcgccgcgcgcaaagccgtgcggagattggaggccgcgcgggtccctggtctgggccatgtctggctgtgatgctcgggagggagactgttgttcccggagatgcggcgcgcaggacaaggagcatccaagatacctgatcccagaactttgcaaacagttttaccatttaggctgggtcactgggactggaggaggaattagcttgaagcatggcgatgaaatctacattgctccttcaggagtgcaaaaggaacgaattcagcctgaagacatgtttgtttgtgatataaatgaaaaggacataagtggaccttcgccatcgaagaagctaaaaaaaagccagtgtactcctcttttcatgaatgcttacacaatgagaggagcaggtgcagtgattcatacccactctaaagctgctgtgatggccacacttctctttccaggacgggagtttaaaattacacatcaagagatgataaaaggaataaagaaatgtacttccggagggtattatagatatgatgatatgttagtggtacccattattgagaatacacctgaggagaaagacctcaaagatagaatggctcatgcaatgaatgaatacccagactcctgtgcagtactggtcagacgtcatggagtatatgtgtggggggaaacatgggagaaggccaaaaccatgtgtgagtgttatgactatttatttgatattgccgtatcaatgaagaaagtaggacttgatccttcacagctcccagttggagaaaatggaattgtctaagccaaaagaaagtctaattatatacagagataaagctaaacgtaattattatttaaatgaaagctatttttttaaatgaattgaaatttttcatgatgctactaatttgccactaaatactgcaaatggtcaccctgaatctcttctgacattggatgttatttgcttatattcttataattttaaatgagggcacagtgaaatgaaaattttatactctatgtttctgtttatttttaaatccttaacagcaaaatatttgcctttaatttcttttttatatatactctcagagaattcctcttaatttttaaagatgctggtgataataaaattcattagaaaatttcctcattgtggaatgagcattctcttgttttaatgttggtgtcagaaaataaatatgaaacattaagtccaaa

SEQ ID NO: 188612 - DNA, 729 bp, Artificial Sequence
  derived and/or modified sequence
atgagcggctgcgacgccagagagggcgactgctgcagcagaagatgcggcgcccaggacaaggagcaccccagatacctgatccccgagctgtgcaagcagttctaccacctgggctgggtgaccggcaccggcggcggcatcagcctgaagcacggcgacgagatctacatcgcccccagcggcgtgcagaaggagagaatccagcccgaggacatgttcgtgtgcgacatcaacgagaaggacatcagcggccccagccccagcaagaagctgaagaagagccagtgcacccccctgttcatgaacgcctacaccatgagaggcgccggcgccgtgatccacacccacagcaaggccgccgtgatggccaccctgctgttccccggcagagagttcaagatcacccaccaggagatgatcaagggcatcaagaagtgcaccagcggcggctactacagatacgacgacatgctggtggtgcccatcatcgagaacacccccgaggagaaggacctgaaggacagaatggcccacgccatgaacgagtaccccgacagctgcgccgtgctggtgagaagacacggcgtgtacgtgtggggcgagacctgggagaaggccaagaccatgtgcgagtgctacgactacctgttcgacatcgccgtgagcatgaagaaggtgggcctggaccccagccagctgcccgtgggcgagaacggcatcgtgtag

SEQ ID NO: 188613 - protein, 296 aa, Artificial Sequence
  derived and/or modified sequence
MAVLAPLIALVYSVPRLSRWLAQPYYLLSALLSAAFLLVRKLPPLCHGLPTQREDGNPCDFDWREVEILMFLSAIVMMKNRRSITVEQHIGNIFMFSKVANTILFFRLDIRMGLLYITLCIVFLMTCKPPLYMGPEYIKYFNDKTIDEELERDKRVTWIVEFFANWSNDCQSFAPIYADLSLKYNCTGLNFGKVDVGRYTDVSTRYKVSTSPLTKQLPTLILFQGGKEAMRRPQIDKKGRAVSWTFSEENVIREFNLNELYQRAKKLSKAGDNIPEEQPVASTPTTVSDGENKKDK

SEQ ID NO: 188614 - DNA, 891 bp, Artificial Sequence
  derived and/or modified sequence
atggccgtgctggcccccctgatcgccctggtgtacagcgtgcccagactgagcagatggctggcccagccctactacctgctgagcgccctgctgagcgccgccttcctgctggtgagaaagctgccccccctgtgccacggcctgcccacccagagagaggacggcaacccctgcgacttcgactggagagaggtggagatcctgatgttcctgagcgccatcgtgatgatgaagaacagaagaagcatcaccgtggagcagcacatcggcaacatcttcatgttcagcaaggtggccaacaccatcctgttcttcagactggacatcagaatgggcctgctgtacatcaccctgtgcatcgtgttcctgatgacctgcaagccccccctgtacatgggccccgagtacatcaagtacttcaacgacaagaccatcgacgaggagctggagagagacaagagagtgacctggatcgtggagttcttcgccaactggagcaacgactgccagagcttcgcccccatctacgccgacctgagcctgaagtacaactgcaccggcctgaacttcggcaaggtggacgtgggcagatacaccgacgtgagcaccagatacaaggtgagcaccagccccctgaccaagcagctgcccaccctgatcctgttccagggcggcaaggaggccatgagaagaccccagatcgacaagaagggcagagccgtgagctggaccttcagcgaggagaacgtgatcagagagttcaacctgaacgagctgtaccagagagccaagaagctgagcaaggccggcgacaacatccccgaggagcagcccgtggccagcacccccaccaccgtgagcgacggcgagaacaagaaggacaagtag

SEQ ID NO: 188615 - DNA, 891 bp, Artificial Sequence
  derived and/or modified sequence
atggctgtgttggctccccttatcgctctcgtttactcagtaccacgcttgagccgttggctggcccagccctactacctgctcagtgctctgctgagcgcagcttttctgttggtcaggaagcttccgcctctgtgccatggacttcccacccaacgggaggacgggaatccttgtgatttcgattggagagaggtagagattcttatgttcctgtctgccattgtcatgatgaagaaccgccgcagtataacagtggagcaacacatcgggaatatcttcatgttcagcaaggtggccaatactattctgttctttcgactcgacattcgcatgggactgctgtacattacactctgcattgtttttctcatgacatgcaagccgccactctacatggggcctgagtatattaaatacttcaacgataagactatagacgaggaactggagcgggacaaacgggttacttggatcgtggagttctttgctaattggagcaacgattgccaaagcttcgctccgatatacgcagatttgtccctgaaatacaattgcaccgggctgaattttggcaaggttgatgtaggcagatacacagacgtctccaccagatataaggtctcaacatcccccctgaccaagcagctgccaacactgattctctttcagggagggaaagaggctatgaggcgaccccagatcgataagaaagggcgagcagtgtcctggaccttcagcgaggagaacgttatccgggaatttaacttgaacgagctctatcagcgagcgaagaagctgtctaaggctggggataacataccagaggagcaacccgtcgcctccacacctactaccgtgagcgacggggagaataaaaaggataaatag

SEQ ID NO: 188616 - DNA, 891 bp, Artificial Sequence
  derived and/or modified sequence
atggctgtgctggcccccctcatcgccctggtgtacagcgtgccccggctgagccgctggctggcccagccctactacctgctgagcgccctgctgtctgctgccttcctgctggtgaggaagctgccccccctgtgccacggcctgcccacccagcgggaggatggcaacccctgtgactttgactggagggaggtggagatcctgatgttcctgagcgccatcgtgatgatgaagaacagaagaagcatcaccgtggagcagcacatcggcaacatcttcatgttcagcaaggtggccaacaccatcctcttcttccggctggacatccgcatgggcctgctgtacatcaccctgtgcatcgtgttcctgatgacctgcaagccacccctgtacatgggccctgagtacatcaagtacttcaatgacaagaccattgatgaggagctggagcgggacaagagggtgacctggatcgtggagttctttgccaactggagcaatgactgccagagctttgcccccatctatgctgacctgagcctgaagtacaactgcaccggcctgaactttgggaaggtggatgtgggccgctacacagatgtgtccacccgctacaaggtgtccaccagccccctgaccaagcagctgcccaccctcatcctcttccagggcggcaaggaggccatgagaagaccccagattgacaagaagggccgggctgtgtcctggaccttctctgaagaaaatgtcatccgggagttcaacctgaatgagctgtaccagagggccaagaagctgagcaaggccggggacaacatccctgaggagcagcctgtggccagcacccccaccaccgtgtctgatggagagaacaagaaggacaagtag

SEQ ID NO: 188617 - DNA, 891 bp, Artificial Sequence
  derived and/or modified sequence
atggccgtgctggcccccctgatcgccctggtgtacagcgtgccccgactgagccgttggctggcgcaaccctactatctgctgagcgcactgttatccgcggccttcctgctggtgaggaaattgccccccctttgtcacgggctgcccacacagagggaggatgggaatccttgtgacttcgactggcgggaagttgagattctcatgtttctgtctgctatcgtgatgatgaaaaaccggcgtagcattacagtagagcagcacattggcaacatctttatgttttcaaaggtggcgaataccatcctgtttttcagactggacatccggatgggactcttgtatatcaccctgtgcatcgtctttctgatgacttgcaagccgcctctgtatatggggcccgaatacatcaaatatttcaacgacaagacaatcgatgaggaactggagagggataaacgcgtcacatggatcgtggagttctttgccaattggagcaacgattgtcagagttttgctcccatctacgccgacctgtcgctgaaatataattgtacagggctgaacttcggcaaggtggatgtcgggaggtacaccgacgtgagtacaagatacaaggtgtccacctcccccttgaccaagcaactgcctacacttattctcttccaaggggggaaggaagctatgcgtcgtccacagattgacaaaaagggaagagccgtcagctggaccttttcagaggagaacgtcattagggaatttaatctgaacgagctttaccagagggccaaaaaactcagcaaagcaggtgataatatacctgaagagcaacctgtggcctcaactcctacaacagtcagtgacggggagaacaaaaaagataagtag

SEQ ID NO: 188618 - DNA, 891 bp, Artificial Sequence
  derived and/or modified sequence
atggcagtattggcgcctctgatcgctctggtgtattccgtccccaggctgtctaggtggctggcgcagccgtattatttactttcagcattgctatctgcagccttcttactcgtgaggaagctccctcccctctgccacggactgcctacacagcgggaagacggcaacccctgcgactttgactggcgcgaggtcgagattctaatgtttttgtctgcgattgtgatgatgaagaacagaaggagcatcactgtggaacaacatattgggaatatttttatgttttctaaggtagcaaacacgattctgttcttccggctcgacattaggatgggcctcctttacataacactctgcatcgtgttcctgatgacctgcaagccgcctctatatatgggaccggagtacattaaatatttcaatgataaaacaatagatgaagagctagagcgcgacaagagggtaacttggatcgtggaattcttcgcgaactggtcaaatgactgtcagtcattcgcccctatatatgccgatctgtctctgaaatataactgcacaggactgaacttcggaaaggtcgacgttggtcgctacaccgatgtctccactagatataaggtgtccacctcacctctgacaaaacagttgcctaccttgatcctgtttcagggcggaaaagaggcaatgcggcgacctcaaatcgacaagaagggcagagccgtctcatggaccttttccgaagagaatgttatccgggaatttaatttgaacgaactgtaccagcgggctaaaaaattatccaaagccggagacaacattcctgaggagcagcctgttgctagtacaccaactacagttagcgatggcgagaataagaaagataagtag

SEQ ID NO: 188619 - DNA, 1631 bp, Artificial Sequence
  derived and/or modified sequence
acggccgaaaagatggcggtcttggcacctctaattgctctcgtgtattcggtgccgcgactttcacgatggctcgcccaaccttactaccttctgtcggccctgctctctgctgccttcctactcgtgaggaaactgccgccgctctgccacggtctgcccacccaacgcgaagacggtaacccgtgtgactttgactggagagaagtggagatcctgatgtttctcagtgccattgtgatgatgaagaaccgcagatccatcactgtggagcaacatataggcaacattttcatgtttagtaaagtggccaacacaattcttttcttccgcttggatattcgcatgggcctactttacatcacactctgcatagtgttcctgatgacgtgcaaaccccccctatatatgggccctgagtatatcaagtacttcaatgataaaaccattgatgaggaactagaacgggacaagagggtcacttggattgtggagttctttgccaattggtctaatgactgccaatcatttgcccctatctatgctgacctctcccttaaatacaactgtacagggctaaattttgggaaggtggatgttggacgctatactgatgttagtacgcggtacaaagtgagcacatcacccctcaccaagcaactccctaccctgatcctgttccaaggtggcaaggaggcaatgcggcggccacagattgacaagaaaggacgggctgtctcatggaccttctctgaggagaatgtgatccgagaatttaacttaaatgagctataccagcgggccaagaaactatcaaaggctggagacaatatccctgaggagcagcctgtggcttcaacccccaccacagtgtcagatggggaaaacaagaaggataaataagatcctcactttggcagtgcttcctctcctgtcaattccaggctctttccataaccacaagcctgaggctgcagccttttatttatgttttccctttggctgtgactgggtggggcagcatgcagcttctgattttaaagaggcatctagggaattgtcaggcaccctacaggaaggcctgccatgctgtggccaactgtttcactggagcaagaaagagatctcataggacggagggggaaatggtttccctccaagcttgggtcagtgtgttaactgcttatcagctattcagacatctccatggtttctccatgaaactctgtggtttcatcattccttcttagttgacctgcacagcttggttagacctagatttaaccctaaggtaagatgctggggtatagaacgctaagaattttcccccaaggactcttgcttccttaagcccttctggcttcgtttatggtcttcattaaaagtataagcctaactttgtcgctagtcctaaggagaaacctttaaccacaaagtttttatcattgaagacaatattgaacaaccccctattttgtggggattgagaaggggtgaatagaggcttgagactttcctttgtgtggtaggacttggaggagaaatcccctggactttcactaaccctctgacatactccccacacccagttgatggctttccgtaataaaaagattgggatttccttttga

SEQ ID NO: 188620 - protein, 227 aa, Artificial Sequence
  derived and/or modified sequence
MQEPRRVTPCLGKRGVKTPQLQPGSAFLPRVRRQSFPARSDSYTTVRDFLAVPRTISSASATLIMAVAVSHFRPGPEVWDTASMAASKVKQDMPPPGGYGPIDYKRNLPRRGLSGYSMLAIGIGTLIYGHWSIMKWNRERRRLQIEDFEARIALLPLLQAETDRRTLQMLRENLEEEAIIMKDVPDWKVGESVFHTTRWVPPLIGELYGLRTTEEALHASHGFMWYT

SEQ ID NO: 188621 - protein, 144 aa, Artificial Sequence
  derived and/or modified sequence
MAASKVKQDMPPPGGYGPIDYKRNLPRRGLSGYSMLAIGIGTLIYGHWSIMKWNRERRRLQIEDFEARIALLPLLQAETDRRTLQMLRENLEEEAIIMKDVPDWKVGESVFHTTRWVPPLIGELYGLRTTEEALHASHGFMWYT

SEQ ID NO: 188622 - DNA, 684 bp, Artificial Sequence
  derived and/or modified sequence
atgcaggaaccgcgccgcgtgacaccatgcctgggaaaacggggcgtcaaaacccctcaacttcagccggggtcagctttcctgccccgggtccgccgacaatctttccctgctcgctcagattcgtacacgacggtgcgagatttcctggcggttccgagaaccatctctagcgcctcagctaccctgatcatggctgtggccgtgtcgcactttcgccctgggcctgaggtttgggataccgcctccatggcagcttcgaaggtcaagcaggacatgccacctccaggcgggtacggtcccattgattacaagcggaacctgcctaggaggggcttgagtggatactcgatgctggctataggcatagggaccctgatctatggtcactggagtatcatgaaatggaaccgggagaggagacgattgcaaatcgaggacttcgaggctcggatagccctgttgcctcttttgcaggccgagacggacagacggacgctgcagatgctgagagagaacctagaggaagaggcaatcatcatgaaagacgtgccagattggaaagtgggcgaatcagtgttccataccacccggtgggtccctccactcatcggagagctctacggattgaggactacagaagaggccctccatgcttcccatggcttcatgtggtacacttag

SEQ ID NO: 188623 - DNA, 435 bp, Artificial Sequence
  derived and/or modified sequence
atggcagcttccaaagtgaagcaggatatgccaccgcccgggggctatgggcctatcgattacaagaggaatctgcctaggagaggtcttagcggctatagcatgctggctatcgggatcggcactttgatctacggccattggtcgataatgaagtggaatcgcgaacgacgcagactgcagatcgaagacttcgaagcccgcattgccttattgcctctgcttcaagccgagacagacaggcggactcttcagatgcttagagagaacctggaggaggaggctattatcatgaaggacgtgcccgattggaaggtcggcgagtccgtctttcatacaactaggtgggtccccccacttatcggcgagctctacggactgcgaactacggaggaggccctgcacgccagtcatgggttcatgtggtatacttag

SEQ ID NO: 188624 - DNA, 684 bp, Artificial Sequence
  derived and/or modified sequence
atgcaggagcccaggagagtgaccccctgcctgggcaagaggggcgtgaagaccccccagctgcagcccggcagcgccttcctgccccgggtgcggcggcagagcttccctgcccggagtgacagctacaccaccgtgcgggacttcctggccgtgcccaggaccatcagcagcgccagcgccaccctcatcatggctgtggccgtgagccacttccggcccggccctgaggtgtgggacacagcctccatggccgccagcaaggtgaagcaggacatgcctcctcctgggggctacggccccatcgactacaagaggaacctgccccggcggggcctgagcggctacagcatgctggccatcggcatcggcaccctcatctacggccactggagcatcatgaagtggaaccgggagcggcggcggctgcagatcgaggactttgaggcccgcatcgccctgctgcccctgctgcaggccgagacagacaggaggaccctgcagatgctgcgggagaacctggaggaggaggccatcatcatgaaggatgtgcctgactggaaggtgggggagagcgtcttccacaccacccgctgggtgcccccactcatcggggagctgtatggcctgcggaccacagaggaggccctgcacgccagccacggcttcatgtggtacacctag

SEQ ID NO: 188625 - DNA, 435 bp, Artificial Sequence
  derived and/or modified sequence
atggccgccagcaaggtgaagcaggacatgcctcctcctgggggctacggccccatcgactacaagaggaacctgccccggcggggcctgagcggctacagcatgctggccatcggcatcggcaccctcatctacggccactggagcatcatgaagtggaaccgggagcggcggcggctgcagattgaagattttgaggccagaattgccctgctgcccctgctgcaggccgagacagacaggaggaccctgcagatgctgcgggagaacctggaggaggaggccatcatcatgaaggatgtgcctgactggaaggtgggggagagcgtcttccacaccacccgctgggtgccccccctgattggagagctgtatggcctgcggaccacagaggaggccctgcacgccagccacggcttcatgtggtacacctag

SEQ ID NO: 188626 - DNA, 762 bp, Artificial Sequence
  derived and/or modified sequence
atgcaagaaccaaggcgagtcacgccctgtctgggcaaaagaggagtaaagacccctcagctgcagcccggcagcgcattcctacccagggtccgccgccagagctttcccgcgcggtcggatagttacactactgtccgggacttcctagccgtgccgcggaccatctcaagtgcttccgccacactcatcatggcggtggcagtaagtcacttccgcccgggaccggaagtgtgggatactgcgagtatggcggcgtcaaaggtgaagcaggacatgcctccgccggggggctatgggcccatcgactacaaacggaacttgccgcgtcgaggactgtcgggctacagcatgctggccatagggattggaaccctgatctacgggcactggagcataatgaagtggaaccgtgagcgcaggcgcctacaaatcgaggacttcgaggctcgcatcgcgctgttgccactgttacaggcagaaaccgaccggaggaccttgcagatgcttcgggagaacctggaggaggaggccatcatcatgaaggacgtgcccgactggaaggtgggggagtctgtgttccacacaacccgctgggtgccccccttgatcggggagctgtacgggctgcgcaccacagaggaggctctccatgccagccacggcttcatgtggtacacgtaggccctgtgccctccggccacctggatccctgcccctccccactgggacggaataaatgctctgcagacctggcctgcc

SEQ ID NO: 188627 - DNA, 959 bp, Artificial Sequence
  derived and/or modified sequence
gtccgacttcgagcagcagctgccccccaacatcatgtacccagcccgtgactacgtggagccctgggcttcgcgtagagtccctagacggggcgaaaacgggaaaaggggccttaactggggcacctggctcctttgagagctcggagtttctgactggcctgcgcaacaccccagaggcaaggtgaacgcgagggcctataatgcaagaaccaaggcgagtcacgccctgtctgggcaaaagaggagtaaagacccctcagctgcagcccggcagcgcattcctacccagggtccgccgccagagctttcccgcgcggtcggatagttacactactgtccgggacttcctagccgtgccgcggaccatctcaagtgcttccgccacactcatcatggcggtggcagtaagtcacttccgcccgggaccggaagtgtgggatactgcgagtatggcggcgtcaaaggtgaagcaggacatgcctccgccggggggctatgggcccatcgactacaaacggaacttgccgcgtcgaggactgtcgggctacagcatgctggccatagggattggaaccctgatctacgggcactggagcataatgaagtggaaccgtgagcgcaggcgcctacaaatcgaggacttcgaggctcgcatcgcgctgttgccactgttacaggcagaaaccgaccggaggaccttgcagatgcttcgggagaacctggaggaggaggccatcatcatgaaggacgtgcccgactggaaggtgggggagtctgtgttccacacaacccgctgggtgccccccttgatcggggagctgtacgggctgcgcaccacagaggaggctctccatgccagccacggcttcatgtggtacacgtaggccctgtgccctccggccacctggatccctgcccctccccactgggacggaataaatgctctgcagacctgg

SEQ ID NO: 188628 - DNA, 684 bp, Artificial Sequence
  derived and/or modified sequence
atgcaggagccccggcgggtgaccccctgcctgggcaagcggggcgttaagacacctcagctgcaacctggctcggcatttttgcctcgtgtgagaaggcagtcttttcctgcacggagcgactcctatactacagtacgcgacttcctcgctgtcccccgcacaatctcaagtgcctccgcaacgctcatcatggccgtggccgtgtcacatttcaggcctggcccagaagtctgggacaccgctagtatggctgcctcgaaagttaagcaggatatgcctcctccaggtggctacgggccaatagactacaagagaaacctacctaggaggggactctcaggctattctatgctagccatcggtatcggaaccttgatatacggccactggtcgattatgaaatggaatcgcgaacggcgaaggcttcagattgaagattttgaagccagaattgcccttctgcccctactccaggctgaaaccgacagacgcaccttgcagatgctgcgtgaaaacttagaggaggaggctatcattatgaaagatgtccctgattggaaggtaggcgagtctgtgttccataccacaagatgggtgcctcccttaataggagagctctacggattaaggactaccgaagaagccctgcacgcttctcatggcttcatgtggtacacctag

SEQ ID NO: 188629 - DNA, 435 bp, Artificial Sequence
  derived and/or modified sequence
atggccgccagcaaggtgaagcaggacatgcccccccccggcggctacgggccaatcgattacaagagaaatctgccccgtcgcggcctctcaggatattctatgcttgctattgggatcggcacactcatttacggccactggtctataatgaagtggaacagagagcggcggcgtctgcagatagaggactttgaggccaggatcgctctgcttccactattgcaagcagaaactgacaggcgaactttgcagatgctccgggagaatctcgaggaggaggccatcattatgaaggacgttcccgactggaaggtcggcgagtctgtcttccacaccacacgttgggtacctcctctgatcggcgagctgtacggcctgcgcactactgaggaggctctgcatgcgtcacacggatttatgtggtacacatag

SEQ ID NO: 188630 - DNA, 684 bp, Artificial Sequence
  derived and/or modified sequence
atgcaagaaccacgcagagtgaccccctgcctcggcaaacgaggagtcaaaacaccccagctgcagcctgggtccgcattcctgccgcgagtacgtcgtcaatcttttcccgcaagatctgactcctatacaaccgtgagggatttcctcgcggtgccaaggacaatttctagcgccagtgcgaccctgatcatggccgtggccgtgagtcacttccggcctgggcctgaggtgtgggacaccgcctccatggctgcaagcaaggtgaagcaggatatgccacctcctggtggatacggtccaatcgattacaagaggaatctcccgcgtagaggcttgagcgggtatagcatgttggcaatcggcatcggcacgctcatttatgggcactggtctataatgaagtggaaccgggaacggaggagactgcagatagaggacttcgaggccagaatcgcactgctgcctctcctgcaagcagaaaccgacagacggaccctgcaaatgctgagggagaacctggaggaggaagcaattatcatgaaggacgtgcccgattggaaagtcggggagagtgtattccatactacccggtgggtgccccctctaattggggaactttacggcttacggacaactgaggaagcattgcacgccagtcacgggttcatgtggtacacctag

SEQ ID NO: 188631 - DNA, 435 bp, Artificial Sequence
  derived and/or modified sequence
atggccgctagtaaggtcaagcaggatatgccacctcccggaggttatggacctatcgattacaagcgcaatctgccgagaagagggctttccggatattccatgttagcaataggaattggtacccttatatacgggcactggagcatcatgaagtggaatcgggaacgacgcaggttgcagatagaagacttcgaagccaggattgccctgctcccccttcttcaagccgagaccgaccggaggacactgcagatgctcagggaaaatcttgaagaggaagctattatcatgaaggacgtaccagattggaaagtgggcgagagtgtgttccacaccactaggtgggttccgcctttaatcggggagctctatgggttaaggacgacggaagaggcgctacacgcttcgcatgggtttatgtggtatacctag

SEQ ID NO: 188632 - DNA, 684 bp, Artificial Sequence
  derived and/or modified sequence
atgcaggagcccagaagagtgaccccctgcctgggcaagagaggcgtgaagaccccccagctgcagcccggcagcgccttcctgcccagagtgagaagacagagcttccccgccagaagcgacagctacaccaccgtgagagacttcctggccgtgcccagaaccatcagcagcgccagcgccaccctgatcatggccgtggccgtgagccacttcagacccggccccgaggtgtgggacaccgccagcatggccgccagcaaggtgaagcaggacatgcccccccccggcggctacggccccatcgactacaagagaaacctgcccagaagaggcctgagcggctacagcatgctggccatcggcatcggcaccctgatctacggccactggagcatcatgaagtggaacagagagagaagaagactgcagatcgaggacttcgaggccagaatcgccctgctgcccctgctgcaggccgagaccgacagaagaaccctgcagatgctgagagagaacctggaggaggaggccatcatcatgaaggacgtgcccgactggaaggtgggcgagagcgtgttccacaccaccagatgggtgccccccctgatcggcgagctgtacggcctgagaaccaccgaggaggccctgcacgccagccacggcttcatgtggtacacctag

SEQ ID NO: 188633 - DNA, 435 bp, Artificial Sequence
  derived and/or modified sequence
atggccgccagcaaggtgaagcaggacatgcccccccccggcggctacggccccatcgactacaagagaaacctgcccagaagaggcctgagcggctacagcatgctggccatcggcatcggcaccctgatctacggccactggagcatcatgaagtggaacagagagagaagaagactgcagatcgaggacttcgaggccagaatcgccctgctgcccctgctgcaggccgagaccgacagaagaaccctgcagatgctgagagagaacctggaggaggaggccatcatcatgaaggacgtgcccgactggaaggtgggcgagagcgtgttccacaccaccagatgggtgccccccctgatcggcgagctgtacggcctgagaaccaccgaggaggccctgcacgccagccacggcttcatgtggtacacctag

SEQ ID NO: 188634 - protein, 383 aa, Artificial Sequence
  derived and/or modified sequence
MEALGKLKQFDAYPKTLEDFRVKTCGGATVTIVSGLLMLLLFLSELQYYLTTEVHPELYVDKSRGDKLKINIDVLFPHMPCAYLSIDAMDVAGEQQLDVEHNLFKQRLDKDGIPVSSEAERHELGKVEVTVFDPDSLDPDRCESCYGAEAEDIKCCNTCEDVREAYRRRGWAFKNPDTIEQCRREGFSQKMQEQKNEGCQVYGFLEVNKVAGNFHFAPGKSFQQSHVHVHDLQSFGLDNINMTHYIQHLSFGEDYPGIVNPLDHTNVTAPQASMMFQYFVKVVPTVYMKVDGEVLRTNQFSVTRHEKVANGLLGDQGLPGVFVLYELSPMMVKLTEKHRSFTHFLTGVCAIIGGMFTVAGLIDSLIYHSARAIQKKIDLGKTT

SEQ ID NO: 188635 - protein, 198 aa, Artificial Sequence
  derived and/or modified sequence
LSVAFSCCYGAEAEDIKCCNTCEDVREAYRRRGWAFKNPDTIEQCRREGFSQKMQEQKNEGCQVYGFLEVNKVAGNFHFAPGKSFQQSHVHVHDLQSFGLDNINMTHYIQHLSFGEDYPGIVNPLDHTNVTAPQASMMFQYFVKVVPTVYMKVDGEVLRTNQFSVTRHEKVANGLLGDQGLPGVFAHLPLSTSHPEEN

SEQ ID NO: 188636 - protein, 398 aa, Artificial Sequence
  derived and/or modified sequence
MEALGKLKQFDAYPKTLEDFRVKTCGGATVTIVSGLLMLLLFLSELQYYLTTEVHPELYVDKSRGDKLKINIDVLFPHMPCAYLSIDAMDVAGEQQLDVEHNLFKQRLDKDGIPVSSEAERHELGKVEVTVFDPDSLDPDRCESCYGAEAEDIKCCNTCEDVREAYRRRGWAFKNPDTIEQCRREGFSQKMQEQKNEGCQVYGFLEVNKVAGNFHFAPGKSFQQSHVHGCVCRLKMIARSLACVHDLQSFGLDNINMTHYIQHLSFGEDYPGIVNPLDHTNVTAPQASMMFQYFVKVVPTVYMKVDGEVLRTNQFSVTRHEKVANGLLGDQGLPGVFVLYELSPMMVKLTEKHRSFTHFLTGVCAIIGGMFTVAGLIDSLIYHSARAIQKKIDLGKTT

SEQ ID NO: 188637 - DNA, 1152 bp, Artificial Sequence
  derived and/or modified sequence
atggaggccctgggcaagctgaagcagttcgacgcctaccccaagaccctggaggacttcagagtgaagacctgcggcggcgccaccgtgaccatcgtgagcggcctgctgatgctgctgctgttcctgagcgagctgcagtactacctgaccaccgaggtgcaccccgagctgtacgtggacaagagcagaggcgacaagctgaagatcaacatcgacgtgctgttcccccacatgccctgcgcctacctgagcatcgacgccatggacgtggccggcgagcagcagctggacgtggagcacaacctgttcaagcagagactggacaaggacggcatccccgtgagcagcgaggccgagagacacgagctgggcaaggtggaggtgaccgtgttcgaccccgacagcctggaccccgacagatgcgagagctgctacggcgccgaggccgaggacatcaagtgctgcaacacctgcgaggacgtgagagaggcctacagaagaagaggctgggccttcaagaaccccgacaccatcgagcagtgcagaagagagggcttcagccagaagatgcaggagcagaagaacgagggctgccaggtgtacggcttcctggaggtgaacaaggtggccggcaacttccacttcgcccccggcaagagcttccagcagagccacgtgcacgtgcacgacctgcagagcttcggcctggacaacatcaacatgacccactacatccagcacctgagcttcggcgaggactaccccggcatcgtgaaccccctggaccacaccaacgtgaccgccccccaggccagcatgatgttccagtacttcgtgaaggtggtgcccaccgtgtacatgaaggtggacggcgaggtgctgagaaccaaccagttcagcgtgaccagacacgagaaggtggccaacggcctgctgggcgaccagggcctgcccggcgtgttcgtgctgtacgagctgagccccatgatggtgaagctgaccgagaagcacagaagcttcacccacttcctgaccggcgtgtgcgccatcatcggcggcatgttcaccgtggccggcctgatcgacagcctgatctaccacagcgccagagccatccagaagaagatcgacctgggcaagaccacctag

SEQ ID NO: 188638 - DNA, 597 bp, Artificial Sequence
  derived and/or modified sequence
ctgagcgtggccttcagctgctgctacggcgccgaggccgaggacatcaagtgctgcaacacctgcgaggacgtgagagaggcctacagaagaagaggctgggccttcaagaaccccgacaccatcgagcagtgcagaagagagggcttcagccagaagatgcaggagcagaagaacgagggctgccaggtgtacggcttcctggaggtgaacaaggtggccggcaacttccacttcgcccccggcaagagcttccagcagagccacgtgcacgtgcacgacctgcagagcttcggcctggacaacatcaacatgacccactacatccagcacctgagcttcggcgaggactaccccggcatcgtgaaccccctggaccacaccaacgtgaccgccccccaggccagcatgatgttccagtacttcgtgaaggtggtgcccaccgtgtacatgaaggtggacggcgaggtgctgagaaccaaccagttcagcgtgaccagacacgagaaggtggccaacggcctgctgggcgaccagggcctgcccggcgtgttcgcccacctgcccctgagcaccagccaccccgaggagaactag

SEQ ID NO: 188639 - DNA, 1197 bp, Artificial Sequence
  derived and/or modified sequence
atggaggccctgggcaagctgaagcagttcgacgcctaccccaagaccctggaggacttcagagtgaagacctgcggcggcgccaccgtgaccatcgtgagcggcctgctgatgctgctgctgttcctgagcgagctgcagtactacctgaccaccgaggtgcaccccgagctgtacgtggacaagagcagaggcgacaagctgaagatcaacatcgacgtgctgttcccccacatgccctgcgcctacctgagcatcgacgccatggacgtggccggcgagcagcagctggacgtggagcacaacctgttcaagcagagactggacaaggacggcatccccgtgagcagcgaggccgagagacacgagctgggcaaggtggaggtgaccgtgttcgaccccgacagcctggaccccgacagatgcgagagctgctacggcgccgaggccgaggacatcaagtgctgcaacacctgcgaggacgtgagagaggcctacagaagaagaggctgggccttcaagaaccccgacaccatcgagcagtgcagaagagagggcttcagccagaagatgcaggagcagaagaacgagggctgccaggtgtacggcttcctggaggtgaacaaggtggccggcaacttccacttcgcccccggcaagagcttccagcagagccacgtgcacggctgcgtgtgcagactgaagatgatcgccagaagcctggcctgcgtgcacgacctgcagagcttcggcctggacaacatcaacatgacccactacatccagcacctgagcttcggcgaggactaccccggcatcgtgaaccccctggaccacaccaacgtgaccgccccccaggccagcatgatgttccagtacttcgtgaaggtggtgcccaccgtgtacatgaaggtggacggcgaggtgctgagaaccaaccagttcagcgtgaccagacacgagaaggtggccaacggcctgctgggcgaccagggcctgcccggcgtgttcgtgctgtacgagctgagccccatgatggtgaagctgaccgagaagcacagaagcttcacccacttcctgaccggcgtgtgcgccatcatcggcggcatgttcaccgtggccggcctgatcgacagcctgatctaccacagcgccagagccatccagaagaagatcgacctgggcaagaccacctag

SEQ ID NO: 188640 - DNA, 1359 bp, Artificial Sequence
  derived and/or modified sequence
aggggggcgtggctccaggccggaagagggagtctgtaggggcgggccggctggcgtcccctttccggccggtccccatggaggcgctggggaagctgaagcagttcgatgcctaccccaagactttggaggacttccgggtcaagacctgcgggggcgccaccgtgaccattgtcagtggccttctcatgctgctactgttcctgtccgagctgcagtattacctcaccacggaggtgcatcctgagctctacgtggacaagtcgcggggagataaactgaagatcaacatcgatgtactttttccgcacatgccttgtgcctatctgagtattgatgccatggatgtggccggagaacagcagctggatgtggaacacaacctgttcaagcaacgactagataaagatggcatccccgtgagctcagaggctgagcggcatgagcttgggaaagtcgaggtgacggtgtttgaccctgactccctggaccctgatcgctgtgagagctgctatggtgctgaggcagaagatatcaagtgctgtaacacctgtgaagatgtgcgggaggcatatcgccgtagaggctgggccttcaagaacccagatactattgagcagtgccggcgagagggcttcagccagaagatgcaggagcagaagaatgaaggctgccaggtgtatggcttcttggaagtcaataaggtggccggaaacttccactttgcccctgggaagagcttccagcagtcccatgtgcacgtccatgacttgcagagctttggccttgacaacatcaacatgacccactacatccagcacctgtcatttggggaggactatccaggcattgtgaaccccctggaccacaccaatgtcactgcgccccaagcctccatgatgttccagtactttgtgaaggtggtgcccactgtgtacatgaaggtggacggagaggtactgaggacaaatcagttctctgtgaccagacatgagaaggttgccaatgggctgttgggcgaccaaggccttcccggagtcttcgtcctctatgagctctcgcccatgatggtgaagctgacggagaagcacaggtccttcacccacttcctgacaggtgtgtgcgccatcattgggggcatgttcacagtggctggactcatcgattcgctcatctaccactcagcacgagccatccagaagaaaattgatctagggaagacaacgtagtcaccctcggtgcttcctctgtctcctctttctccctggcctgtggttgtcccccagcctctgccaccctccacctcctcggtcagccccagccccaggttgataaatctattgattgattgtgatagta

SEQ ID NO: 188641 - DNA, 832 bp, Artificial Sequence
  derived and/or modified sequence
cgctggggaagctgaagcagttcgatgcctaccccaagactttggaggacttccgggtcaagacctgcgggggcgccaccgtgaccattgtcagtggccttctcatgctgctatggtgctgaggcagaagatatcaagtgctgtaacacctgtgaagatgtgcgggaggcatatcgccgtagaggctgggccttcaagaacccagatactattgagcagtgccggcgagagggcttcagccagaagatgcaggagcagaagaatgaaggctgccaggtgtatggcttcttggaagtcaataaggtggccggaaacttccactttgcccctgggaagagcttccagcagtcccatgtgcacgtccatgacttgcagagctttggccttgacaacatcaacatgacccactacatccagcacctgtcatttggggaggactatccaggcattgtgaaccccctggaccacaccaatgtcactgcgccccaagcctccatgatgttccagtactttgtgaaggtggtgcccactgtgtacatgaaggtggacggagaggtactgaggacaaatcagttctctgtgaccagacatgagaaggttgccaatgggctgttgggcgaccaaggccttcccggagtattcgctcatctaccactcagcacgagccatccagaagaaaattgatctagggaagacaacgtagtcaccctcggtgcttcctctgtctcctctttctccctggcctgtggttgtcccccagcctctgccaccctccacctcctcggtcagccccagccccaggttgataaatctattgattgattgtgatagt

SEQ ID NO: 188642 - DNA, 1343 bp, Artificial Sequence
  derived and/or modified sequence
ctttccggccggtccccatggaggcgctggggaagctgaagcagttcgatgcctaccccaagactttggaggacttccgggtcaagacctgcgggggcgccaccgtgaccattgtcagtggccttctcatgctgctactgttcctgtccgagctgcagtattacctcaccacggaggtgcatcctgagctctacgtggacaagtcgcggggagataaactgaagatcaacatcgatgtactttttccgcacatgccttgtgcctatctgagtattgatgccatggatgtggccggagaacagcagctggatgtggaacacaacctgttcaagcaacgactagataaagatggcatccccgtgagctcagaggctgagcggcatgagcttgggaaagtcgaggtgacggtgtttgaccctgactccctggaccctgatcgctgtgagagctgctatggtgctgaggcagaagatatcaagtgctgtaacacctgtgaagatgtgcgggaggcatatcgccgtagaggctgggccttcaagaacccagatactattgagcagtgccggcgagagggcttcagccagaagatgcaggagcagaagaatgaaggctgccaggtgtatggcttcttggaagtcaataaggtggccggaaacttccactttgcccctgggaagagcttccagcagtcccatgtgcacgggtgtgtgtgcaggttaaagatgatagcacggagcctggcttgtgtccatgacttgcagagctttggccttgacaacatcaacatgacccactacatccagcacctgtcatttggggaggactatccaggcattgtgaaccccctggaccacaccaatgtcactgcgccccaagcctccatgatgttccagtactttgtgaaggtggtgcccactgtgtacatgaaggtggacggagaggtactgaggacaaatcagttctctgtgaccagacatgagaaggttgccaatgggctgttgggcgaccaaggccttcccggagtcttcgtcctctatgagctctcgcccatgatggtgaagctgacggagaagcacaggtccttcacccacttcctgacaggtgtgtgcgccatcattgggggcatgttcacagtggctggactcatcgattcgctcatctaccactcagcacgagccatccagaagaaaattgatctagggaagacaacgtagtcaccctcggtgcttcctctgtctcctctttctccctggcctgtggttgtcccccagcctctgccaccctccacctcctcggtcagccccagccccaggttgataaatctattgattgattgtgatagt

SEQ ID NO: 188643 - DNA, 1152 bp, Artificial Sequence
  derived and/or modified sequence
atggaggccctgggaaaactgaagcagttcgatgcgtatcccaaaactctggaggatttcagggttaaaacatgcggcggcgccaccgttacgatcgtgtctggactgctcatgttgctgttatttttatccgaattacagtattatctcaccacggaggtccacccggagctgtatgtggacaagtcccgcggcgacaagcttaagatcaacatagacgtcctttttcctcacatgccatgtgcatatctgagtattgacgccatggatgtggccggcgagcaacagctcgacgtagaacataacctctttaagcagcggcttgataaagatgggatccccgtctcgagcgaagccgaaaggcacgagctgggtaaagttgaagtgaccgtgttcgatccagactcactggatcctgaccgctgtgaatcttgctacggggccgaggcagaagacatcaagtgttgcaatacctgcgaggacgttcgggaggcttaccgccgaaggggctgggcctttaaaaaccccgacacaatcgagcagtgtcgacgggagggcttctcccagaagatgcaggagcagaagaacgaaggctgccaggtgtatggttttttagaggttaataaagtcgctggcaacttccattttgctcctggaaagtccttccaacagagccacgttcatgtgcacgatttgcagagttttgggctggacaacatcaatatgacacattatatccagcacctgtcttttggggaagactatcctggaattgttaacccactcgatcataccaacgtgacagcccctcaagcctctatgatgttccagtacttcgtgaaggttgttcctaccgtttacatgaaagtagacggcgaggttcttcgcactaatcagttttccgtgacgcgccacgagaaggtcgcaaatggtcttctgggcgaccagggcctgcctggggttttcgtgctctacgagctttcgcctatgatggtgaagctgacagaaaaacatcgatcattcacccatttcctcacgggtgtgtgcgccatcattgggggaatgttcactgtggccgggctgattgatagcctgatttatcacagtgctagagcgatacagaagaagatcgatctggggaagactacatag

SEQ ID NO: 188644 - DNA, 597 bp, Artificial Sequence
  derived and/or modified sequence
ctgtcagtcgccttttcttgttgttacggagcggaggcagaggatatcaaatgttgtaacacatgcgaggatgtgcgcgaggcttacagacggcgcggctgggcattcaagaatccggataccatcgaacaatgccgacgcgagggtttttcccagaagatgcaggagcagaagaatgagggctgccaggtttacgggttcctcgaagtaaacaaagtcgctggcaatttccatttcgctccaggcaaatcattccagcagagccacgttcacgtgcatgacttacaatcatttggtctggacaacattaacatgacccactatatccagcacttaagtttcggggaagattatcctgggattgtgaacccactggaccatacaaatgtgacagccccccaggcttcgatgatgtttcaatacttcgtaaaggtggtgcccactgtctacatgaaagttgacggcgaagtcctgagaacaaaccagttttcagtgacccgccacgaaaaagtggcgaatgggctcctgggagatcaaggtctgccaggggtctttgcgcacctccctctaagcaccagccatcccgaggaaaactag

SEQ ID NO: 188645 - DNA, 1197 bp, Artificial Sequence
  derived and/or modified sequence
atggaggccctgggaaaactgaagcagtttgacgcctaccccaagacattagaggactttagagtaaaaacttgcggcggggcgacggtcaccatcgtgtcagggctgttgatgcttctgctcttcctgtcagagctccagtattatctcaccacagaggtgcaccccgagctttatgtggacaaaagcagaggagataagctaaagatcaacatcgatgtcctgttcccgcacatgccttgtgcctacctatcgattgatgccatggatgttgctggcgaacagcagctcgatgtggaacacaacctgttcaagcaaagactggacaaagacggcatacctgtttccagtgaagcagaacgtcacgagctcgggaaggtggaggtgactgtgtttgatcctgactccctggatcctgaccggtgtgaatcgtgttacggcgcggaggcggaggacatcaaatgttgcaatacctgtgaggacgtgcgggaagcatacagacggcgaggctgggcttttaagaaccctgataccatcgaacaatgccggagggaagggttttcccagaaaatgcaggaacaaaaaaatgaaggctgccaagtttatgggttcctcgaagtgaataaggtagccggcaatttccacttcgcacccggaaagagctttcagcaatcccatgttcacggatgcgtgtgccgattgaagatgatcgcccggtccttggcctgtgttcacgatttacagagcttcggtctggataacatcaacatgacccactatattcagcacctgtctttcggtgaggattaccccggcatcgtgaacccacttgaccacactaacgttacagcgcctcaggcctcaatgatgttccagtactttgtaaaggtggtccccaccgtgtatatgaaagtagacggggaagtcctgcgcactaaccagtttagcgtgacccggcatgagaaagtcgcgaacggcctcctgggagaccagggcctgcccggggtgtttgtgctgtacgagctgtcccctatgatggtaaagctcaccgagaagcaccgatcattcacacactttctaacaggcgtgtgcgcaattattggcggcatgttcactgtggccggactcattgactcactgatctatcactctgcccgggcaattcaaaaaaagatcgacttagggaaaaccacctag

SEQ ID NO: 188646 - DNA, 1152 bp, Artificial Sequence
  derived and/or modified sequence
atggaggccctgggcaagctgaagcagtttgatgcctaccccaagaccctggaggacttccgggtgaagacctgtggcggggccaccgtgaccatcgtgtctggcctgctgatgctgctgctcttcctgtctgagctgcagtactacctgaccacagaggtgcaccctgagctgtatgtggacaagagcagaggagacaagctgaagatcaacattgatgtgctcttcccccacatgccctgtgcctacctgagcattgatgccatggatgtggccggggagcagcagctggatgtggagcacaacctcttcaagcagaggctggacaaggatggcatccctgtgtcctctgaggccgagagacatgagctgggcaaggtggaggtgacagtgtttgatcctgacagcctggaccctgacagatgtgagagctgctacggggctgaggccgaggacatcaagtgctgcaacacctgtgaagatgtgcgggaggcctacagaagaagaggctgggccttcaagaacccagacaccatcgagcagtgcagaagagagggcttcagccagaagatgcaggagcagaagaatgaaggctgccaggtgtatggcttcctggaggtgaacaaggtggccggcaacttccactttgcccctgggaagagcttccagcagagccacgtgcacgtgcatgacctgcagagctttggcctggacaacatcaacatgacccactacatccagcacctgagctttggagaggactacccaggcatcgtgaaccccctggaccacaccaacgtgacagccccccaggcctccatgatgttccagtactttgtgaaggtggtgcccaccgtgtacatgaaggtggatggagaggtgctgcggaccaaccagttctctgtgaccaggcatgagaaggtggccaacggcctgctgggggaccagggcctgcccggggtgtttgtgctgtatgagctgagccccatgatggtgaagctgacagagaagcacaggagcttcacccacttcctgactggagtgtgtgccatcatcggcggcatgttcaccgtggccggcctgattgacagcctcatctaccacagcgcccgggccatccagaagaagattgacctgggcaagaccacctag

SEQ ID NO: 188647 - DNA, 597 bp, Artificial Sequence
  derived and/or modified sequence
ctgtctgtggccttcagctgctgctatggagctgaggccgaggacatcaagtgctgcaacacctgtgaagatgtgcgggaggcctacagaagaagaggctgggccttcaagaacccagacaccatcgagcagtgccggcgggagggcttcagccagaagatgcaggagcagaagaatgaaggctgccaggtgtatggcttcctggaggtgaacaaggtggccggcaacttccactttgcccctgggaagagcttccagcagagccacgtgcacgtgcatgacctgcagagctttggcctggacaacatcaacatgacccactacatccagcacctgagctttggagaggactacccaggcatcgtgaaccccctggaccacaccaacgtgacagccccccaggcctccatgatgttccagtactttgtgaaggtggtgcccaccgtgtacatgaaggtggatggagaggtgctgcggaccaaccagttctctgtgaccaggcatgagaaggtggccaacggcctgctgggggaccagggcctgcccggggtgtttgcccacctgcccctgagcaccagccacccagaagaaaattag

SEQ ID NO: 188648 - DNA, 1197 bp, Artificial Sequence
  derived and/or modified sequence
atggaggccctgggcaagctgaagcagtttgatgcctaccccaagaccctggaggacttccgggtgaagacctgtggcggggccaccgtgaccatcgtgtctggcctgctgatgctgctgctcttcctgtctgagctgcagtactacctgaccacagaggtgcaccctgagctgtatgtggacaagagcagaggagacaagctgaagatcaacattgatgtgctcttcccccacatgccctgtgcctacctgagcattgatgccatggatgtggccggggagcagcagctggatgtggagcacaacctcttcaagcagaggctggacaaggatggcatccctgtgtcctctgaggccgagagacatgagctgggcaaggtggaggtgacagtgtttgatcctgacagcctggaccctgacagatgtgagagctgctacggggctgaggccgaggacatcaagtgctgcaacacctgtgaagatgtgcgggaggcctacagaagaagaggctgggccttcaagaacccagacaccatcgagcagtgcagaagagagggcttcagccagaagatgcaggagcagaagaatgaaggctgccaggtgtatggcttcctggaggtgaacaaggtggccggcaacttccactttgcccctgggaagagcttccagcagagccacgtgcacggctgtgtgtgccgcctgaagatgattgcccggagcctggcctgtgtgcatgacctgcagagctttggcctggacaacatcaacatgacccactacatccagcacctgagctttggagaggactacccaggcatcgtgaaccccctggaccacaccaacgtgacagccccccaggcctccatgatgttccagtactttgtgaaggtggtgcccaccgtgtacatgaaggtggatggagaggtgctgcggaccaaccagttctctgtgaccaggcatgagaaggtggccaacggcctgctgggggaccagggcctgcccggggtgtttgtgctgtatgagctgagccccatgatggtgaagctgacagagaagcaccgctccttcacccacttcctgactggagtgtgtgccatcattggaggcatgttcaccgtggccggcctgattgacagcctcatctaccacagcgcccgggccatccagaagaagattgacctgggcaagaccacctag

SEQ ID NO: 188649 - DNA, 1152 bp, Artificial Sequence
  derived and/or modified sequence
atggaggccctgggcaagctgaagcagttcgacgcctaccccaagaccctcgaagacttcagagtgaagacctgcggtggggccacagtcactattgtcagcggactattgatgctcctgctctttctctccgaattgcaatattacctaaccaccgaggtccatcccgaactctacgtggataagagtagaggggataagctgaagatcaatatagatgtcctctttcctcatatgccatgcgcttacttgagcatagacgccatggatgtggcaggcgagcagcagttagatgttgagcacaatctgttcaagcagcgtctagacaaggacggcatccccgtctcatctgaggctgagagacacgaactgggcaaggtggaggtcacagtcttcgaccccgatagcctggacccagatagatgtgagtcctgttacggtgctgaagctgaagacatcaaatgttgtaatacgtgcgaggatgtgcgggaagcctaccgccggcggggctgggccttcaaaaatccagacaccatcgaacaatgccgccgggagggattttcccaaaagatgcaggagcagaaaaatgaggggtgccaggtctacggctttctggaagtgaacaaagtggccggcaactttcactttgcaccaggcaaaagcttccagcagagtcacgtacacgtgcacgacctccagagcttcggactcgataatatcaatatgacccattatatccagcacctgtcttttggcgaggattatcctggcattgtgaatcccctggaccacaccaatgtgacagcccctcaagcctccatgatgttccagtacttcgtcaaggtggttcccactgtgtacatgaaggtagatggtgaggtcctaaggactaatcagttcagcgttacccgccatgagaaagtggccaacgggctcttaggcgaccaagggctcccaggagtgttcgtcctctatgaactctcccccatgatggtcaagctgaccgagaaacaccggagcttcacacatttcttgaccggggtatgtgcgatcattggtgggatgttcacggtagcaggcctcatcgattcactgatctatcactctgctcgcgctatccaaaagaaaatcgatctcggtaaaacaacctag

SEQ ID NO: 188650 - DNA, 597 bp, Artificial Sequence
  derived and/or modified sequence
ctgagcgtggccttcagctgctgctacggcgccgaggccgaggacatcaagtgctgtaatacgtgtgaagatgtaagagaagcgtatcgcagaaggggctgggcatttaaaaaccctgacaccatcgagcagtgtaggagagaaggcttcagccagaagatgcaggagcaaaagaacgaggggtgtcaggtgtatggcttcctggaggtcaataaagtggccggcaacttccacttcgcccccgggaaatctttccagcaatcgcatgtccacgtgcatgatctgcagtcttttggcctggataacataaacatgacccattacattcaacatttatcttttggcgaagactaccctgggatcgttaatcccctagaccacactaatgtcaccgcccctcaggcctcaatgatgttccagtattttgttaaggtggtgcctaccgtatacatgaaagtggatggcgaagtgctccgcacaaaccaatttagtgttacacgtcacgagaaggtcgctaatggactgctcggggaccagggcttgccgggtgtgttcgcgcatcttccgcttagcacaagtcacccagaggagaactag

SEQ ID NO: 188651 - DNA, 1197 bp, Artificial Sequence
  derived and/or modified sequence
atggaggccctgggcaagctgaagcagttcgacgcctaccccaagacccttgaagactttcgcgttaagacatgcgggggggcaactgtcacaattgtctcaggtttactcatgcttctgcttttcctctctgagctgcagtactatctaacaacagaggtccaccccgagctgtatgttgataaatccagaggggataagctgaagattaacatcgacgttctattccctcacatgccttgtgcttacctcagtattgatgccatggacgttgcaggcgagcagcagctggatgtggagcacaacctttttaaacaaaggttagacaaggatggaataccagtgtcctcagaggctgaacgccatgagttaggtaaagtcgaggtgactgtgtttgatccagattctctggatcctgatcgctgcgaatcttgctatggcgccgaggcagaggacattaaatgctgtaacacttgcgaggacgtgcgggaagcctacaggcgccggggctgggccttcaagaaccctgatactatcgagcagtgcaggcgcgaaggcttcagccagaaaatgcaggagcaaaagaacgagggatgccaggtttacggcttcttggaagtgaataaagtcgccgggaacttccatttcgccccgggaaagagctttcaacagagtcatgtgcacggttgcgtgtgcaggctgaaaatgatagccaggtctttggcttgtgtacacgaccttcagagttttggattagacaatatcaacatgactcactacatccagcatctgtcttttggcgaggactacccaggcattgttaatccactggaccacaccaacgtgacggccccccaggcaagcatgatgttccaatacttcgtaaaggtggtgcccaccgtgtacatgaaggtggacggagaggtgctgaggacaaaccagttttcagtgacacgacacgagaaggtcgccaacggactgctaggagatcaggggctgccgggcgtattcgtcttatacgagctcagcccaatgatggtgaagttgactgaaaagcacaggagctttactcacttccttacgggagtgtgcgctatcatcggcggaatgttcaccgtggccggactcatcgactcgttaatctaccactccgcccgtgcgattcagaagaagatcgatttggggaagacaacctag

SEQ ID NO: 188652 - DNA, 1152 bp, Artificial Sequence
  derived and/or modified sequence
atggaggctctggggaaactgaagcaattcgatgcataccccaaaacgttggaggatttccgcgtaaagacatgcggaggcgctaccgttaccatcgtcagcggtttgcttatgttactgttatttctcagtgagctgcaatactatctcacaactgaagtacatcctgagctctacgtcgacaaaagcagaggagataaacttaagataaatatcgacgttcttttcccgcacatgccttgcgcctatctcagcattgatgcaatggacgtggccggtgagcaacagttggacgtcgagcacaacttatttaagcagcgactggataaggacggaatacctgtgtcctcggaagctgagcgtcatgagcttggtaaagtggaggtgactgtctttgaccccgatagcctcgatcctgatagatgcgaatcatgctacggcgcagaggccgaggatataaagtgctgcaatacgtgtgaggatgttcgcgaagcctaccgacgcaggggttgggccttcaagaacccggacactatcgagcagtgccgcagagagggattttctcagaagatgcaggagcaaaagaatgaagggtgccaggtctacggatttctcgaggtgaataaagtggctggtaacttccatttcgctcccggaaaatcatttcagcaatctcacgtccatgtgcacgacctgcaaagctttggccttgacaacattaacatgacccactacatccagcacctgagttttggcgaggactatcccggtatagtgaatcctctagatcatacaaatgttaccgcgcctcaagcctctatgatgttccaatactttgtgaaggtagtacccactgtgtacatgaaggttgatggtgaagtactgcggactaatcaattctctgtaacccgccatgagaaggtcgctaacgggctgttgggggatcaaggcctgccgggagtgtttgtcctgtacgaactatccccaatgatggtcaagctcacagagaaacaccgttcctttactcacttcctgaccggagtttgcgccatcattggcggtatgtttaccgtggccggtttgattgatagcttgatctaccattcagcacgcgcaatccagaagaagatcgaccttggaaaaaccacatag

SEQ ID NO: 188653 - DNA, 597 bp, Artificial Sequence
  derived and/or modified sequence
ctgtccgttgcattttcatgctgctacggcgcagaggccgaggacattaagtgctgtaatacttgtgaagacgtacgggaggcataccggcgtcgtggatgggctttcaagaatcccgacaccattgagcagtgcaggcgcgaaggcttttcacagaaaatgcaagagcagaagaacgagggatgccaggtttatgggtttttggaggtcaataaagtggctggaaactttcactttgctccgggtaaatcttttcagcagtcgcatgttcacgtgcatgatctgcagagctttggacttgacaacattaatatgacccactacatccagcatctgagctttggagaggattaccccggaattgtgaatccacttgatcacaccaacgtgactgcaccccaggccagcatgatgttccagtattttgtgaaagtcgtccccaccgtctacatgaaagttgatggcgaggtccttagaacgaaccagttctcagtgacccggcacgagaaggtggcaaatggactgctgggagaccaggggctgcctggcgtctttgcacatcttcccctatcaacctcccaccctgaggaaaattag

SEQ ID NO: 188654 - DNA, 1197 bp, Artificial Sequence
  derived and/or modified sequence
atggaagccctcggtaagctgaaacaatttgatgcatatccaaaaacccttgaagattttcgcgttaaaacttgtgggggtgcaaccgtgacgattgtgtctggcttactcatgcttctcttgttccttagtgagctgcaatattatctaactacggaagtgcaccccgaactgtatgtagacaagagccgcggagacaaacttaagatcaatatagatgtgcttttcccacacatgccatgcgcttacttatcaatagacgcgatggatgtggccggtgagcagcaacttgacgtcgagcacaatttgtttaaacagcgacttgacaaagacgggatccccgtgtcaagcgaagctgaaaggcatgagttagggaaagtggaggtcacagtgttcgacccagatagcctcgaccccgaccgatgcgagtcatgttatggcgctgaggctgaagatattaaatgttgcaacacctgcgaggacgttcgggaagcataccgaagaaggggatgggctttcaaaaaccccgataccatcgagcagtgtcgccgagaaggtttctcacaaaagatgcaggagcagaagaatgagggttgtcaggtgtacgggtttctagaggtgaataaagtggctggaaacttccatttcgcacccggtaaaagcttccagcagtcccacgtccatggatgcgtttgtcggctgaaaatgattgcccgttccctcgcttgcgtgcacgatctgcagagttttggcctggacaacattaatatgacacactacatccagcatctctcttttggggaggattacccagggatagttaaccccctggaccacaccaacgttactgcaccacaagcttccatgatgttccagtattttgtgaaagttgtgcccactgtgtatatgaaggtcgatggtgaagtgctgagaacaaatcagttcagcgtcacccgacatgagaaagtggctaacggactcttgggggatcaggggctgcctggcgtgtttgtgctctacgagctctctccaatgatggtaaaacttacagagaaacacagatcattcacacattttctgaccggagtctgcgcgataataggcggtatgttcaccgtggccggactcatagatagcttgatttatcattccgccagggccatccagaagaaaattgacctgggtaaaaccacttag

SEQ ID NO: 188655 - protein, 242 aa, Artificial Sequence
  derived and/or modified sequence
MAAPAVKVARGWSGLALGVRRAVLQLPGLTQVRWSRYSPEFKDPLIDKEYYRKPVEELTEEEKYVRELKKTQLIKAAPAGKTSSVFEDPVISKFTNMMMIGGNKVLARSLMIQTLEAVKRKQFEKYHAASAEEQATIERNPYTIFHQALKNCEPMIGLVPILKGGRFYQVPVPLPDRRRRFLAMKWMITECRDKKHQRTLMPEKLSHKLLEAFHNQGPVIKRKHDLHKMAEANRALAHYRWW

SEQ ID NO: 188656 - DNA, 729 bp, Artificial Sequence
  derived and/or modified sequence
atggccgccccagccgtcaaggtggcccgtggatggtctggtctggcccttggggtgaggcgagccgtgctgcagctccctggactgacacaagtacgatggtcccgctactccccagaatttaaagaccccttaatagataaggagtattaccgcaagccggtggaagaactgacggaggaggagaagtacgtgcgagaattgaagaagacgcagctcatcaaggccgctcctgcgggaaaaacctcaagtgttttcgaggatccagttatatccaaattcacaaacatgatgatgattgggggcaacaaggtgctcgctcggtccctgatgattcagactctggaagctgtaaagcgaaagcagttcgagaagtatcatgcagccagtgcagaagaacaggccacaatagagagaaacccctacacaatctttcaccaggcccttaagaactgtgagcctatgattggactggtgcctatcctcaagggaggccggttttaccaggtgcctgtccccctacccgacaggaggaggcggttcctcgcaatgaaatggatgattaccgagtgccgggataagaagcatcagaggacactcatgcccgagaagctgagtcataagttgctcgaggccttccacaaccagggacccgtgataaagaggaaacatgacctccataagatggccgaagccaatcgagcgcttgctcattacagatggtggtag

SEQ ID NO: 188657 - DNA, 729 bp, Artificial Sequence
  derived and/or modified sequence
atggccgccccagctgtgaaggtggcccggggctggagcggcctggccctgggcgtgcggcgggctgtgctgcagctgcccggcctgacccaggtgcgctggagccgctacagccctgagttcaaggaccccctgattgacaaggagtactacaggaagcctgtggaggagctgacagaggaggagaagtatgtgcgggagctgaagaagacccagctgatcaaggccgccccagctgggaagaccagctctgtgtttgaagatcctgtgatcagcaagttcaccaacatgatgatgattggaggcaacaaggtgctggcccggagcctgatgatccagaccctggaggccgtgaagaggaagcagtttgagaagtaccacgccgccagcgctgaggagcaggccaccattgaaagaaacccctacaccatcttccaccaggccctgaagaactgtgagcccatgattggcctggtgcccatcctgaagggcggccgcttctaccaggtgcctgtgcccctgcctgacagaagaagacgcttcctggccatgaagtggatgatcacagagtgccgggacaagaagcaccagaggaccctgatgcctgagaagctgagccacaagctgctggaggccttccacaaccagggccctgtgatcaagaggaagcatgacctgcacaagatggccgaggccaacagagccctggcccactaccgctggtggtag

SEQ ID NO: 188658 - DNA, 1414 bp, Artificial Sequence
  derived and/or modified sequence
ctgagaggagtgagtgccgtcaccgagggccgcgccagactgcgacggatacagggagggcaagggtttccttttggcgctcccctttggaccccggagtgaaaaactctaacgtccagatcagtggagagaaacgcagatttaggaccctgaggagtctttttcacccgtttcccgtcactcgctcaggcgcgccgagggcagtccttgtggggtcctcgtggccagccaagatggctgcccccgcagtgaaggttgcccgaggatggtcgggcctggcgttgggcgtgcggcgggctgtcttgcagcttccagggctaactcaggtgagatggagccgctatagtcctgaattcaaggatcccttgattgacaaggaatattatcgcaagccagtggaggagctaactgaggaggagaaatatgttcgggagctcaagaagactcagctcatcaaagctgctccagcagggaaaacaagttctgtgtttgaagacccagtcatcagtaaattcaccaacatgatgatgataggaggaaacaaagtactggccagatccctcatgattcagactctggaagctgtgaaaaggaagcagtttgagaagtaccatgccgcttctgcagaggaacaggcaaccatcgaacgcaacccctacaccatcttccatcaagcactgaaaaactgtgagcctatgattgggctggtacccatcctcaagggaggccgtttctaccaggtccctgtacccctacccgaccggcgtcgccgcttcctagccatgaagtggatgatcactgagtgccgggataaaaagcaccagcggacactgatgccggagaagctgtcacacaagctgctggaggctttccataaccagggccccgtgatcaagaggaagcatgacttgcacaagatggcagaggccaaccgtgccctggcccactaccgctggtggtagagtctccaggaggagcccagggccctctgccgcaagaaacagtgtgagctactgccacgctgaaaactacctgtgggttaaggatgtagttcctttgtaagggtgggcaggcctcgtaagaaagatgtagcagcatattcactatccgttaatccttctttctttgaggctggaacttgctctctctgcccctatttccttgtaaagagggagcacattgacttgggaatttcctccaggaaactcagggctgttttctcttcccttaggttggggcggacctttggatatataaaggaagcagttttagtatcagaaaagatttattagaaaattctcacgctgaactggtgtagcatgtggtgcagcattcagtgaaactggctggaggaaataggcttgtttccagagttgtccttatacaaaatgtataaaaagcagtttctggtgtg

SEQ ID NO: 188659 - DNA, 729 bp, Artificial Sequence
  derived and/or modified sequence
atggccgcccccgccgtgaaggtggcccggggctggagcggcctggctttaggggtgcgtcgggctgtcttacagttacccggtttgacgcaggttcggtggagcagatactcacctgaatttaaagacccgctgatcgataaggaatactaccggaagcccgtagaggagctgaccgaggaagaaaagtacgtgagagagctgaagaaaacccagctgattaaggccgcaccagccggcaaaaccagtagtgtcttcgaagaccccgttatcagcaaatttacgaatatgatgatgattggcggaaataaagttctggcccgctcgttaatgatccagactctcgaggccgtcaaaaggaaacaattcgagaagtatcacgcagcaagcgctgaggagcaggcgactatcgaaagaaatccctatacaatttttcaccaggcgctgaagaactgcgaacccatgattggtctagtccccatactcaagggcgggcggttctaccaggtgcctgtcccacttccagaccgcaggcggagatttttagctatgaagtggatgatcacagagtgcagagataagaaacaccagcgtaccttgatgccggaaaaactcagccacaaacttctcgaagcgtttcataatcaaggacccgtgatcaaacggaagcatgatctgcataagatggccgaagctaacagagcgctggcccactacaggtggtggtag

SEQ ID NO: 188660 - DNA, 729 bp, Artificial Sequence
  derived and/or modified sequence
atggccgctcctgctgtgaaagtggctcgcggttggagcggtctggccctgggtgtccgcagggcggtgctgcaactcccgggactaacccaggttagatggagcaggtactctccagaatttaaggatcccctgattgacaaagaatactaccgaaaaccagtggaggagctaactgaggaggagaagtatgtgcgggaactgaagaaaactcaactgatcaaggccgctcctgccggaaagacaagctctgtgttcgaagatccagtgatatcaaagttcacaaacatgatgatgattggaggtaataaggtactcgccaggagcttaatgatccagaccttggaggccgtcaaaagaaaacagtttgaaaagtatcacgccgcaagtgccgaggaacaggctacaatcgagcggaacccctatacaatcttccaccaagccctgaagaattgcgagcccatgatcggcttggtgcctatccttaaggggggtagattctaccaggttccagttcccctacccgatcggaggcgccgtttcctggcaatgaagtggatgattaccgagtgccgcgacaagaaacaccagagaacactaatgcccgagaaattatcccacaagctgctcgaagcgttccacaatcagggcccagtcatcaagcgcaagcatgaccttcataagatggccgaggccaaccgcgcactggcccattatcggtggtggtag

SEQ ID NO: 188661 - DNA, 729 bp, Artificial Sequence
  derived and/or modified sequence
atggccgcccccgccgtgaaggtggccagaggctggagcggcctggccctgggcgtgagaagagccgtgctgcagctgcccggcctgacccaggtgagatggagcagatacagccccgagttcaaggaccccctgatcgacaaggagtactacagaaagcccgtggaggagctgaccgaggaggagaagtacgtgagagagctgaagaagacccagctgatcaaggccgcccccgccggcaagaccagcagcgtgttcgaggaccccgtgatcagcaagttcaccaacatgatgatgatcggcggcaacaaggtgctggccagaagcctgatgatccagaccctggaggccgtgaagagaaagcagttcgagaagtaccacgccgccagcgccgaggagcaggccaccatcgagagaaacccctacaccatcttccaccaggccctgaagaactgcgagcccatgatcggcctggtgcccatcctgaagggcggcagattctaccaggtgcccgtgcccctgcccgacagaagaagaagattcctggccatgaagtggatgatcaccgagtgcagagacaagaagcaccagagaaccctgatgcccgagaagctgagccacaagctgctggaggccttccacaaccagggccccgtgatcaagagaaagcacgacctgcacaagatggccgaggccaacagagccctggcccactacagatggtggtag

SEQ ID NO: 188662 - protein, 133 aa, Artificial Sequence
  derived and/or modified sequence
MEEDQELERKISGLKTSMAEGERKTALEMVQAAGTDRHCVTFVLHEEDHTLGNSLRYMIMKNPEVEFCGYTTTHPSESKINLRIQTRGTLPAVEPFQRGLNELMNVCQHVLDKFEASIKDYKDQKASRNESTF

SEQ ID NO: 188663 - DNA, 402 bp, Artificial Sequence
  derived and/or modified sequence
atggaggaggatcaggagctggaacgaaaaatctccgggttaaagacctctatggcagaaggtgaaagaaagaccgccttggagatggtgcaggccgcagggacagataggcactgcgtgaccttcgttctgcacgaagaggaccacaccctggggaactcactgaggtatatgataatgaaaaacccagaagttgagttctgcggctatactaccactcacccaagtgaatcaaagataaacttaagaatacaaacacgcggaacgctccctgccgtggaacccttccagcggggacttaatgagctgatgaatgtgtgtcagcacgtactggataaatttgaggcttccataaaagactacaaggaccagaaggcaagccgtaatgaatctaccttttag

SEQ ID NO: 188664 - DNA, 402 bp, Artificial Sequence
  derived and/or modified sequence
atggaggaggatcaagagctggagcggaaaatctctgggcttaaaaccagcatggctgagggcgagcgtaagacggctcttgaaatggtgcaggcggccgggacagacaggcactgcgtgactttcgtgctccacgaagaggatcatactctgggaaattctttacggtatatgatcatgaaaaacccagaagtcgagttttgtgggtacacaacgacccacccttccgagtccaagatcaacctgaggatccagacgagaggaacattacccgctgtagaaccgtttcaacggggcctcaatgagctgatgaacgtgtgtcagcatgtgctggacaaatttgaagccagtatcaaggattataaggaccagaaagcatcacgcaacgagagtaccttctag

SEQ ID NO: 188665 - DNA, 402 bp, Artificial Sequence
  derived and/or modified sequence
atggaggaggaccaggagctggagaggaagatcagcggcctgaagacctccatggccgagggggagaggaagacagccctggagatggtgcaggccgccggcacagacagacactgtgtgacctttgtgctgcacgaggaggaccacaccctgggcaacagcctgcgctacatgatcatgaagaaccctgaggtggagttctgtggctacaccaccacccaccccagcgagagcaagatcaacctgcgcatccagacccggggcaccctgcctgctgtggagcccttccagaggggcctgaatgagctgatgaatgtgtgccagcacgtgctggacaagtttgaggccagcatcaaggactacaaggaccagaaggccagcagaaatgaaagcaccttctag

SEQ ID NO: 188666 - DNA, 402 bp, Artificial Sequence
  derived and/or modified sequence
atggaggaggaccaggagctggagcggaagatcagcggcctgaagacaagcatggcagagggtgagcggaagaccgctctggagatggtacaggctgctggaaccgaccgccattgcgtgacattcgtgttgcatgaagaggaccacacgctgggcaattctctgcgctacatgatcatgaaaaacccagaggtggaattctgcggctataccacaacccatccgtccgaaagcaagatcaaccttcgaattcagactaggggtaccctgccagcggttgaaccttttcagcgcggactgaacgagctcatgaatgtctgccaacacgtgctcgacaaattcgaagcatcgattaaagactacaaagatcaaaaggctagtcggaatgagtctactttctag

SEQ ID NO: 188667 - DNA, 402 bp, Artificial Sequence
  derived and/or modified sequence
atggaggaggaccaggagctggagcggaagatcagcggcctgaagactagcatggcagaaggggaacgcaagaccgcattggaaatggtgcaggcagcaggcaccgataggcactgcgtcacatttgttctgcacgaggaagatcacacactggggaactcattgagatacatgatcatgaagaatcccgaggtcgaattctgtggctacaccacaacccaccccagtgagtccaagatcaacctgaggattcagaccagggggaccctccccgccgtagagcccttccagagaggactaaatgagctcatgaatgtgtgccagcatgtgctcgacaagttcgaagcatccattaaagattataaagatcagaaagcttcccgcaatgagtcaacgttctag

SEQ ID NO: 188668 - DNA, 1626 bp, Artificial Sequence
  derived and/or modified sequence
ccccactcgccccgggctgtccccgccgcccgcctgattcccctgcggaagccccgctggctaggtgtctgcgcgcacccccggccgccgccaagagtggcacagctggggaaggagtgaacatccagaggaatcgcggggcggggtggggggaggccaggagaacaggtggcgcagggaagcagaaacgtagttgcgctggacagctggagtcgggcagggtcggggccagcggcgaggggacaagaagggccgattcgagaggaagcgcacctgagggagcacagcgaaggccgggacgcagggagctggatggagagcgagcctgggcggcgaaaggttgccgaggcgggggctgggcgcctgggaacaaagttgaaaatgcaactgcaagctccccggtgaaacaaataccgccttcaaccttcgtattctgtggtgactcatctcgcacgtgacccccctccctcttcaaggtgtgttgaccgactacagtttaagcctgtcgtcccacaaaaggcccgggagggccggggtcccaggaagggccatcctgggtcaacaccgccccagttgggaagtcgggccgctttcggacttgccactgggaagggaagtgatttgggggcggcaggtaaggccgcgccccttcgccatcacctggggaaaggtaccagagttgagccggggcgcccgcaggcctgtctgggcctcggggtaaggcggcgctggccccgccccctgcccctcccgccgcgagtggcctcgcgtggtcgcccaggtgagccgcggggccgcgagccaccgctcaccccgcgtcggggcgggggctgggggtggagcctcatgccccgccccgcggctgggccctgccgcgccgctgcggctcctcctccctccttccgtcctccgcgccttccgtcggtcggtccttgcttcctgcttcgcctccgcgcctcgcgctatgggacagagcccccgatccgccagcaccacctgaggatccagaaaccgccccagcgatggaagaggatcaggagctggagagaaaaatatctggattgaagacctcaatggctgaaggcgagaggaagacagccctggaaatggtccaggcagctggaacagatagacactgtgtgacatttgtattgcacgaggaagaccataccctaggaaattctctacgttacatgatcatgaagaacccggaagtggaattttgtggttacactacgacccatccttcagagagcaaaattaatttacgcattcagactcgaggtacccttccagctgttgagccatttcagagaggcctgaatgagctcatgaatgtctgccaacatgtgcttgacaagtttgaggccagcataaaggactataaggatcaaaaagcaagcagaaatgaatccacattctagtcctttatgcagtatacaaggagaactgtcctgtaggatattctcttcctgatggtgcagaacccagaattagaagtttgtggttacagcatactctgtccttcagaaaggcgtgattctagctgttgaccccttgcagctgttggaatctctgcaagaacctctgtattcttctaataaattccctcttttatttaaacta

SEQ ID NO: 188669 - DNA, 690 bp, Artificial Sequence
  derived and/or modified sequence
ccttgcttcctgcttcgcctccgcgcctcgcgctatgggacagagcccccgatccgccagcaccacctgaggatccagaaaccgccccagcgatggaagaggatcaggagctggagagaaaaatatctggattgaagacctcaatggctgaaggcgagaggaagacagccctggaaatggtccaggcagctggaacagatagacactgtgtgacatttgtattgcacgaggaagaccataccctaggaaattctctacgttacatgatcatgaagaacccggaagtggaattttgtggttacactacgacccatccttcagagagcaaaattaatttacgcattcagactcgaggtacccttccagctgttgagccatttcagagaggcctgaatgagctcatgaatgtctgccaacatgtgcttgacaagtttgaggccagcataaaggactataaggatcaaaaagcaagcagaaatgaatccacattctagtcctttatgcagtatacaaggagaactgtcctgtaggatattctcttcctgatggtgcagaacccagaattagaagtttgtggttacagcatactctgtccttcagaaaggcgtgattctagctgttgaccccttgcagctgttggaatctctgcaagaacctctgtattcttctaataaattccctcttttattt

SEQ ID NO: 188670 - DNA, 402 bp, Artificial Sequence
  derived and/or modified sequence
atggaagaggaccaagaactggagaggaaaattagcgggttgaagacaagtatggcagagggcgagagaaagacggcactggagatggttcaagccgctggtacagatcgacactgtgtcaccttcgtgctgcacgaagaagatcatacactgggaaacagcctgcggtacatgattatgaagaatcccgaagtggagttttgcgggtataccaccacccaccctagtgaatccaagattaatctgagaatccagacacggggaactctgcccgcagtggaaccatttcaacgcggactgaacgagctgatgaatgtctgtcagcatgtcttggacaagtttgaggctagcatcaaagactacaaagatcaaaaggctagtcggaatgagtctaccttttag

SEQ ID NO: 188671 - DNA, 402 bp, Artificial Sequence
  derived and/or modified sequence
atggaagaggaccaggagctggaaagaaagattagcggcctgaagacatccatggcagaaggcgagcgcaagaccgcccttgagatggtgcaggcggctgggacagaccgtcactgcgttaccttcgtgctgcacgaggaagatcataccttagggaattcactccgatatatgatcatgaagaaccctgaggtagagttttgcgggtatacgacgactcacccttccgaatccaaaattaacctgagaatccaaacaagggggactctgcccgctgtggaaccatttcaaaggggtttgaatgagttaatgaacgtttgtcaacacgtgcttgacaagttcgaggcctccataaaggactataaagaccagaaggcatcaaggaacgagagtactttttag

SEQ ID NO: 188672 - DNA, 402 bp, Artificial Sequence
  derived and/or modified sequence
atggaggaggaccaggagctggagagaaagatcagcggcctgaagaccagcatggccgagggcgagagaaagaccgccctggagatggtgcaggccgccggcaccgacagacactgcgtgaccttcgtgctgcacgaggaggaccacaccctgggcaacagcctgagatacatgatcatgaagaaccccgaggtggagttctgcggctacaccaccacccaccccagcgagagcaagatcaacctgagaatccagaccagaggcaccctgcccgccgtggagcccttccagagaggcctgaacgagctgatgaacgtgtgccagcacgtgctggacaagttcgaggccagcatcaaggactacaaggaccagaaggccagcagaaacgagagcaccttctag

SEQ ID NO: 188673 - protein, 123 aa, Artificial Sequence
  derived and/or modified sequence
MARGSALLLASLLLAAALSASAGLWSPAKEKRGWTLNSAGYLLGPHAVGNHRSFSDKNGLTSKRELRPEDDMKPGSFDRSIPENNIMRTIIEFLSFLHLKEAGALDRLLDLPAAASSEDIERS

SEQ ID NO: 188674 - DNA, 818 bp, Artificial Sequence
  derived and/or modified sequence
ccggtgacgcgactccgggcggctcccgggtgcgccgcatatatagcagcggcggcggtggcggcggccacaccgggcggcggacacgtggagggacccggcccgcgccttctgcccctgctgccggccgcgccatgcggtgagcgccccaggccgccagagcccacccgacccggcccgacgcccggacctgccgcccagacccgccaccgcacccggaccccgacgctccgaacccgggcgcagccgcagctcaagatggcccgaggcagcgccctcctgctcgcctccctcctcctcgccgcggccctttctgcctctgcggggctctggtcgccggccaaggaaaaacgaggctggaccctgaacagcgcgggctacctgctgggcccacatgccgttggcaaccacaggtcattcagcgacaagaatggcctcaccagcaagcgggagctgcggcccgaagatgacatgaaaccaggaagctttgacaggtccatacctgaaaacaatatcatgcgcacaatcattgagtttctgtctttcttgcatctcaaagaggccggtgccctcgaccgcctcctggatctccccgccgcagcctcctcagaagacatcgagcggtcctgagagcctcctgggcatgtttgtctgtgtgctgtaacctgaagtcaaaccttaagataatggataatcttcggccaatttatgcagagtcagccattcctgttctctttgccttgatgttgtgttgttatcatttaagattttttttttttggtaattattttgagtggcaaaataaagaatagcaatta

SEQ ID NO: 188675 - DNA, 372 bp, Artificial Sequence
  derived and/or modified sequence
atggcccgaggtagcgccctgctcctggccagcctcctgttagccgcagccttgtcggcatctgctgggttgtggtctccagcgaaagaaaagcgcgggtggacacttaacagtgccgggtacctattaggccctcacgcagtggggaaccaccggtccttcagcgataaaaacggcctcacctccaaacgggagttgcgccccgaggatgatatgaaaccagggagcttcgatcggtcaatacccgagaataacatcatgagaacaatcatcgagttcctgtctttcctgcatctgaaagaagccggggcgctggaccgcctgttggacctgccagctgccgcctcatcggaggacatcgaaagatcctag

SEQ ID NO: 188676 - DNA, 372 bp, Artificial Sequence
  derived and/or modified sequence
atggcccggggcagcgccctgctgctggccagcctgctgctggccgccgccctgagcgccagcgctggcctgtggagccctgccaaggagaagaggggctggaccctgaacagcgctggctacctgctgggcccccatgctgtgggcaaccaccgctccttcagtgacaagaatggcctgaccagcaagcgggagctgcggccagaagatgacatgaagccaggcagctttgacaggagcatccctgagaacaacatcatgaggaccatcatcgagttcctgtccttcctgcacctgaaggaggccggggccctggaccggctgctggacctgcctgctgctgccagcagcgaggacatcgagaggagctag

SEQ ID NO: 188677 - DNA, 372 bp, Artificial Sequence
  derived and/or modified sequence
atggcccggggcagcgccctgctgctggccagcctgctgctggccgcggccctaagcgccagcgccggactgtggtcccctgccaaggaaaaaagagggtggaccctgaactctgctggctatttactggggccccatgcagtaggaaaccaccgtagctttagtgataaaaacggtctgacaagcaagagagaactacgcccggaggacgacatgaaacccggatcattcgatagaagcatccctgagaacaacatcatgcgcacaataattgagtttctgtctttcttacatcttaaagaagccggagccctggataggctgcttgatttgcctgccgcggcgtcaagtgaggacattgaacgtagttag

SEQ ID NO: 188678 - DNA, 372 bp, Artificial Sequence
  derived and/or modified sequence
atggcacggggatccgctcttttgctcgcatccctcctgctggccgctgcacttagcgcctcggccggactctggagcccggctaaggagaagcggggttggacattgaacagcgccggatacctactgggaccacacgcagtcggcaaccataggtctttctctgataagaatggcctcaccagtaagagagagctgaggcccgaggacgatatgaaacccggaagcttcgatcgctctatcccggagaataacattatgagaactattatagagtttttgtctttcctgcatctgaaggaagccggagctctcgaccgattactggatctccctgctgcagccagttccgaggacatcgagagaagttag

SEQ ID NO: 188679 - DNA, 372 bp, Artificial Sequence
  derived and/or modified sequence
atggccagaggcagcgccctgctgctggccagcctgctgctggccgccgccctgagcgccagcgccggcctgtggagccccgccaaggagaagagaggctggaccctgaacagcgccggctacctgctgggcccccacgccgtgggcaaccacagaagcttcagcgacaagaacggcctgaccagcaagagagagctgagacccgaggacgacatgaagcccggcagcttcgacagaagcatccccgagaacaacatcatgagaaccatcatcgagttcctgagcttcctgcacctgaaggaggccggcgccctggacagactgctggacctgcccgccgccgccagcagcgaggacatcgagagaagctag

SEQ ID NO: 188680 - protein, 319 aa, Artificial Sequence
  derived and/or modified sequence
MASSAAGCVVIVGSGVIGRSWAMLFASGGFQVKLYDIEQQQIRNALENIRKEMKLLEQAGSLKGSLSVEEQLSLISGCPNIQEAVEGAMHIQECVPEDLELKKKIFAQLDSIIDDRVILSSSTSCLMPSKLFAGLVHVKQCIVAHPVNPPYYIPLVELVPHPETAPTTVDRTHALMKKIGQCPMRVQKEVAGFVLNRLQYAIISEAWRLVEEGIVSPSDLDLVMSEGLGMRYAFIGPLETMHLNAEGMLSYCDRYSEGIKHVLQTFGPIPEFSRATAEKVNQDMCMKVPDDPEHLAARRQWRDECLMRLAKLKSQVQPQ

SEQ ID NO: 188681 - DNA, 960 bp, Artificial Sequence
  derived and/or modified sequence
atggcctcatcagccgcaggttgcgtggtgattgtgggcagcggagtcattggacgatcttgggctatgctcttcgccagcggcggcttccaagttaagctgtatgatatcgagcagcaacagattcgcaatgctcttgagaatattagaaaagagatgaaactactggagcaggcaggaagtctgaaaggaagtttgagcgttgaagaacagctttccctgatttccggctgtccgaatatccaagaggccgttgagggggcgatgcatatccaggagtgcgttcccgaggacctggagctgaagaagaaaatcttcgcccagctcgacagtatcatcgatgatcgcgtcatcttatcctcatcaacctcttgcttaatgcccagcaaactgttcgcggggctggttcacgtcaaacagtgcatcgtggctcaccccgtcaatcccccatattatatccctcttgttgagctggtgccccaccctgagactgcacctaccaccgtcgatcgcactcatgccctcatgaaaaagatagggcaatgcccaatgcgcgtccagaaagaagtagctggcttcgttctaaaccggctgcagtacgccattattagtgaggcctggcgattagtagaagaaggaatagtgagtcccagcgacctcgatctggtcatgtctgaggggttgggtatgcgttacgcctttatcggtcccctcgaaacaatgcatcttaatgccgagggtatgctgtcttactgcgaccggtactctgaggggattaaacatgttctacagacctttggaccaatacccgagtttagcagagccactgcggaaaaggtcaatcaggacatgtgcatgaaggtgcctgatgatcctgagcacctggcagcaaggcggcaatggcgggatgagtgcctgatgcgcctcgctaagctgaagtcgcaagtgcagccgcagtag

SEQ ID NO: 188682 - DNA, 960 bp, Artificial Sequence
  derived and/or modified sequence
atggccagcagcgctgctggctgtgtggtgattgtgggcagcggcgtgattggccgctcctgggccatgctgtttgccagcggcggcttccaggtgaagctgtatgacatcgagcagcagcagatcagaaatgccctggagaacatcaggaaggagatgaagctgctggagcaggccggcagcctgaagggcagcctgtctgtggaggagcagctgagcctcatcagcggctgccccaacatccaggaggccgtggagggcgccatgcacatccaggagtgtgtgcctgaggacctggagctgaagaagaagatctttgcccagctggacagcatcattgatgacagagtcatcctgagcagcagcaccagctgcctgatgcccagcaagctgtttgctggcctggtgcacgtgaagcagtgcatcgtggcccaccctgtgaaccccccctactacatccccctggtggagctggtgccccaccctgagacagcccccaccaccgtggacaggacccacgccctgatgaagaagattggccagtgccccatgagggtgcagaaggaggtggccggctttgtgctgaaccggctgcagtatgccatcatcagcgaggcctggaggctggtggaggagggcatcgtgagccccagcgacctggacctggtgatgtctgagggcctgggcatgagatatgccttcatcggccccctggagaccatgcacctgaatgctgagggcatgctgagctactgtgaccgctacagcgagggcatcaagcacgtgctgcagaccttcggccccatccctgagttcagccgggccacagctgagaaggtgaaccaggacatgtgcatgaaggtgcctgatgatcctgagcacctggccgcccggcggcagtggagagatgagtgcctgatgaggctggccaagctgaagagccaggtgcagccccagtag

SEQ ID NO: 188683 - DNA, 960 bp, Artificial Sequence
  derived and/or modified sequence
atggccagcagcgccgccggctgcgtggtgatcgtgggcagcggcgttataggccgctcttgggcgatgttgttcgctagcggaggatttcaggtgaagctctacgacatcgaacagcagcagatccggaatgccctcgaaaacatccgcaaagaaatgaaacttctagagcaggcgggatctctgaagggatctttgagcgtggaagaacagctctcccttatttctggctgcccaaacatacaggaagctgtggagggcgccatgcatatccaagaatgcgtgcctgaggatttagaactgaagaaaaaaatttttgctcagctggattctatcattgacgaccgcgtgatcctgagcagttctacaagctgtctgatgccgagcaagctttttgctgggctggttcacgtcaagcagtgcatagtagcacatcccgtcaatccaccttactatatccccctggtcgagctggtccctcacccagaaaccgccccaacaacggtggacagaacacatgcactgatgaaaaagattggacaatgtccaatgcgtgtccagaaggaggtagctggctttgtgctcaatcggttgcagtatgcaatcatctccgaagcttggcggttggtggaggaagggatcgtgtctccctcggatttagatctggtaatgtctgaaggtctgggcatgaggtatgcctttatcggaccactggagacaatgcatctgaatgccgaaggcatgctgtcatactgtgatcggtattcagaaggaataaaacacgtgttgcagacatttgggccaattcccgaattttctcgcgctaccgcggaaaaggtaaatcaggatatgtgtatgaaggtaccagatgaccctgagcacctggccgccagaaggcagtggagagatgagtgccttatgcgactggcaaagctgaagagtcaggttcagccgcagtag

SEQ ID NO: 188684 - DNA, 960 bp, Artificial Sequence
  derived and/or modified sequence
atggcaagttcggccgcaggctgtgtggtcatcgtcgggtcaggagtcattggccgatcatgggccatgctgttcgccagtggtggattccaagtaaagctgtatgacatcgaacaacagcagatcagaaatgccttggagaacattaggaaagagatgaagttgctcgaacaggccggaagtctgaaggggagcctctctgtcgaggaacagctgagcctgattagcggttgcccaaatatacaggaagctgtcgaaggcgcaatgcacattcaggaatgcgtccccgaggatctggagctgaaaaagaagatcttcgcccagctggactccatcattgatgatcgggtcattttaagcagtagcacgtcctgcctcatgccttcaaaactgtttgcgggattggtgcacgtgaagcagtgtatcgtcgcccacccagtgaaccccccttactatattcccttagtcgagttagtcccacaccctgagaccgctcccacgaccgtggacaggacacacgcactgatgaagaagattggccagtgccctatgcgcgtccagaaggaggtggccggattcgtgctgaacagactccaatacgctatcatctctgaggcgtggaggcttgttgaagagggtatcgtgagtccctctgatctggacttagttatgagtgaggggctggggatgcgatacgccttcatcggccctctcgaaaccatgcatctaaatgccgaagggatgctgtcttattgcgatcgatacagcgaagggatcaagcacgtgctccagacttttggccctattccagagttctcgcgtgcgaccgcagagaaagtgaatcaggacatgtgtatgaaggttcccgacgaccctgaacatcttgccgcacgtcgccagtggagagatgagtgtctcatgaggctcgctaaacttaagtcccaggtgcagccccagtag

SEQ ID NO: 188685 - DNA, 1485 bp, Artificial Sequence
  derived and/or modified sequence
agagctcgcagctccgccggcgcctggtcccagcgcccgcggcgccgcgtccccggcccaaccatggcgtcctccgcggccggctgcgtggtgatcgttggcagtggagtcattgggcgaagctgggccatgctgtttgccagtggaggcttccaggtgaaactctatgacattgagcaacagcagataaggaacgccctggaaaacatcagaaaggagatgaagttgctggagcaggcaggttctctgaaaggctccctgagtgtggaagagcagctgtcactcatcagtggttgtcccaatatccaagaagcagtagagggtgccatgcacattcaggaatgtgttccagaagatctagaactgaagaagaagatttttgctcagttagattccatcattgatgatcgagtgatcttaagcagttccacttcttgtctcatgccttccaagttgtttgctggcttggtccatgtgaagcaatgcatcgtggctcatcctgtgaatccgccatactacatcccgctggttgagctggtcccccacccggagacggcccctacgacagtggacagaacccacgccctgatgaagaagattggacagtgccccatgcgagtccagaaggaggtggccggcttcgttctgaaccgcctgcaatatgcaatcatcagcgaggcctggcggctagtggaggaaggaatcgtgtctcctagtgacctggaccttgtcatgtcagaagggttgggcatgcggtatgcattcattggacccctggaaaccatgcatctcaatgcagaaggtatgttaagctactgcgacagatacagcgaaggcataaaacatgtcctacagacttttggacccattccagagttttccagggccactgctgagaaggttaaccaggacatgtgcatgaaggtccctgatgacccggagcacttagctgccaggaggcagtggagggacgagtgcctcatgagactcgccaagttgaagagtcaagtgcagccccagtgaatttcttgtaatgcagcttccactcctctcattggaggccctatttgggaacactgcaagcccttaatcagccctctgtgacataggtagcagcccacggagatcctaagctggctgtcttgtgtgcagcctgagtggggtggtgcaggccggtagtctgcccgtcactttggatcatagccctgggcctggcggcacagcagcacttgcgttctcggggctgtcgatttcctgccacctgggcagataacctggagattttcaccttttcttttcagcttgattgcatttgactatattttacagccagtgattgtagtttcatgttaatatgtggcaaaatatttttgtaattattttctaatccctttctgagtactctggggccctgcatttatgaggcacctaccttcattttgctaacgcttattctgaataaaagtttttgattccttaaagaca

SEQ ID NO: 188686 - DNA, 960 bp, Artificial Sequence
  derived and/or modified sequence
atggccagcagcgccgccggctgcgtggtgatcgtgggcagcggcgtgatcggcagaagctgggccatgctgttcgccagcggcggcttccaggtgaagctgtacgacatcgagcagcagcagatcagaaacgccctggagaacatcagaaaggagatgaagctgctggagcaggccggcagcctgaagggcagcctgagcgtggaggagcagctgagcctgatcagcggctgccccaacatccaggaggccgtggagggcgccatgcacatccaggagtgcgtgcccgaggacctggagctgaagaagaagatcttcgcccagctggacagcatcatcgacgacagagtgatcctgagcagcagcaccagctgcctgatgcccagcaagctgttcgccggcctggtgcacgtgaagcagtgcatcgtggcccaccccgtgaaccccccctactacatccccctggtggagctggtgccccaccccgagaccgcccccaccaccgtggacagaacccacgccctgatgaagaagatcggccagtgccccatgagagtgcagaaggaggtggccggcttcgtgctgaacagactgcagtacgccatcatcagcgaggcctggagactggtggaggagggcatcgtgagccccagcgacctggacctggtgatgagcgagggcctgggcatgagatacgccttcatcggccccctggagaccatgcacctgaacgccgagggcatgctgagctactgcgacagatacagcgagggcatcaagcacgtgctgcagaccttcggccccatccccgagttcagcagagccaccgccgagaaggtgaaccaggacatgtgcatgaaggtgcccgacgaccccgagcacctggccgccagaagacagtggagagacgagtgcctgatgagactggccaagctgaagagccaggtgcagccccagtag

SEQ ID NO: 188687 - protein, 1365 aa, Artificial Sequence
  derived and/or modified sequence
METQLQSIFEEVVKTEVIEEAFPGMFMDTPEDEKTKLISCLGAFRQFWGGLSQESHEQCIQWIVKFIHGQHSPKRISFLYDCLAMAVETGLLPPRLVCESLINSDTLEWERTQLWALTFKLVRKIIGGVDYKGVRDLLKVILEKILTIPNTVSSAVVQQLLAAREVIAYILERNACLLPAYFAVTEIRKLYPEGKLPHWLLGNLVSDFVDTFRPTARINSICGRCSLLPVVNNSGAICNSWKLDPATLRFPLKGLLPYDKDLFEPQTALLRYVLEQPYSRDMVCNMLGLNKQTLNIAQHKQRCPVLEDQLVDLVVYAMERSETEEKFDDGGTSQLLWQHLSSQLIFFVLFQFASFPHMVLSLHQKLAGRGLIKGRDHLMWVLLQFISGSIQKNALADFLPVMKLFDLLYPEKEYIPVPDINKPQSTHAFAMTCIWIHLNRKAQNDNSKLQIPIPHSLRLHHEFLQQSLRNKSLQMNDYKIALLCNAYSTNSECFTLPMGALVETIYGNGIMRIPLPGTNCMASGSITPLPMNLLDSLTVHAKMSLIHSIATRVIKLAHAKSSVALAPALVETYSRLLVYMEIESLGIKGFISQLLPTVFKSHAWGILHTLLEMFSYRMHHIQPHYRVQLLSHLHTLAAVAQTNQNQLHLCVESTALRLITALGSSEVQPQFTRFLSDPKTVLSAESEELNRALILTLARATHVTDFFTGSDSIQGTWCKDILQTIMSFTPHNWASHTLSCFPGPLQAFFKQNNVPQESRFNLKKNVEEEYRKWKSMSNENDIITHFSMQGSPPLFLCLLWKMLLETDHINQIGYRVLERIGARALVAHVRTFADFLVYEFSTSAGGQQLNKCIEILNDMVWKYNIVTLDRLILCLAMRSHEGNEAQVCYFIIQLLLLKPNDFRNRVSDFVKENSPEHWLQNDWHTKHMNYHKKYPEKLYFEGLAEQVDPPVQIQSPYLPIYFGNVCLRFLPVFDIVIHRFLELLPVSKSLETLLDHLGGLYKFHDRPVTYLYNTLHYYEMHLRDRAFLKRKLVHAIIGSLKDNRPQGWCLSDTYLKCAMNAREENPWVPDDTYYCRLIGRLVDTMAGKSPGPFPNCDWRFNEFPNPAAHALHVTCVELMALAVSGKEVGNALLNVVLKSQPLVPRENITAWMNAIGLIITALPEPYWIVLHDRIVSVISSPSLTSETEWVGYPFRLFDFTACHQSYSEMSCSYTLALAHAVWHHSSIGQLSLIPKFLTEVLLPIVKTEFQLLYVYHLVGPFLQRFQQERTRCMIEIGVAFYDMLLNVDQCSTHLNYMDPICDFLYHMKYMFTGDSVKEQVEKIICNLKPALKLRLRFITHISKMEPAAVPPQAMNSGSPAPQSNQ

SEQ ID NO: 188688 - protein, 886 aa, Artificial Sequence
  derived and/or modified sequence
METQLQSIFEEVVKTEVIEEAFPGMFMDTPEDEKTKLISCLGAFRQFWGGLSQESHEQCIQWIVKFIHGQHSPKRISFLYDCLAMAVETGLLPPRLVCESLINSDTLEWERTQLWALTFKLVRKIIGGVDYKGVRDLLKVILEKILTIPNTVSSAVVQQLLAAREVIAYILERNACLLPAYFAVTEIRKLYPEGKLPHWLLGNLVSDFVDTFRPTARINSICGRCSLLPVVNNSGAICNSWKLDPATLRFPLKGLLPYDKDLFEPQTALLRYVLEQPYSRDMVCNMLGLNKQTLNIAQHKQRCPVLEDQLVDLVVYAMERSETEEKFDDGGTSQLLWQHLSSQLIFFVLFQFASFPHMVLSLHQKLAGRGLIKGRDHLMWVLLQFISGSIQKNALADFLPVMKLFDLLYPEKEYIPVPDINKPQSTHAFAMTCIWIHLNRKAQNDNSKLQIPIPHSLRLHHEFLQQSLRNKSLQMNDYKIALLCNAYSTNSECFTLPMGALVETIYGNGIMRIPLPGTNCMASGSITPLPMNLLDSLTVHAKMSLIHSIATRVIKLAHAKSSVALAPALVETYSRLLVYMEIESLGIKGFISQLLPTVFKSHAWGILHTLLEMFSYRMHHIQPHYRVQLLSHLHTLAAVAQTNQNQLHLCVESTALRLITALGSSEVQPQFTRFLSDPKTVLSAESEELNRALILTLARATHVTDFFTGSDSIQGTWCKDILQTIMSFTPHNWASHTLSCFPGPLQAFFKQNNVPQESRFNLKKNVEEEYRKWKSMSNENDIITHFSMQGSPPLFLCLLWKMLLETDHINQIGYRVLERIGARALVAHVRTFADFLVYEFSTSAGGQQLNKCIEILNDMVWKYNIVTLDRLILCLVRINTFLSLFS

SEQ ID NO: 188689 - protein, 37 aa, Artificial Sequence [sequence omitted]

SEQ ID NO: 188690 - protein, 142 aa, Artificial Sequence
  derived and/or modified sequence
MHHIQPHYRVQLLSHLHTLAAVAQTNQNQLHLCVESTALRLITALGSSEVQPQFTRFLSDPKTVLSAESEELNRALILTLARATHVTDFFTGSDSIQGTWCKDILQTIMSFTPHNWASHTLSCFPGPLQTLLILGELALRKT

SEQ ID NO: 188691 - DNA, 4098 bp, Artificial Sequence
  derived and/or modified sequence
atggagacacagctgcaatccatctttgaggaagtggtgaagacagaggttatagaagaggcatttcccggcatgtttatggacactcctgaagacgagaagactaagctaataagctgtttgggggccttccgccaattctggggcgggctgagtcaggaatcccatgaacagtgcattcaatggattgtcaaatttattcacggccaacacagccctaagagaatcagcttcctgtacgactgtttggccatggccgtggagaccggtctgctgcctcctcgactagtatgtgagagcctcatcaactctgataccctcgaatgggagagaactcagctctgggcccttacgttcaagctagtgcggaagattatcggaggcgttgattacaaaggagttagggacctactgaaagtcatcctagagaagatcctgaccatccctaatactgtgtcctcagctgtggtgcagcagttgcttgccgctagggaggtcattgcatatatcctggagcgcaacgcctgtttattgccagcctacttcgccgtgactgagatcagaaagctctacccggaggggaaactaccacactggcttctcgggaatttggtcagtgacttcgtggacaccttcagacctactgcacgcattaactccatatgcggcaggtgttccctcctgcccgtagtgaacaacagcggagccatctgcaattcatggaagctagaccctgctaccctgaggttccctcttaagggcctcctgccatatgacaaggacctcttcgagccccaaacggcgctgctgagatacgtcctagagcagccttactcccgggacatggtgtgtaacatgctgggcctaaacaaacagaccctgaacatcgcccagcacaaacagcggtgccctgtgctggaagaccagctggtcgacctggtggtatacgccatggagcggtcagaaacagaggagaagtttgacgatggaggcactagccagctgctgtggcagcacctaagcagtcaactaatattctttgtactgttccagtttgctagttttccccatatggtgctcagccttcatcagaagctcgcgggcagaggactcattaaaggaagagatcacttaatgtgggttctgctccagttcatctccggctccatacaaaaaaacgccctggccgactttctgcccgtgatgaaattattcgatctcctgtacccagagaaagagtatatacccgttcccgacattaacaaacctcagagcacacatgcattcgctatgacgtgcatctggatacacctcaaccggaaagctcagaatgacaattctaaattacagatacccattccacactctctccgcctgcaccacgaatttctgcaacagagcttgcgcaataaaagtttacagatgaatgactacaagattgcccttctgtgtaacgcgtattctaccaactcggagtgctttaccctgcccatgggtgccctggtggagaccatttatgggaatggtatcatgaggatcccgctcccagggacaaactgcatggcatcaggaagtatcactccgctccctatgaacttgcttgattctctgactgtgcatgcgaagatgtcactcatccatagtattgcaacgagggtcattaagcttgcccatgccaagtcaagcgtggccctggccccagcacttgtcgaaacctactcacgactactggtatacatggaaatcgaaagcctcgggatcaagggattcatcagtcagctgctgcctacagtgttcaaatcccatgcctggggaattttgcataccctccttgagatgttttcctaccgaatgcatcatatccagccacactaccgcgtgcaactgctttcccacctccacactctcgccgcagtggcgcagaccaatcagaatcagctgcacctgtgtgtggagtcaacagcactgcgcctgattactgccctcggatctagcgaagtgcagccccagttcacgaggttcctgtctgacccaaagacggtgttgtcagctgaatccgaggaactgaacagagccttaatcctgactctggctcgtgcaacgcacgttacagatttttttactggatcggatagtatccagggtacgtggtgcaaagatatcctccagacaatcatgtctttcactccacataactgggcctcacacacattgtcgtgcttccccgggcccctccaggctttcttcaagcagaataatgttccacaagaaagcagatttaacctgaaaaagaatgttgaggaggaatataggaaatggaagagtatgtccaacgagaatgatattataacccatttctccatgcaaggatcaccccccctgtttctttgcctgttatggaagatgctgctggagacagaccacattaatcagatcggctaccgtgtgcttgagagaattggcgctagagctttggttgcccacgtcagaactttcgcggactttcttgtctatgagttttcaacatctgctgggggacagcagcttaacaagtgtattgagatactgaatgacatggtctggaaatataatatcgtaaccttggacagactcatactttgtttggcgatgcggtcgcatgaaggaaacgaagcccaagtgtgttatttcattattcagcttctattactaaaacctaatgatttccggaacagggtaagcgacttcgttaaggagaattctccggagcattggcttcagaacgattggcatactaagcatatgaattaccacaagaagtacccagagaaactctattttgaaggactggccgagcaggtggatccccctgtgcaaattcagtccccatatctgcccatctacttcgggaatgtgtgccttcgcttccttccagtttttgatattgtgattcacagatttctcgagttattacctgtttctaaaagcctcgagaccctgctggaccatctgggtggactgtacaagtttcatgaccgccctgtcacttatctttacaataccctccactattatgagatgcatctgcgcgaccgggcattcctcaaacgaaaattagtacacgcaattattgggtccctgaaggacaaccgccctcaaggctggtgcctcagtgacacatatttgaaatgcgctatgaacgcgcgggaggagaatccgtgggtgcccgacgatacatactactgcaggctcattggcagactggtagataccatggcaggtaaatcacccggaccatttccaaattgcgactggcggtttaacgaattcccaaaccccgcggctcacgcactccacgtgacctgcgtcgagctcatggcgttggcagtatcgggtaaggaggtcgggaacgccctgttgaacgtggtgctcaaatcccaaccattagtacccagagagaacataacagcctggatgaacgctattggactgatcataactgctctcccagaaccatactggatcgttcttcatgatcgaatcgtttcagttattagctcaccttcactgacctccgagaccgagtgggttggatacccttttcgactctttgatttcacggcctgtcaccagtcttactcggagatgagttgctcttatacgctcgccctggcccatgcagtgtggcaccactccagtataggccagttatcattgatcccaaagtttcttacggaagtgctgctgcctattgtcaagacagagtttcaattactgtacgtgtatcacctcgtcggtccattcctccagcgtttccagcaggagcgcacccgctgcatgatcgaaattggcgtcgccttctacgacatgctgctgaacgtggaccagtgcagtacccatttgaactatatggatcccatctgcgacttcctctaccacatgaaatacatgttcacaggagactctgtgaaagagcaggtagagaaaattatctgtaacctcaaacctgccctcaaactgcgcctgcgattcattactcatatttcaaagatggaacccgccgccgtgcctcctcaggctatgaacagcggttcacccgccccacagtccaaccagtag

SEQ ID NO: 188692 - DNA, 2661 bp, Artificial Sequence
  derived and/or modified sequence
atggaaactcaactgcagtcaattttcgaagaggtggtgaaaacagaggtgatcgaagaggcttttccaggcatgttcatggacaccccagaggacgagaaaaccaagctcatttcatgcctgggcgcctttcggcagttttggggcggcctgtcgcaagagagccacgaacaatgtattcaatggatcgtgaaatttatccacggccagcactctcctaaacgcattagtttcctctatgattgcttagcaatggcagtcgagaccggtctgctgccccccaggttggtgtgtgaaagtttaatcaattccgatacgctggaatgggagcggacacagctgtgggcgcttacatttaagctcgtgcggaagatcatcggcggagttgattataaaggcgtacgggatctcctcaaggtcatcctagaaaaaattctcacgattccaaacacagtttcttccgctgttgtgcagcaacttctcgcagccagagaagtgattgcatacatcctagaaaggaacgcttgtctgttgcccgcttatttcgccgtaaccgagataaggaagctttacccagaaggcaaactaccacactggttgctgggaaacttggtgagcgattttgttgataccttcagacctacggctaggataaactcgatctgtggcagatgctccttgcttcctgtggttaacaactctggggctatctgtaactcctggaaactcgatcccgccacccttcgcttccccctcaagggtttgctcccttacgacaaggacctctttgagccccaaaccgccctgctgaggtacgtgctggagcaaccctactctcgcgatatggtatgcaatatgctcgggcttaataagcagactttaaatatagcgcaacacaagcagagatgccctgtgctagaagaccaattagttgacctcgtagtttacgccatggagcggtcagagacggaggagaaatttgacgatggtggcactagtcagctactatggcagcacctttcctctcagttgatattttttgtcctttttcagtttgccagtttccctcacatggtactcagcctccatcagaagctggcggggcgcggcttaattaaaggccgtgaccacctgatgtgggtgcttcttcagtttatctccggctccattcaaaagaacgcactcgcagattttctgcctgttatgaagctgtttgacctgctgtaccccgaaaaagagtacattcctgtgccggacattaacaagccacaaagcacccacgcatttgctatgacatgcatttggatccacctgaacaggaaggcccagaatgataactccaagctccaaataccgattccacattccttgagacttcaccatgagttcttgcaacagagcctgcgcaataaatccctgcagatgaacgactataagattgctctcctgtgtaatgcctattccaccaatagcgagtgcttcacactgcctatgggtgccttggtagaaacaatctacggaaatggcataatgcggatcccgctgcctggaactaactgtatggctagtggctctatcacgccactccctatgaacctgctagacagcctgactgtgcatgccaagatgtccctcatccattcaatcgccacccgtgttatcaagctcgctcacgctaagtcgagcgtggccctggctcctgccctcgtcgagacctactctaggctgctggtttatatggagattgaatccctgggaatcaaagggtttatctctcagctactccctacagtgtttaagtcccatgcatggggaattctgcacacacttctagagatgttttcgtataggatgcaccatatacagcctcattacagagtacaactgctgtcacatctccacaccctggccgctgttgcacaaacgaatcagaaccagctgcatctgtgtgtcgaatctactgccctcagattaatcacagcactgggaagttccgaggtgcagcctcagttcacacggttcctctccgatccaaagactgtcctgagcgccgagtccgaagagctgaatcgggccctgatcctaaccctcgccagagcaacccacgtgaccgactttttcaccggcagcgattcaatccagggtacatggtgtaaggacatactgcaaaccatcatgtcctttacaccgcataactgggcttcacacacattgtcgtgctttccagggccgttacaggctttcttcaaacagaataacgttccacaggagtctcggttcaacctaaaaaaaaatgttgaggaggagtataggaagtggaagagtatgagcaatgaaaatgacataataacacatttcagtatgcaaggcagtcctcccctttttctgtgcctcctctggaaaatgctgctcgaaacggatcatattaaccagatcggatatcgagtgctggagagaatcggtgcgcgcgccctggtcgcccacgtgcgcactttcgctgacttcctcgtctatgagttcagcacgtccgctggaggacaacaactcaataagtgcattgagatactcaatgacatggtctggaagtacaacattgtcacccttgatcgccttatcctgtgtctcgtgcgaatcaataccttcttgagcctcttttcttag

SEQ ID NO: 188693 - DNA, 2661 bp, Artificial Sequence
  derived and/or modified sequence
atggaaacacagctgcagtctatctttgaagaggtcgtgaagacggaagtgatcgaggaggctttcccaggcatgttcatggatacaccagaggacgaaaaaaccaagttaatttcatgtttaggcgcatttcggcaattctggggtggactctcgcaggaaagccacgagcagtgtatccaatggatcgtgaagtttattcatggccaacattccccaaaacggatcagtttcctttacgactgcctggctatggccgtagagactggattgcttccgcctcgccttgtgtgtgaatcactgatcaactccgacaccctcgagtgggaacggactcagctgtgggctctgactttcaagctcgtccgcaaaatcatcgggggtgtcgactacaagggagtgcgagacctgctgaaggtcattttggagaaaatcttgacaatccctaacaccgtcagcagcgcggtggtccagcaactgctggctgcaagagaagtcatcgcctacatcctcgagcgcaacgcatgcctcttaccagcgtacttcgccgttaccgagattagaaagctgtaccccgagggaaagctgccccactggttgctggggaaccttgtatcagacttcgtggacactttccggccaacagcccgaatcaactctatctgtggaaggtgctctctccttccggtggtcaacaattctggggcaatctgtaatagctggaaattagatcctgcaacgctcaggttccctctgaagggattgctgccatacgataaggacttgtttgagccccagaccgcattgctgcgctacgtgttggagcagccctatagcagagacatggtatgtaatatgctggggttgaataagcaggtccttaaaatttttaagcacaagcagcgctgtcctgtgctcgaggaccagctcgtggatctcgtggtttatgccatggagcgctctgagacagaggagaagttcgatgatggagggacttctcaactcttatggcagcatctgtcctcacagctcattttcttcgtgctctttcagtttgcttcctttccccatatggtgcttagcttacatcaaaagctggcgggtagggggttaatcaagggccgcgaccatcttatgtgggtgttgcttcagtttatcagtgggtccatccagaagaacgctcttgcagactttctgcctgtcatgaagctcttcgacctgctctacccggagaaggagtatattcccgtgccagacataaataagccccagtctacccatgcctttgcaatgacatgcatatggatccacctgaatcgtaaggctcagaatgacaacagtaagcttcagatcccaatcccccatagcctccggttgcaccacgagttcctgcagcagtctctcaggaacaaaagccttcagatgaatgattataagattgctctcctttgtaacgcttacagcaccaacagcgagtgttttactctcccgatgggagctctggtcgaaacaatatatgggaatggcatcatgagaatcccactccccggcaccaactgcatggcctccgggtctatcactcccctccctatgaatttgctggactcacttaccgtgcatgctaaaatgtccctgattcacagtattgcaactagggtaattaagttggcccacgctaaatccagtgtcgccctcgcacccgccctagtagagacctacagccggcttctggtgtacatggagatcgaatcccttggaattaaaggatttatatcccagctgctgccgactgtgttcaaaagccacgcatgggggatccttcacacactgcttgagatgttcagttaccgaatgcatcatatccagccccattaccgggtccaactgctgagtcacctgcatactctggcggcagtggctcagaccaaccagaaccaactgcatctgtgtgtggaaagcactgcccttcgcctgattacagccctgggctcatcagaggttcagcctcagttcacgcgcttcttgtcggatcctaaaaccgtactgtccgcagaatcggaagagttaaacagagccctgatcctcactttggctagagcaacccacgtaaccgatttttttaccggaagcgattcgatacaggggacctggtgcaaggacattctgcagactatcatgagctttacgcctcacaactgggcgagtcacacgctctcatgtttcccagggccgctacaagccttttttaagcaaaataacgtgccgcaggaatccagattcaaccttaaaaagaatgtcgaagaagagtatcgaaaatggaagtcaatgtcgaatgaaaacgatattatcacgcacttctccatgcaggggagcccaccactgtttctctgtcttctctggaaaatgcttctcgagaccgaccatataaaccaaatcggttaccgggtgctcgagcggataggggcgagagctctcgttgcgcatgttagaacatttgccgattttctagtctatgaattttcgacatccgctgggggccagcagctgaataagtgcatagaaattttgaatgacatggtctggaaatacaatatagttacactggatagacttatcctttgcctagtgaggattaacacttttctgtcactttttagctag

SEQ ID NO: 188694 - DNA, 4098 bp, Artificial Sequence
  derived and/or modified sequence
atggagacccagctgcagagcatctttgaggaggtggtgaagacagaggtgattgaggaggccttccctggcatgttcatggacaccccagaagatgagaagaccaagctgatcagctgcctgggcgccttccggcagttctggggcggcctgagccaggagagccatgagcagtgcatccagtggatcgtgaagttcatccacggccagcacagccccaagaggatctccttcctgtatgactgcctggccatggctgtggagaccggcctgctgcccccccggctggtgtgtgagagcctcatcaacagcgacaccctggagtgggagaggacccagctgtgggccctgaccttcaagctggtgaggaagatcatcggcggcgtggactacaagggcgtgcgggacctgctgaaggtgatcctggagaagatcctgaccatccccaacacagtgagcagcgctgtggtgcagcagctgctggccgcccgggaggtgattgcctacatcctggagagaaatgcctgcctgctgcctgcctactttgctgtgacagagatcaggaagctgtacccagagggcaagctgccccactggctgctgggcaacctggtgtctgactttgtggacaccttccggcccacagcccgcatcaacagcatctgtggccgctgcagcctgctgcctgtggtgaacaacagcggggccatctgcaacagctggaagctggaccctgccaccctgcgcttccccctgaagggcctgctgccctatgacaaggacctgtttgagccccagacagccctgctgcgctacgtgctggagcagccctacagccgggacatggtgtgcaacatgctgggcctgaacaagcagaccctgaacatcgcccagcacaagcagcgctgccctgtgctggaggaccagctggtggacctggtggtgtatgccatggagaggagtgaaacagaggagaagtttgatgatggcggcaccagccagctgctgtggcagcacctgagcagccagctgatcttctttgtgctcttccagtttgccagcttcccccacatggtgctgagcctgcaccagaagctggccggccggggcctcatcaagggccgggaccacctgatgtgggtgctgctgcagttcatcagcggcagcatccagaagaatgccctggccgacttcctgcctgtgatgaagctgtttgacctgctgtacccagagaaggagtacatccctgtgcctgacatcaacaagccccagagcacccacgcctttgccatgacctgcatctggatccacctgaacaggaaggcccagaatgacaacagcaagctgcagatccccatcccccacagcctgcggctgcaccacgagttcctgcagcagagcctgaggaacaagagcctgcagatgaatgactacaagatcgccctgctgtgcaatgcctacagcaccaacagcgagtgcttcaccctgcccatgggcgccctggtggagaccatctatggaaatggcatcatgaggatccccctgcccggcaccaactgcatggccagcggcagcatcacccccctgcccatgaacctgctggacagcctgactgtgcacgccaagatgagcctcatccacagcatcgccaccagggtcatcaagctggcccacgccaagagctctgtggccctggccccagccctggtggagacctacagccggctgctggtgtacatggagattgagagcctgggcatcaagggcttcatcagccagctgctgcccaccgtcttcaagagccacgcctggggcatcctgcacaccctgctggagatgttctcctacaggatgcaccacatccagccccactacagagtgcagctgctgagccacctgcacaccctggccgctgtggcccagaccaaccagaaccagctgcacctgtgtgtggagagcacagccctgcggctcatcacagccctgggcagcagcgaggtgcagccccagttcacccgcttcctgagtgaccccaagacagtgctgtctgctgagagcgaggagctgaacagagccctgatcctgaccctggcccgggccacccacgtgacagacttcttcaccggcagtgacagcatccagggcacctggtgcaaggacatcctgcagaccatcatgtccttcaccccccacaactgggccagccacaccctgagctgcttccctggccccctgcaggccttcttcaagcagaacaacgtgccccaggagagccgcttcaacctgaagaagaatgtggaggaggagtacaggaagtggaagtccatgagcaatgaaaatgacatcatcacccacttctccatgcagggcagccccccactcttcctgtgcctgctgtggaagatgctgctggagacagaccacatcaaccagatcggctacagagtgctggagcgcatcggggcccgggccctggtggcccacgtgaggacctttgctgacttcctggtgtatgagttcagcaccagcgctgggggccagcagctgaacaagtgcatcgagatcctgaatgacatggtgtggaagtacaacatcgtgaccctggacaggctcatcctgtgcctggccatgaggagccatgagggcaatgaggcccaggtgtgctacttcatcatccagctgctgctgctgaagcccaatgacttcaggaacagagtgtctgactttgtgaaggagaacagccctgagcactggctgcagaatgactggcacaccaagcacatgaactaccacaagaagtacccagagaagctgtactttgagggcctggccgagcaggtggacccccctgtgcagatccagagcccctacctgcccatctactttggaaatgtgtgcctgcgcttcctgcctgtgtttgatattgtcatccaccgcttcctggagctgctgcctgtgtccaagagcctggagaccctgctggaccacctgggcggcctgtacaagttccatgacaggcctgtgacctacctgtacaacaccctgcactactatgagatgcacctgcgggaccgggccttcctgaagaggaagctggtgcacgccatcatcggcagcctgaaggacaaccggccccagggctggtgcctgagtgacacctacctgaagtgtgccatgaatgcccgggaggagaacccctgggtgcctgatgacacctactactgccgcctcatcggccgcctggtggacaccatggccggcaagagccctggccccttccccaactgtgactggaggttcaatgagttccccaacccagctgcccacgccctgcacgtgacctgtgtggagctgatggccctggccgtgtctgggaaggaggtgggcaatgccctgctgaatgtggtgctgaagagccagcccctggtgccccgggagaacatcacagcctggatgaatgccatcggcctcatcatcacagccctgcctgagccctactggatcgtgctgcatgaccgcatcgtgtctgtcatcagcagccccagcctgaccagcgagacagagtgggtgggctaccccttccggctgtttgacttcaccgcctgccaccagagctacagcgagatgagctgcagctacaccctggccctggcccatgctgtgtggcaccacagcagcatcggccagctgagcctcatccccaagttcctgacagaggtgctgctgcccatcgtgaagacagagttccagctgctgtatgtgtaccacctggtgggccccttcctgcagcgcttccagcaggagaggacccgctgcatgattgaaattggagtggccttctatgacatgctgctgaatgtggaccagtgcagcacccacctgaactacatggaccccatctgtgacttcctgtaccacatgaagtacatgttcaccggggacagcgtgaaggagcaggtggagaagatcatctgcaacctgaagccagccctgaagctgcggctgcgcttcatcacccacatcagcaagatggagcctgctgctgtgcccccccaggccatgaacagcggcagccctgccccccagagcaaccagtag

SEQ ID NO: 188695 - DNA, 2661 bp, Artificial Sequence
  derived and/or modified sequence
atggagacccagctgcagagcatctttgaggaggtggtgaagacagaggtgattgaggaggccttccctggcatgttcatggacaccccagaagatgagaagaccaagctgatcagctgcctgggcgccttccggcagttctggggcggcctgagccaggagagccatgagcagtgcatccagtggatcgtgaagttcatccacggccagcacagccccaagaggatctccttcctgtatgactgcctggccatggctgtggagaccggcctgctgcccccccggctggtgtgtgagagcctcatcaacagcgacaccctggagtgggagaggacccagctgtgggccctgaccttcaagctggtgaggaagatcatcggcggcgtggactacaagggcgtgcgggacctgctgaaggtgatcctggagaagatcctgaccatccccaacacagtgagcagcgctgtggtgcagcagctgctggccgcccgggaggtgattgcctacatcctggagagaaatgcctgcctgctgcctgcctactttgctgtgacagagatcaggaagctgtacccagagggcaagctgccccactggctgctgggcaacctggtgtctgactttgtggacaccttccggcccacagcccgcatcaacagcatctgtggccgctgcagcctgctgcctgtggtgaacaacagcggggccatctgcaacagctggaagctggaccctgccaccctgcgcttccccctgaagggcctgctgccctatgacaaggacctgtttgagccccagacagccctgctgcgctacgtgctggagcagccctacagccgggacatggtgtgcaacatgctgggcctgaacaagcagaccctgaacatcgcccagcacaagcagcgctgccctgtgctggaggaccagctggtggacctggtggtgtatgccatggagaggagtgaaacagaggagaagtttgatgatggcggcaccagccagctgctgtggcagcacctgagcagccagctgatcttctttgtgctcttccagtttgccagcttcccccacatggtgctgagcctgcaccagaagctggccggccggggcctcatcaagggccgggaccacctgatgtgggtgctgctgcagttcatcagcggcagcatccagaagaatgccctggccgacttcctgcctgtgatgaagctgtttgacctgctgtacccagagaaggagtacatccctgtgcctgacatcaacaagccccagagcacccacgcctttgccatgacctgcatctggatccacctgaacaggaaggcccagaatgacaacagcaagctgcagatccccatcccccacagcctgcggctgcaccacgagttcctgcagcagagcctgaggaacaagagcctgcagatgaatgactacaagatcgccctgctgtgcaatgcctacagcaccaacagcgagtgcttcaccctgcccatgggcgccctggtggagaccatctatggaaatggcatcatgaggatccccctgcccggcaccaactgcatggccagcggcagcatcacccccctgcccatgaacctgctggacagcctgactgtgcacgccaagatgagcctcatccacagcatcgccaccagggtcatcaagctggcccacgccaagagctctgtggccctggccccagccctggtggagacctacagccggctgctggtgtacatggagattgagagcctgggcatcaagggcttcatcagccagctgctgcccaccgtcttcaagagccacgcctggggcatcctgcacaccctgctggagatgttctcctacaggatgcaccacatccagccccactacagagtgcagctgctgagccacctgcacaccctggccgctgtggcccagaccaaccagaaccagctgcacctgtgtgtggagagcacagccctgcggctcatcacagccctgggcagcagcgaggtgcagccccagttcacccgcttcctgagtgaccccaagacagtgctgtctgctgagagcgaggagctgaacagagccctgatcctgaccctggcccgggccacccacgtgacagacttcttcaccggcagtgacagcatccagggcacctggtgcaaggacatcctgcagaccatcatgtccttcaccccccacaactgggccagccacaccctgagctgcttccctggccccctgcaggccttcttcaagcagaacaacgtgccccaggagagccgcttcaacctgaagaagaatgtggaggaggagtacaggaagtggaagtccatgagcaatgaaaatgacatcatcacccacttctccatgcagggcagccccccactcttcctgtgcctgctgtggaagatgctgctggagacagaccacatcaaccagatcggctacagagtgctggagcgcatcggggcccgggccctggtggcccacgtgaggacctttgctgacttcctggtgtatgagttcagcaccagcgctgggggccagcagctgaacaagtgcatcgagatcctgaatgacatggtgtggaagtacaacatcgtgaccctggacaggctcatcctgtgcctggtgcgcatcaacaccttcctgagcctcttctcctag

SEQ ID NO: 188696 - DNA, 2661 bp, Artificial Sequence
  derived and/or modified sequence
atggagacccagctgcagagcatctttgaggaggtggtgaagacagaggtgattgaggaggccttccctggcatgttcatggacaccccagaagatgagaagaccaagctgatcagctgcctgggcgccttccggcagttctggggcggcctgagccaggagagccatgagcagtgcatccagtggatcgtgaagttcatccacggccagcacagccccaagaggatctccttcctgtatgactgcctggccatggctgtggagaccggcctgctgcccccccggctggtgtgtgagagcctcatcaacagcgacaccctggagtgggagaggacccagctgtgggccctgaccttcaagctggtgaggaagatcatcggcggcgtggactacaagggcgtgcgggacctgctgaaggtgatcctggagaagatcctgaccatccccaacacagtgagcagcgctgtggtgcagcagctgctggccgcccgggaggtgattgcctacatcctggagagaaatgcctgcctgctgcctgcctactttgctgtgacagagatcaggaagctgtacccagagggcaagctgccccactggctgctgggcaacctggtgtctgactttgtggacaccttccggcccacagcccgcatcaacagcatctgtggccgctgcagcctgctgcctgtggtgaacaacagcggggccatctgcaacagctggaagctggaccctgccaccctgcgcttccccctgaagggcctgctgccctatgacaaggacctgtttgagccccagacagccctgctgcgctacgtgctggagcagccctacagccgggacatggtgtgcaacatgctgggcctgaacaagcaggtgctgaagatcttcaagcacaagcagcgctgccctgtgctggaggaccagctggtggacctggtggtgtatgccatggagaggagtgaaacagaggagaagtttgatgatggcggcaccagccagctgctgtggcagcacctgagcagccagctgatcttctttgtgctcttccagtttgccagcttcccccacatggtgctgagcctgcaccagaagctggccggccggggcctcatcaagggccgggaccacctgatgtgggtgctgctgcagttcatcagcggcagcatccagaagaatgccctggccgacttcctgcctgtgatgaagctgtttgacctgctgtacccagagaaggagtacatccctgtgcctgacatcaacaagccccagagcacccacgcctttgccatgacctgcatctggatccacctgaacaggaaggcccagaatgacaacagcaagctgcagatccccatcccccacagcctgcggctgcaccacgagttcctgcagcagagcctgaggaacaagagcctgcagatgaatgactacaagatcgccctgctgtgcaatgcctacagcaccaacagcgagtgcttcaccctgcccatgggcgccctggtggagaccatctatggaaatggcatcatgaggatccccctgcccggcaccaactgcatggccagcggcagcatcacccccctgcccatgaacctgctggacagcctgactgtgcacgccaagatgagcctcatccacagcatcgccaccagggtcatcaagctggcccacgccaagagctctgtggccctggccccagccctggtggagacctacagccggctgctggtgtacatggagattgagagcctgggcatcaagggcttcatcagccagctgctgcccaccgtcttcaagagccacgcctggggcatcctgcacaccctgctggagatgttctcctacaggatgcaccacatccagccccactacagagtgcagctgctgagccacctgcacaccctggccgctgtggcccagaccaaccagaaccagctgcacctgtgtgtggagagcacagccctgcggctcatcacagccctgggcagcagcgaggtgcagccccagttcacccgcttcctgagtgaccccaagacagtgctgtctgctgagagcgaggagctgaacagagccctgatcctgaccctggcccgggccacccacgtgacagacttcttcaccggcagtgacagcatccagggcacctggtgcaaggacatcctgcagaccatcatgtccttcaccccccacaactgggccagccacaccctgagctgcttccctggccccctgcaggccttcttcaagcagaacaacgtgccccaggagagccgcttcaacctgaagaagaatgtggaggaggagtacaggaagtggaagtccatgagcaatgaaaatgacatcatcacccacttctccatgcagggcagccccccactcttcctgtgcctgctgtggaagatgctgctggagacagaccacatcaaccagatcggctacagagtgctggagcgcatcggggcccgggccctggtggcccacgtgaggacctttgctgacttcctggtgtatgagttcagcaccagcgctgggggccagcagctgaacaagtgcatcgagatcctgaatgacatggtgtggaagtacaacatcgtgaccctggacaggctcatcctgtgcctggtgcgcatcaacaccttcctgagcctcttctcctag

SEQ ID NO: 188697 - DNA, 4581 bp, Artificial Sequence
  derived and/or modified sequence
gagggaacgctccaggtaaagcgctgggggaggaagcgacgccgaggagctacggtttcctccagaggtctccgcccctctgcccctatattcccagagctcgagtctgatccgggccttgccgggcaccctggaaaggcgggggtgatagtacagatggagacgcaactgcagagcattttcgaagaggtggtgaaaacggaagttatagaagaggcttttcctggcatgtttatggatactcctgaagatgagaaaacaaaactaattagctgtttgggggccttcagacagttttggggtggtctttctcaggagtctcatgaacagtgtatccagtggattgttaagtttattcatggtcagcatagtcctaaaagaatttcttttctttatgactgcttagcaatggcagttgagactggtctccttccacccaggctggtttgtgaatccctgataaactctgacactcttgagtgggaaagaacacagctttgggccttaacatttaaactggttcggaaaataattgggggagtggattacaagggtgttcgagatctcttaaaagtgattttggagaagattttgacaattcctaatacagtgagctctgctgttgtacagcagcttctggcagcaagagaggttatagcatatatcttggaaagaaatgcctgcttattaccagcctattttgcagtcactgagatcaggaaactgtatcctgaaggcaaacttccacactggttacttggaaacctagtatcagactttgtggataccttcaggcccacagcaaggataaactccatttgtggtcgctgtagtcttctgccagttgtaaataattcgggtgccatttgtaattcatggaaactggatcctgctactcttcgttttcctttgaaaggccttttgccatatgataaggatctgtttgaaccacagactgctttgttgagatatgtattggagcagccttattccagggatatggtctgcaatatgctaggtttaaataagcagaccttgaacattgctcagcacaagcagcgctgccctgtgctggaggaccagttggtggatctggttgtttatgccatggagcgatctgagaccgaggagaagtttgacgatgggggaacaagccaactcctgtggcagcatctctcaagtcagctcattttctttgtgcttttccagtttgcaagttttccacatatggtgctttctcttcatcagaagttagcagggcgaggactgattaaaggcagagatcatcttatgtgggttctcctgcaattcatttctggaagtattcagaaaaatgcactagctgattttctccctgtgatgaagctcttcgacttgctatacccagaaaaagaatatatcccagttcctgatattaacaaaccccagtcaacccatgcctttgcaatgacctgtatttggattcatctcaatagaaaagctcaaaatgacaactccaagctacagattccaatacctcattccctaagacttcaccatgagttcctgcagcagagtctaagaaataaaagtttacagatgaatgactataagattgctctattgtgtaatgcatactctacaaattcagaatgttttacattacccatgggagctctggtagaaactatttatggaaatggaattatgaggatacctctccctggaacaaactgtatggcttcaggatctattacccccttacctatgaacctcctggattcactgacagttcatgccaaaatgagccttattcacagcattgcaaccagggtgataaaacttgctcatgcaaagtccagtgtggccttggctccagccctagtggaaacttacagtcgtttattggtctatatggaaatagagtctttgggcatcaaaggatttatcagtcagcttttgccaactgttttcaaatcacatgcatgggggatcttacacacactccttgagatgtttagctaccggatgcatcatattcagcctcattacagagttcagctcctgagtcatcttcatactttggctgcagttgcacaaacaaaccagaaccagctccatctttgtgtcgagagcactgctctcaggcttataacagcattaggtagctcagaggtacaaccgcagtttacacgcttccttagtgatcccaaaacagtgctctcagcagaatctgaagaactgaaccgagccttgatattgaccttggctagagcaactcatgtaacagatttttttacaggctctgattcaattcagggaacttggtgtaaagacatacttcagaccatcatgagtttcactcctcataattgggcttcacacaccctgagctgttttccaggcccactacaggcattcttcaaacaaaataatgtgcctcaggaaagccgttttaatctgaaaaaaaatgtggaggaggagtataggaagtggaagtcaatgagcaacgaaaacgacattattacccacttctctatgcagggctcccctcctctctttctttgtcttctctggaaaatgctcttggaaacagatcatattaatcagattggctatagagtattagagagaattggagccagggccttggtagcccatgtgaggacatttgcagatttcctggtatatgagttttctacatcagcagggggtcagcaactcaataaatgcattgaaattcttaatgacatggtatggaagtataacattgttacactggacagattaattctctgcctggccatgcgtagtcacgaaggaaatgaagcccaggtttgttatttcataattcagttgctgttactcaaaccaaacgattttagaaatcgagtaagtgactttgtgaaggaaaattccccagagcactggttacagaatgactggcacaccaagcacatgaattatcacaagaaatatccagagaagttgtattttgagggcctcgcggaacaggtggatcctcctgtacagatccagtctccctatctgcccatctattttgggaatgtgtgtcttcgattccttccagtatttgatatagtaatccacagatttttagagttgcttccggtatccaaatcactggagactctactggatcatctaggaggcttatataaatttcatgatcgtccagtgacttatctgtataacactctgcactattatgaaatgcacctgagagaccgcgcatttctcaaacgaaaactcgtccatgcgatcattggctctctgaaggataatcgaccgcagggctggtgtctaagtgacacttacctgaaatgcgctatgaatgcacgagaggaaaatccttgggttccagatgacacctactattgcagattgattggcagactagtcgatacgatggctggcaaatctcctggtccctttccaaactgtgactggagattcaatgagtttcccaacccagctgcccatgctctccatgttacttgtgtggagctcatggccttggcagtttcaggcaaagaagttgggaatgcccttctaaatgttgtcctaaaaagtcagcctttagtgccaagagagaacattacagcatggatgaatgcaattggtttgatcatcactgccctaccagagccatattggattgttcttcatgatcgaattgtgagtgtcatcagcagccccagcttgacgtctgaaacagagtgggttggctatccattccgcctctttgatttcactgcctgtcatcagtcctactctgagatgagttgtagctatacgttagctcttgcacatgctgtgtggcaccattctagcatcggacaactttctctcattccaaagtttcttactgaagtacttcttcctatagtgaagaccgaattccagttgctttatgtataccatcttgttggaccatttttacaaagatttcagcaagagagaactcgttgtatgatagagattggtgtggcgttttatgacatgctgctgaatgttgaccagtgtagcacccatttaaattacatggatcccatctgtgacttcctctatcacatgaagtatatgtttactggtgacagcgtgaaagagcaagtagagaagattatctgtaacttaaaaccagctttaaaacttcgtcttcgattcatcacacacattagcaagatggagccagctgcagtgcctccacaagccatgaacagtgggtctccagcacctcagtctaatcagtaaaaagtcagagtacacagcaagggttccaaattaagaggaagcaaaacgctgcccagatcctgagaaacctggagaaaatcaaccttagtagtttcaactcatacattgtcttgtttgattttgttctttgttttttatcctctttaagcacagatgcgtgttgaagtctaaggtgttctgtcatcacactctctttactagaataagtgtgcccaggcagaaaaaaaagtgtattcaatgttgctggcatgtgtggattcacagctcgtggctgtaaggaaatctgggggtttcataaatccattaaaatccttttagagttgccaa

SEQ ID NO: 188698 - DNA, 2811 bp, Artificial Sequence
  derived and/or modified sequence
acgctccaggtaaagcgctgggggaggaagcgacgccgaggagctacggtttcctccagaggtctccgcccctctgcccctatattcccagagctcgagtctgatccgggccttgccgggcaccctggaaaggcgggggtgatagtacagatggagacgcaactgcagagcattttcgaagaggtggtgaaaacggaagttatagaagaggcttttcctggcatgtttatggatactcctgaagatgagaaaacaaaactaattagctgtttgggggccttcagacagttttggggtggtctttctcaggagtctcatgaacagtgtatccagtggattgttaagtttattcatggtcagcatagtcctaaaagaatttcttttctttatgactgcttagcaatggcagttgagactggtctccttccacccaggctggtttgtgaatccctgataaactctgacactcttgagtgggaaagaacacagctttgggccttaacatttaaactggttcggaaaataattgggggagtggattacaagggtgttcgagatctcttaaaagtgattttggagaagattttgacaattcctaatacagtgagctctgctgttgtacagcagcttctggcagcaagagaggttatagcatatatcttggaaagaaatgcctgcttattaccagcctattttgcagtcactgagatcaggaaactgtatcctgaaggcaaacttccacactggttacttggaaacctagtatcagactttgtggataccttcaggcccacagcaaggataaactccatttgtggtcgctgtagtcttctgccagttgtaaataattcgggtgccatttgtaattcatggaaactggatcctgctactcttcgttttcctttgaaaggccttttgccatatgataaggatctgtttgaaccacagactgctttgttgagatatgtattggagcagccttattccagggatatggtctgcaatatgctaggtttaaataagcagaccttgaacattgctcagcacaagcagcgctgccctgtgctggaggaccagttggtggatctggttgtttatgccatggagcgatctgagaccgaggagaagtttgacgatgggggaacaagccaactcctgtggcagcatctctcaagtcagctcattttctttgtgcttttccagtttgcaagttttccacatatggtgctttctcttcatcagaagttagcagggcgaggactgattaaaggcagagatcatcttatgtgggttctcctgcaattcatttctggaagtattcagaaaaatgcactagctgattttctccctgtgatgaagctcttcgacttgctatacccagaaaaagaatatatcccagttcctgatattaacaaaccccagtcaacccatgcctttgcaatgacctgtatttggattcatctcaatagaaaagctcaaaatgacaactccaagctacagattccaatacctcattccctaagacttcaccatgagttcctgcagcagagtctaagaaataaaagtttacagatgaatgactataagattgctctattgtgtaatgcatactctacaaattcagaatgttttacattacccatgggagctctggtagaaactatttatggaaatggaattatgaggatacctctccctggaacaaactgtatggcttcaggatctattacccccttacctatgaacctcctggattcactgacagttcatgccaaaatgagccttattcacagcattgcaaccagggtgataaaacttgctcatgcaaagtccagtgtggccttggctccagccctagtggaaacttacagtcgtttattggtctatatggaaatagagtctttgggcatcaaaggatttatcagtcagcttttgccaactgttttcaaatcacatgcatgggggatcttacacacactccttgagatgtttagctaccggatgcatcatattcagcctcattacagagttcagctcctgagtcatcttcatactttggctgcagttgcacaaacaaaccagaaccagctccatctttgtgtcgagagcactgctctcaggcttataacagcattaggtagctcagaggtacaaccgcagtttacacgcttccttagtgatcccaaaacagtgctctcagcagaatctgaagaactgaaccgagccttgatattgaccttggctagagcaactcatgtaacagatttttttacaggctctgattcaattcagggaacttggtgtaaagacatacttcagaccatcatgagtttcactcctcataattgggcttcacacaccctgagctgttttccaggcccactacaggcattcttcaaacaaaataatgtgcctcaggaaagccgttttaatctgaaaaaaaatgtggaggaggagtataggaagtggaagtcaatgagcaacgaaaacgacattattacccacttctctatgcagggctcccctcctctctttctttgtcttctctggaaaatgctcttggaaacagatcatattaatcagattggctatagagtattagagagaattggagccagggccttggtagcccatgtgaggacatttgcagatttcctggtatatgagttttctacatcagcagggggtcagcaactcaataaatgcattgaaattcttaatgacatggtatggaagtataacattgttacactggacagattaattctctgcctggtaagaataaatacatttctaagcttattctcttag

SEQ ID NO: 188699 - DNA, 2430 bp, Artificial Sequence
  derived and/or modified sequence
acgctccaggtaaagcgctgggggaggaagcgacgccgaggagctacggtttcctccagaggtctccgcccctctgcccctatattcccagagctcgagtctgatccgggccttgccgggcaccctggaaaggcgggggtgatagtacagatggagacgcaactgcagagcattttcgaagaggtggtgaaaacggaagttatagaagaggcttttcctggcatgtttatggatactcctgaagatgagaaaacaaaactaattagctgtttgggggccttcagacagttttggggtggtctttctcaggagtctcatgaacagtgtatccagtggattgttaagtttattcatggtcagcatagtcctaaaagaatttcttttctttatgactgcttagcaatggcagttgagactggtctccttccacccaggctggtttgtgaatccctgataaactctgacactcttgagtgggaaagaacacagctttgggccttaacatttaaactggttcggaaaataattgggggagtggattacaagggtgttcgagatctcttaaaagtgattttggagaagattttgacaattcctaatacagtgagctctgctgttgtacagcagcttctggcagcaagagaggttatagcatatatcttggaaagaaatgcctgcttattaccagcctattttgcagtcactgagatcaggaaactgtatcctgaaggcaaacttccacactggttacttggaaacctagtatcagactttgtggataccttcaggcccacagcaaggataaactccatttgtggtcgctgtagtcttctgccagttgtaaataattcgggtgccatttgtaattcatggaaactggatcctgctactcttcgttttcctttgaaaggccttttgccatatgataaggatctgtttgaaccacagactgctttgttgagatatgtattggagcagccttattccagggatatggtctgcaatatgctaggtttaaataagcagaccttgaacattgctcagcacaagcagcgctgccctgtgctggaggaccagttggtggatctggttgtttatgccatggagcgatctgagaccgaggagaagtttgacgatgggggaacaagccaactcctgtggcagcatctctcaagtcagctcattttctttgtgcttttccagtttgcaagttttccacatatggtgctttctcttcatcagaagttagcagggcgaggactgattaaaggcagagatcatcttatgtgggttctcctgcaattcatttctggaagtattcagaaaaatgcactagctgattttctccctgtgatgaagctcttcgacttgctatacccagaaaaagaatatatcccagttcctgatattaacaaaccccagtcaacccatgcctttgcaatgacctgtatttggattcatctcaatagaaaagctcaaaatgacaactccaagctacagattccaatacctcattccctaagacttcaccatgagttcctgcagcagagtctaagaaataaaagtttacagatgaatgactataagattgctctattgtgtaatgcatactctacaaattcagaatgttttacattacccatgggagctctggtagaaactatttatggaaatggaattatgaggatacctctccctggaacaaactgtatggcttcaggatctattacccccttacctatgaacctcctggattcactgacagttcatgccaaaatgagccttattcacagcattgcaaccagggtgataaaacttgctcatgcaaagtccagtgtggccttggctccagccctagtggaaacttacagtcgtttattggtctatatggaaatagagtctttgggcatcaaaggatttatcagtcagcttttgccaactgttttcaaatcacatgcatgggggatcttacacacactccttgagatgtttagctaccggatgcatcatattcagcctcattacagagttcagctcctgagtcatcttcatactttggctgcagttgcacaaacaaaccagaaccagctccatctttgtgtcgagagcactgctctcaggcttataacagcattaggtagctcagaggtacaaccgcagtttacacgcttccttagtgatcccaaaacagtgctctcagcagaatctgaagaactgaaccgagccttgatattgaccttggctagagcaactcatgtaacagatttttttacaggctctgattcaattcagggaacttggtgtaaagacatacttcagaccatcatgagtttcactcctcataattgggcttcacacaccctgagctgttttccaggcccactacagacattgttaattttgggggaattggcattgcgaaagacttga

SEQ ID NO: 188700 - DNA, 2835 bp, Artificial Sequence
  derived and/or modified sequence
gctgttggctgggctcgggagggaacgctccaggtaaagcgctgggggaggaagcgacgccgaggagctacggtttcctccagaggtctccgcccctctgcccctatattcccagagctcgagtctgatccgggccttgccgggcaccctggaaaggcgggggtgatagtacagatggagacgcaactgcagagcattttcgaagaggtggtgaaaacggaagttatagaagaggcttttcctggcatgtttatggatactcctgaagatgagaaaacaaaactaattagctgtttgggggccttcagacagttttggggtggtctttctcaggagtctcatgaacagtgtatccagtggattgttaagtttattcatggtcagcatagtcctaaaagaatttcttttctttatgactgcttagcaatggcagttgagactggtctccttccacccaggctggtttgtgaatccctgataaactctgacactcttgagtgggaaagaacacagctttgggccttaacatttaaactggttcggaaaataattgggggagtggattacaagggtgttcgagatctcttaaaagtgattttggagaagattttgacaattcctaatacagtgagctctgctgttgtacagcagcttctggcagcaagagaggttatagcatatatcttggaaagaaatgcctgcttattaccagcctattttgcagtcactgagatcaggaaactgtatcctgaaggcaaacttccacactggttacttggaaacctagtatcagactttgtggataccttcaggcccacagcaaggataaactccatttgtggtcgctgtagtcttctgccagttgtaaataattcgggtgccatttgtaattcatggaaactggatcctgctactcttcgttttcctttgaaaggccttttgccatatgataaggatctgtttgaaccacagactgctttgttgagatatgtattggagcagccttattccagggatatggtctgcaatatgctaggtttaaataagcaggtactaaaaatttttaaacacaagcagcgctgccctgtgctggaggaccagttggtggatctggttgtttatgccatggagcgatctgagaccgaggagaagtttgacgatgggggaacaagccaactcctgtggcagcatctctcaagtcagctcattttctttgtgcttttccagtttgcaagttttccacatatggtgctttctcttcatcagaagttagcagggcgaggactgattaaaggcagagatcatcttatgtgggttctcctgcaattcatttctggaagtattcagaaaaatgcactagctgattttctccctgtgatgaagctcttcgacttgctatacccagaaaaagaatatatcccagttcctgatattaacaaaccccagtcaacccatgcctttgcaatgacctgtatttggattcatctcaatagaaaagctcaaaatgacaactccaagctacagattccaatacctcattccctaagacttcaccatgagttcctgcagcagagtctaagaaataaaagtttacagatgaatgactataagattgctctattgtgtaatgcatactctacaaattcagaatgttttacattacccatgggagctctggtagaaactatttatggaaatggaattatgaggatacctctccctggaacaaactgtatggcttcaggatctattacccccttacctatgaacctcctggattcactgacagttcatgccaaaatgagccttattcacagcattgcaaccagggtgataaaacttgctcatgcaaagtccagtgtggccttggctccagccctagtggaaacttacagtcgtttattggtctatatggaaatagagtctttgggcatcaaaggatttatcagtcagcttttgccaactgttttcaaatcacatgcatgggggatcttacacacactccttgagatgtttagctaccggatgcatcatattcagcctcattacagagttcagctcctgagtcatcttcatactttggctgcagttgcacaaacaaaccagaaccagctccatctttgtgtcgagagcactgctctcaggcttataacagcattaggtagctcagaggtacaaccgcagtttacacgcttccttagtgatcccaaaacagtgctctcagcagaatctgaagaactgaaccgagccttgatattgaccttggctagagcaactcatgtaacagatttttttacaggctctgattcaattcagggaacttggtgtaaagacatacttcagaccatcatgagtttcactcctcataattgggcttcacacaccctgagctgttttccaggcccactacaggcattcttcaaacaaaataatgtgcctcaggaaagccgttttaatctgaaaaaaaatgtggaggaggagtataggaagtggaagtcaatgagcaacgaaaacgacattattacccacttctctatgcagggctcccctcctctctttctttgtcttctctggaaaatgctcttggaaacagatcatattaatcagattggctatagagtattagagagaattggagccagggccttggtagcccatgtgaggacatttgcagatttcctggtatatgagttttctacatcagcagggggtcagcaactcaataaatgcattgaaattcttaatgacatggtatggaagtataacattgttacactggacagattaattctctgcctggtaagaataaatacatttctaagcttattctcttag

SEQ ID NO: 188701 - DNA, 4098 bp, Artificial Sequence
  derived and/or modified sequence
atggagacccagctgcagagcatcttcgaggaggtggtgaagaccgaggtaattgaagaagcctttccaggaatgttcatggacacgcctgaagatgaaaaaacgaagctgataagctgtctgggtgcatttagacagttttggggaggcctgtctcaggagtcccacgagcagtgcatacagtggatagtcaagttcatccatggtcaacattccccgaagcgcatcagcttcttatacgactgcctggcgatggcggtggagactggtcttttgccccctaggctggtctgtgagtcactgatcaactctgatacactggaatgggaaagaacccagctttgggcactgaccttcaaactggtccggaagatcatcggcggggtggattataaaggcgtccgcgaccttctaaaagtgatcctggagaagatcctaaccatccccaacacggtgtcttctgcagtggtgcagcagctgttggccgcgagggaggttatcgcatacatcctggagcgcaatgcatgtttgctacccgcttacttcgctgtaacagaaattcgtaaactctacccagagggtaagcttccacattggttgctgggcaacctggtcagtgacttcgtggacactttccggcctacagccaggattaattctatctgcgggcgttgcagcctgcttcccgtggtgaacaatagcggcgccatatgtaactcatggaagttggatccggcgaccttgaggtttccgttaaagggactattgccctatgacaaagacctttttgagccacagacagcactgttgcgatacgttcttgaacagccttactcacgcgacatggtctgcaatatgctgggcctgaacaagcagacactgaacatcgcccagcacaagcagcgctgccccgttctcgaggaccagttagttgaccttgttgtttacgccatggaacgctcagaaaccgaggaaaaattcgatgatggcggcaccagccagttgctttggcagcatctcagttcacaactcatctttttcgtgctgtttcagttcgcctccttcccgcacatggtgttgagcctccaccagaaactggccggccgcggtcttatcaaaggccgcgaccatttaatgtgggtgcttctgcagttcatctccggctccattcaaaagaacgcactggctgatttcctgccggttatgaagctgtttgacctcctgtaccccgagaaggagtatattcccgtgcccgatattaataagccacaatctacacacgctttcgccatgacgtgcatttggattcatttgaatagaaaggctcagaatgataattccaagctccagatccccattccacatagtctccgcctgcaccatgagttcttgcagcagtctttgcgcaataagtctttgcagatgaacgactataagattgcattgctttgcaacgcctactcgactaacagcgaatgcttcacacttccaatgggggccctcgtggagacgatctacgggaacggtatcatgcgcatacctctccccggcactaactgtatggcttctggtagtatcacaccactcccaatgaacctgctggattcactgactgtgcatgctaaaatgagcctgatacatagtattgcaacgcgggtgatcaagctggctcatgctaagtcctccgtggctcttgcccctgcgctggtcgagacttattcaaggctcctcgtctacatggagatagaatccctcggcatcaaaggcttcatcagccaacttctgccaactgtgtttaagtcccacgcatgggggatcctccacacactcctggagatgttctcttataggatgcatcatatccagcctcattacagagtgcagcttttgtctcacctccacactctggcagcggtggcccagaccaaccagaatcagttgcacttatgcgtggagtctaccgccttgcgtctgattaccgctctaggctcttctgaagtgcagccccagttcacaaggtttttgagcgatccaaaaactgttctgtcggcagagagcgaggagctgaaccgagccctgatcctgacactggctcgggctactcacgtgacagacttttttaccggctcagattcaatacagggcacctggtgtaaagacattttgcagactattatgagcttcacccctcacaactgggcgtcccacacactctcttgcttccctggtcccctccaagcattcttcaaacagaacaatgtgccccaggagtcgagattcaacttaaaaaagaacgtggaagaagaataccggaagtggaagagtatgtccaacgagaatgatataatcacacatttctctatgcaggggtctcctccactcttcctgtgcctgctgtggaagatgctgcttgaaactgaccacattaaccagattggatacagggttctcgaaaggataggtgctagagcattagtagcacacgtgaggaccttcgccgatttccttgtgtatgagttctcaacctctgcaggagggcagcaactcaataagtgcatcgaaattctcaacgacatggtctggaaatataacatcgtgactctggaccggttaattctctgtcttgccatgaggtctcacgaaggaaatgaggctcaagtgtgctactttatcatccagctgctgcttctgaagcccaacgacttccgcaacagggtaagcgatttcgttaaagagaactcacctgaacattggcttcaaaacgattggcatactaaacatatgaattaccacaaaaagtatccagagaagctgtactttgaaggcctcgccgaacaggttgacccaccagtacagatccagagtccttatctccctatttattttggaaacgtctgcctgaggttcctaccagtcttcgatatcgtcatccacaggttcctcgagctactgccagtgagcaaaagccttgaaactctgctggatcacctaggtggcttatacaaattccatgaccgtcccgtgacttacttgtataacaccttacattactacgagatgcaccttcgcgatcgggcctttctgaaaagaaagctcgtgcatgctattattgggtcgctaaaggacaaccgaccccagggctggtgcctttcagatacatacctaaagtgcgctatgaatgcccgggaggaaaacccgtgggtgcccgatgatacctactattgtagactcattggccgcttggtggacactatggcgggcaaatccccaggcccctttcctaactgtgactggcggttcaacgaattcccaaatcctgctgctcatgcgctccacgtgacgtgtgtcgagttgatggcattagccgtttcgggcaaagaggttggtaacgccctgctgaacgttgttctgaagagtcagccgctcgtgccaagagaaaatataaccgcctggatgaacgctattggactgattatcaccgctttgcccgagccctattggatcgtgctgcatgatcgcattgtttccgtgataagcagtccctcactcacctctgaaactgagtgggtgggatacccgttccgtctcttcgactttacagcatgtcaccaatcttactccgaaatgagttgcagctacacactggcattggcccatgccgtctggcaccacagtagcatcgggcaactgagcctaattcctaaattcttgacagaggtcctgctccccatcgtgaagaccgaattccagctgctgtacgtctatcacctcgttggcccatttctgcagaggttccagcaggaaaggacaaggtgtatgatcgaaattggagtggcattctacgatatgttgctgaacgtggaccaatgttccacccacctgaattacatggatcctatatgtgattttctatatcatatgaagtatatgttcaccggggacagtgtgaaggaacaagtagaaaaaatcatctgcaatctcaagcctgcccttaagttgaggctccggttcattacccacataagtaagatggaacccgcagcggttcctcctcaagccatgaacagcgggtcacccgctcctcagagtaaccagtag

SEQ ID NO: 188702 - DNA, 2661 bp, Artificial Sequence
  derived and/or modified sequence
atggagacccagctgcagagcatcttcgaggaggtggtgaagaccgaagtcatagaggaagcattccccggtatgttcatggacacccctgaagatgaaaagacgaagctaattagctgtttgggagccttccgacagttttggggtggtctcagtcaagaatcacacgaacagtgcattcagtggatcgttaaatttattcacggccagcacagtccaaaacggatctcgttcttatacgattgtctagcaatggctgtggagactggcctgcttccgcctagattggtttgtgaatcacttataaactctgacacgttggaatgggagcggacccaactctgggccttaactttcaagttagtccgaaaaatcatcgggggggtggattataagggcgtccgcgacctgcttaaagtaatactcgagaaaatcctgacaattcccaacacagtgtctagcgccgtggtccaacaactgctcgccgcgcgcgaagtgatcgcatacatcctggaacgaaatgcttgcttactgcccgcatacttcgccgtgacagaaatacgaaagttatatcccgagggcaagctgccccactggctattgggcaacttagtgagtgatttcgtggatacgtttcgaccaacagcaagaattaattctatttgcggccggtgcagcctcctgccggttgtgaacaactctggcgccatttgcaacagttggaagttggatcccgccaccctgaggtttccacttaagggcctcctgccctatgacaaggaccttttcgagcctcagactgcactgttgcgatacgtcctggaacagccttattctcgagatatggtctgcaatatgttaggcttgaataaacagacacttaatattgctcagcacaaacagcgatgccctgtgctagaagaccagctggtggatctggtggtttatgcaatggagagaagcgaaaccgaagagaagttcgatgacggcggcaccagtcaactactgtggcagcatcttagtagccagcttatattctttgttctttttcagttcgcatcttttccacatatggtcctctccttgcaccaaaagttggccggtcggggccttatcaagggccgggaccacctcatgtgggtgctgctacagtttatcagtggatctatccagaagaatgcactggccgactttctccccgtaatgaaactgtttgatctactgtatcccgagaaggaatacattcctgtgcccgacatcaataagccacagagcacccacgcctttgccatgacctgcatctggatccacctgaatagaaaggcccaaaatgacaattccaagctgcagatacccataccgcattccctccgcctgcatcacgagttcttacagcagtcacttcgaaataagtccttgcagatgaacgactacaaaattgccttgctgtgcaacgcctattctaccaattccgagtgtttcacactgcctatgggggctctggttgagacaatctatggtaatggaataatgcggatccctcttccagggaccaactgtatggcctcaggttcgataacacctttgcctatgaatttgctggactctctcacagttcatgccaagatgtcgttaatacattccattgcgacacgagtgatcaaactcgcccacgctaaatctagtgtggccctagccccagccttggtggaaacttactcaagactgctcgtctatatggagatagaatctctggggatcaagggatttatcagtcagctgctccccaccgtgttcaagagtcacgcctggggaattctccacaccctattagaaatgttttcgtataggatgcatcacatccaaccccattatcgagtgcaactactgtcacacctccacaccctggctgctgtggcccagacaaaccagaaccagcttcacctgtgcgtggaatccaccgccttaaggttgatcactgccctggggtcttccgaagtacagccccagttcaccagattcctgagtgatcctaagacagttttgtccgcggaatctgaggaactgaacagagccttaatccttactttagccagggcaactcacgttacagacttctttactgggagcgacagcattcaaggtacttggtgtaaggatatcctgcagaccatcatgagtttcaccccccacaactgggccagccacaccctgagttgttttcccggaccactccaagcctttttcaagcaaaacaatgtgccccaggagtctcgttttaaccttaagaaaaacgtggaggaagagtatcgaaaatggaagagtatgtccaatgagaatgatatcattactcacttttccatgcagggctccccccctctgttcctgtgtttactctggaagatgcttctggagactgaccatattaatcagattgggtacagagtcctcgaacgaataggggcccgagccctggtggctcacgttcgcaccttcgccgactttctcgtttatgaattttctaccagtgccgggggtcaacagctcaacaagtgcatcgagatactgaatgacatggtatggaagtacaatatcgtgaccctcgacaggttgattctgtgtctggtgcgcattaatacctttctgtctctattctcgtag

SEQ ID NO: 188703 - DNA, 2661 bp, Artificial Sequence
  derived and/or modified sequence
atggagacccagctgcagagcatcttcgaggaggtggtgaagaccgaagtgattgaggaagcatttcctggcatgttcatggatacccccgaggatgaaaaaaccaagcttatatcttgcctgggggccttcagacagttttggggaggtctgtcacaagagtctcatgagcagtgtatccagtggatcgtgaaattcattcacggccagcattcccctaaaaggatttccttcttgtacgattgtctggccatggcggtcgagaccgggttgttgccaccccggcttgtgtgtgagtcactcatcaactccgatacgcttgagtgggaacgcacccagctctgggcgttaacatttaaactggtccggaaaattattggcggcgtggattataaaggtgttagagacctgttaaaagtgatcttagaaaagatcttgaccataccaaatacagtaagttctgctgtggtgcagcagttgctcgcggcaagggaagtcatcgcctacattttagagcgaaatgcttgtttgcttcctgcctactttgcggtgaccgagataagaaagttgtaccctgagggtaagctccctcactggctattgggcaacctggttagtgattttgtggacacctttagaccaactgctcggatcaacagcatctgtgggcgctgctcattgttacctgtggtgaataactcaggtgccatctgtaatagctggaagttagacccagcaaccctgagattcccgttaaaaggtctgctgccatatgacaaagacttgtttgaaccacaaaccgcattactaaggtacgtccttgagcaaccctactctagagatatggtctgcaacatgctgggtctcaataagcaggtactgaaaatttttaagcacaagcagcggtgtccagtgctggaggaccaattggtagacctagtcgtgtacgccatggaaagatccgaaactgaagaaaagttcgatgacggtggaacatcccagctattatggcaacacctttcttcccaattaatcttttttgtgctcttccaatttgccagctttccccacatggtactgagcctgcaccaaaagctggccggcagagggctgattaaggggcgcgatcacctcatgtgggtgctgctccaatttatcagcggctcaattcaaaaaaacgctcttgccgactttctgcccgtgatgaagctgtttgatctcctgtatcctgaaaaggaatacattcccgtgcctgacattaacaaaccgcaatcaacgcacgcctttgcgatgacttgtatttggattcatcttaataggaaggcgcaaaacgataacagcaagctccaaattcccatcccccattctctcagactgcaccacgagttcctgcaacaatctctgagaaataaatctcttcaaatgaacgattacaaaattgccctgctatgcaacgcatactctacgaatagtgaatgtttcacccttcctatgggagctcttgtagaaactatttacggcaatggcatcatgcgtatccccctgcccggtaccaactgcatggcttctggctctatcaccccgttgccaatgaatctgcttgattctctgaccgtacacgcaaaaatgtccctgatccactctatcgccacaagagttattaagctcgcacacgctaaatctagcgtcgccctggctcctgcgctcgtcgaaacatattcaaggttgctagtgtatatggagatcgagtccctggggattaagggctttattagccagctgctgcccaccgtgttcaaaagtcacgcctggggcattttgcacaccctcctggagatgttttcatataggatgcatcatatccagccacactatagggtgcaactcctcagtcacctgcacacccttgctgcagtggcacagaccaaccagaaccagctacacctctgtgttgagtcaaccgcccttaggctcatcactgcactgggttcttctgaggtgcagcctcagttcactcggtttcttagtgatccaaaaactgttctgtccgcagagtcagaggagctgaatagagcactgatcttgacactggctagggctactcatgtgaccgatttcttcacaggtagcgactccattcagggaacctggtgtaaagatattttgcagaccattatgtcatttacacctcacaattgggcctcccacactcttagttgttttcccgggcctctgcaggccttcttcaaacagaataatgtgcctcaagaaagtcggttcaatttgaaaaagaacgtcgaggaggaatatcgaaaatggaagtccatgtcaaacgagaatgatatcatcacccactttagtatgcagggctctcccccactttttttgtgtttactctggaagatgctgctcgagaccgaccatatcaatcaaatagggtacagggtgctcgagcgtatcggagctcgagctcttgtcgcacacgttagaaccttcgcagacttccttgtatacgaattctctaccagcgccggtggacagcagttgaacaagtgtatagagatactgaacgacatggtgtggaaatacaacatcgtcacgttggacaggctgattctgtgcctggtacggatcaacacattcctgagtcttttctcatag

SEQ ID NO: 188704 - DNA, 4098 bp, Artificial Sequence
  derived and/or modified sequence
atggaaacgcaactgcagtctatattcgaggaagtcgtcaagacagaggtgatcgaggaggccttcccaggaatgtttatggatacgccggaggacgagaagaccaagttgattagctgcttaggagcattcagacagttctggggagggctgtctcaggagagccacgagcagtgcattcagtggatcgtcaaattcattcacggccagcattctccgaagcgaatcagcttcctgtatgactgccttgcgatggccgtggagactggattgctcccaccaaggcttgtttgcgagagtcttatcaacagtgatacccttgagtgggagagaacccagctatgggcgctgactttcaagctggttcgcaagattataggtggggtggactacaagggggtccgtgatctgctaaaggtgatcctagaaaagattctgacaatcccaaataccgtgtccagtgcagtcgtgcagcaactactcgcggctcgcgaagtcatcgcctatattctggagaggaacgcttgcctgctgcctgcatattttgctgtgacagaaattcgcaaactatatccagagggaaagcttccgcactggttgctgggaaaccttgtaagcgattttgtggacactttccgtcctacagccagaatcaactccatctgtggcagatgtagcttgctgccagttgtgaacaatagcggagctatttgcaactcgtggaagctagaccctgccactctgcggtttccactgaagggcctccttccctacgacaaggatctgtttgaacctcagaccgcacttctacgttacgtcctggaacagccctattctagagacatggtatgtaatatgctgggcctcaataaacagacccttaacattgcccagcataaacagcgctgcccagtgctggaagaccaactcgttgatctagtggtctacgctatggaacggtctgaaaccgaagagaaatttgacgatgggggtacatctcagctgttatggcagcatttatccagtcaattaattttcttcgtactgttccaatttgcaagctttccccacatggttcttagcctgcatcagaaactggcaggtcgtgggttgatcaaaggcagggatcacctgatgtgggtgctcctccagttcattagcggtagcattcagaaaaacgccctcgccgattttctgccggttatgaagctgtttgacttgctgtaccccgaaaaagaatatattcccgtccctgacatcaataagcctcaatccacgcatgcctttgctatgacttgtatctggatccatctgaaccgcaaggcccagaacgataattccaaactgcagattcccatccctcatagtctccgattgcaccatgagtttttacagcagagcttgcgaaacaagagcttacagatgaacgattacaagattgccctgctctgtaatgcttacagcactaattctgagtgtttcaccttacctatgggagctcttgtcgaaaccatctatggcaatggcataatgcgtatacccctgccagggaccaactgtatggcgtccgggtccattacaccactccctatgaatttactggattcactgacagtccacgcaaagatgagcctgatccattccatcgctacaagggtcatcaagctggctcacgcgaaaagttccgtagcgttagcaccagcgctggtagagacttacagtagactgctggtgtatatggaaattgagagcctcgggatcaaaggattcatttcccagctgctcccgacggttttcaaaagccacgcttggggcattttgcatacgttgctagagatgttcagctatcggatgcatcacattcaaccgcactatcgtgttcaactgctcagccatctgcataccctcgctgctgtggctcagacgaatcagaaccagcttcatttatgtgtagagagcactgccttaaggctgataacagcactgggcagctctgaggtgcaaccccagttcacaagattcttgtccgaccccaaaacggttttaagcgcagagagtgaggagctcaatagggccctgatcctgaccttagcaagagctacgcacgtcacagatttcttcacaggctcggacagtatccagggcacttggtgcaaggacatactgcagaccattatgagtttcacaccacataattgggctagccacacactcagctgcttcccaggcccattgcaggccttcttcaagcagaacaatgtcccacaagaatcccgttttaacctgaagaaaaatgtggaagaagaatataggaaatggaaaagtatgagcaacgagaacgatattatcacccactttagtatgcagggctcacccccactgttcctctgcctcctttggaagatgctattagaaacggaccatattaaccagatcggttacagagtactggagcggatcggagctcgtgcgctagtggctcacgtgagaactttcgccgatttcctggtgtacgagttcagtacctctgcaggtggccaacagctgaacaagtgtatagagattctgaatgatatggtttggaagtacaatatcgtcacccttgaccgcctcattctttgcttggccatgcggtctcacgagggtaacgaagcccaagtgtgttattttattattcagttgctcctcctcaagcctaacgattttagaaatcgagtttctgactttgtgaaggaaaactcccctgaacactggctccagaacgattggcatactaaacatatgaattaccataagaaatatccggaaaagttgtatttcgagggccttgctgaacaggtggacccacccgtgcagattcagtcaccctatcttcccatttacttcgggaacgtctgcctgaggtttctgccagtgttcgacatcgtcatccatagattcctggaactgctgccagtgagcaaatcactggaaacattactcgaccatctcggtggactgtataaatttcatgaccggccagttacttacctctacaataccctccattactatgaaatgcatctgcgcgacagggcttttcttaaaagaaaactggtgcatgctattatcggctctctgaaggacaatcgccctcagggctggtgtctgtccgatacttacttaaaatgcgccatgaatgcgagggaagagaacccttgggttcccgacgatacgtattactgccgtctgataggccgattagtagacaccatggcaggcaagagtccgggaccttttccaaattgtgattggaggtttaatgaattcccaaaccctgccgcacacgcccttcacgtcacctgcgtggaactgatggccctcgcagtctccggtaaggaggtgggaaacgcccttctcaatgtcgtcctcaaaagccagcctctggtaccccgagaaaatattaccgcctggatgaatgccataggcttgatcatcactgcactgcctgagccttactggatcgtgctccatgacaggatagtgagcgttatttcatccccgtcactcacctcagaaactgagtgggtgggatacccttttcggttattcgatttcaccgcttgccaccaatcctactcagagatgtcttgttcctataccctggctttagcccacgccgtgtggcaccactcctccataggacagttaagcctcattccaaagtttttgaccgaggtactcttgccgatcgtgaagactgagtttcaactgctgtacgtgtatcacttagttgggcctttcctgcaaagattccagcaggaaaggacacgctgcatgatcgagattggggtggctttctatgacatgctcctgaacgttgatcagtgcagcactcacctgaattacatggaccctatatgcgacttcctgtatcatatgaaatatatgtttacaggcgattccgtgaaggagcaggtcgaaaaaataatatgtaacctaaaacccgcactaaagctgcggcttcgctttattactcatatttcaaaaatggaacccgcagccgtgccccctcaggctatgaattctggaagcccggctcctcagtcaaaccaatag

SEQ ID NO: 188705 - DNA, 2661 bp, Artificial Sequence
  derived and/or modified sequence
atggagacacagttgcagagcattttcgaagaggtggtaaagacagaagtcattgaagaggccttccccggtatgtttatggacactccagaggacgaaaaaactaagctgatatcgtgcttaggcgcatttcgccagttctggggcggtctgagccaggaatctcacgagcagtgcatccagtggatcgttaagttcatccatggtcaacactccccaaagaggatttcctttctgtacgactgtttagcgatggccgttgagacaggcctcctgcctccaagactggtgtgtgagagtctcatcaactctgacacattagaatgggaaaggactcaactctgggccctgaccttcaaactggtgaggaagatcatcggcggagtcgattacaagggcgtaagagatcttcttaaagtgatcttggaaaagatcctgaccatccccaataccgtgagtagcgcggtggtgcagcagttactggccgcacgagaggtgatagcttatatcctagaaagaaatgcgtgcctgctgcccgcttactttgctgttacagagattcgaaaactgtaccccgagggaaagttgccccactggctgcttggaaatctggtgagtgactttgtagacaccttcagacctaccgccaggatcaactccatctgcggcaggtgtagtctgcttccggtggtcaacaactccggtgctatttgtaacagctggaaacttgaccccgcaacgctccgatttccacttaagggcctgctgccttacgataaagatctcttcgaaccacagacggccctcctcagatacgtgttggaacagccatacagtcgggacatggtttgtaacatgcttggtttgaacaagcagactcttaacatcgcccagcacaaacaaaggtgtccagtcttagaagatcaattagtagatttggtggtgtacgccatggagcggagcgagacagaggagaaattcgatgacggcggtacgagccagctgctctggcagcacctgtctagccaattgatcttctttgtactgtttcaattcgcgtcatttcctcatatggttctgagccttcatcagaaattagcgggacggggtctgatcaaagggcgtgaccacctcatgtgggtgctgctccagtttatcagcggatccatccagaagaatgctctggcggacttccttcctgtgatgaaactattcgacctattatacccagagaaagagtacattcctgttccggatatcaacaaaccgcagagcacccacgcctttgccatgacatgcatatggatccacctgaatcggaaggcgcagaatgataattccaagttgcagattcctataccccattccttgcggttgcaccatgagttcttgcaacagagtctacgtaataagtccctgcagatgaacgattataagatcgctttactctgcaacgcgtactccaccaactctgagtgtttcaccctgccaatgggagccttggtggagactatatacggcaacggtataatgaggatcccgctgccaggaacaaattgtatggctagtggatccattaccccccttccaatgaaccttctggacagtctaaccgttcatgctaagatgagcctgatccactccattgctacgcgagtcattaaattggcacatgccaagtcgagtgtcgctctggcccctgcgctggtggagacatattcacggctgcttgtgtacatggagattgagagcctggggatcaagggcttcatctctcagcttttgccgaccgtgttcaagtctcatgcatggggcattcttcacactctgcttgagatgttctcctaccgaatgcaccatatccaaccacactatcgggtgcagctactcagccacctgcatactctcgctgcagtggctcagacaaatcagaatcagttacacttatgcgtggaaagtaccgcattacgcctgataacggctctcggctcgtccgaggtgcaaccccaatttactaggtttttaagtgatccaaagaccgtgttgagtgctgaaagcgaagaacttaaccgtgccctgatcctcactcttgcgcgtgcgacacatgtcacagatttctttacgggtagcgattcaatccagggtacctggtgcaaggacatcctccaaacaatcatgtctttcactcctcacaattgggcttctcacactctctcttgcttccccggacccctgcaggctttcttcaagcagaataacgtacctcaggaatctagattcaatctgaagaagaatgtggaggaagagtatcgaaagtggaaatctatgtctaacgagaatgatattatcacacacttctccatgcagggctctccccctctttttttgtgcctcctgtggaagatgttattagaaacagaccacatcaaccagattggttatagagtactggaaagaatcggagctcgcgctttggtagcccacgtgcgaacatttgcagacttccttgtttacgaatttagcacttccgcaggcggacagcagcttaataaatgcattgaaatcctgaatgatatggtgtggaagtataatatagttactctggaccgtctgattctctgtctggtgagaatcaacacgttcctctcactgttctcctag

SEQ ID NO: 188706 - DNA, 2661 bp, Artificial Sequence
  derived and/or modified sequence
atggaaacacaactgcagagtatcttcgaagaggtggtgaagacggaggtgatcgaggaggcttttcctgggatgtttatggacacacccgaggacgagaaaaccaaactgattagctgcttaggcgctttcagacagttttggggtgggctgagccaggaatcgcacgaacaatgcatccagtggatcgtaaagttcatccatggccaacatagccccaagagaatttcatttttatatgactgcctggcgatggccgtcgagaccggcctgctccccccacgcctggtctgcgaatctctgattaactccgacactctggagtgggagcgcacccaactgtgggccctgacattcaagcttgtgcggaaaatcattggtggggtcgactataaaggagtcagggatttgctgaaagtgattttagagaaaatcctcacaattcctaatacggtgagttcagctgtcgtccagcagctgctggccgctcgcgaagtgatagcgtatattctggagagaaacgcctgtctcctgcctgcttacttcgcggtgacagaaatccgaaaattgtatccagagggtaagctgccccactggcttctgggcaacttggtttctgactttgtcgataccttccggccaaccgccaggatcaattccatttgcggcagatgctccttgctgcctgttgttaacaacagtggagcaatctgtaattcttggaagctggatccggcaactctccgattcccactgaagggcctcctgccatatgataaggatctgttcgagcctcagactgctttgctgcgctatgtactggagcagccgtattcccgcgatatggtttgtaacatgctgggcttaaacaaacaggtcctgaaaatcttcaaacacaagcagcgctgtcctgtgctggaggatcaacttgtcgatctcgttgtttacgcaatggagcggagcgaaacagaagagaagttcgacgatggcggtaccagccagctcctctggcagcaccttagttcccagctcattttttttgtgctgtttcagtttgcttcatttccccatatggtacttagcctgcaccaaaaactcgctggcagggggctcataaagggtcgagaccatttaatgtgggtgctgcttcagtttatctctgggtccatccagaagaatgcccttgctgacttcctgccggttatgaagctgttcgacttgttatacccagaaaaagaatacattccagttccagatatcaacaagccgcagtcaacccacgccttcgcaatgacctgcatttggattcaccttaaccgtaaagcccagaatgataattctaagttgcagatcccaatccctcatagcctgaggctgcaccacgaatttctgcagcagagcctcagaaacaaaagcctgcagatgaacgattacaagatcgccctcctgtgcaacgcctacagtacaaattctgaatgcttcaccctaccaatgggcgcactagtggagactatatacgggaatggtattatgagaattcccctaccaggaactaactgcatggccagcggatcaatcacccccctgccgatgaacctgctggactccctgaccgtgcatgctaaaatgtctctcattcacagtattgctacaagagttataaaactggcccatgcgaaaagctccgtcgccctggccccagcgctcgtggaaacgtactccagattgctggtatatatggagatcgagtcgcttggaatcaaagggttcatcagtcagcttctccctactgtttttaagtcgcacgcttggggtatcctgcataccctcctagaaatgttttcttatagaatgcaccacatacagccccattatcgggtacagcttttgtctcacctgcacacgctggcagctgtggcccagacaaaccagaaccagcttcacctctgtgttgagtcgacagcattaagacttatcaccgctctaggatccagtgaggtgcagcctcagttcactagatttctctccgatccaaagaccgtgctctcagccgaatccgaagagcttaacagggccctcattctcaccttagccagggcaacacacgtgacggatttctttacaggtagtgacagcattcaggggacatggtgtaaagacatcctccaaaccattatgagtttcacgccacacaactgggcttcccatacactgtcatgttttccagggcctcttcaggcctttttcaaacagaataatgtcccgcaggagtcaagattcaatctgaagaagaacgtagaagaggaatatagaaaatggaaatccatgagtaacgaaaatgatatcattacacacttctccatgcagggctcccctccactgtttctgtgcttgctctggaagatgctcctggaaactgatcatataaatcagatcgggtaccgagtcctcgagcgtattggtgctagggcactcgtagcccacgttcggacttttgccgactttcttgtctatgaattctcaacctctgctgggggacagcaactgaataagtgcatcgagattcttaatgatatggtgtggaagtacaatatagttactctggacagactgattctctgtttagtcagaattaataccttcctgtccctattctcatag

SEQ ID NO: 188707 - DNA, 4098 bp, Artificial Sequence
  derived and/or modified sequence
atggagacccagctgcagagcatcttcgaggaggtggtgaagaccgaggtgatcgaggaggccttccccggcatgttcatggacacccccgaggacgagaagaccaagctgatcagctgcctgggcgccttcagacagttctggggcggcctgagccaggagagccacgagcagtgcatccagtggatcgtgaagttcatccacggccagcacagccccaagagaatcagcttcctgtacgactgcctggccatggccgtggagaccggcctgctgccccccagactggtgtgcgagagcctgatcaacagcgacaccctggagtgggagagaacccagctgtgggccctgaccttcaagctggtgagaaagatcatcggcggcgtggactacaagggcgtgagagacctgctgaaggtgatcctggagaagatcctgaccatccccaacaccgtgagcagcgccgtggtgcagcagctgctggccgccagagaggtgatcgcctacatcctggagagaaacgcctgcctgctgcccgcctacttcgccgtgaccgagatcagaaagctgtaccccgagggcaagctgccccactggctgctgggcaacctggtgagcgacttcgtggacaccttcagacccaccgccagaatcaacagcatctgcggcagatgcagcctgctgcccgtggtgaacaacagcggcgccatctgcaacagctggaagctggaccccgccaccctgagattccccctgaagggcctgctgccctacgacaaggacctgttcgagccccagaccgccctgctgagatacgtgctggagcagccctacagcagagacatggtgtgcaacatgctgggcctgaacaagcagaccctgaacatcgcccagcacaagcagagatgccccgtgctggaggaccagctggtggacctggtggtgtacgccatggagagaagcgagaccgaggagaagttcgacgacggcggcaccagccagctgctgtggcagcacctgagcagccagctgatcttcttcgtgctgttccagttcgccagcttcccccacatggtgctgagcctgcaccagaagctggccggcagaggcctgatcaagggcagagaccacctgatgtgggtgctgctgcagttcatcagcggcagcatccagaagaacgccctggccgacttcctgcccgtgatgaagctgttcgacctgctgtaccccgagaaggagtacatccccgtgcccgacatcaacaagccccagagcacccacgccttcgccatgacctgcatctggatccacctgaacagaaaggcccagaacgacaacagcaagctgcagatccccatcccccacagcctgagactgcaccacgagttcctgcagcagagcctgagaaacaagagcctgcagatgaacgactacaagatcgccctgctgtgcaacgcctacagcaccaacagcgagtgcttcaccctgcccatgggcgccctggtggagaccatctacggcaacggcatcatgagaatccccctgcccggcaccaactgcatggccagcggcagcatcacccccctgcccatgaacctgctggacagcctgaccgtgcacgccaagatgagcctgatccacagcatcgccaccagagtgatcaagctggcccacgccaagagcagcgtggccctggcccccgccctggtggagacctacagcagactgctggtgtacatggagatcgagagcctgggcatcaagggcttcatcagccagctgctgcccaccgtgttcaagagccacgcctggggcatcctgcacaccctgctggagatgttcagctacagaatgcaccacatccagccccactacagagtgcagctgctgagccacctgcacaccctggccgccgtggcccagaccaaccagaaccagctgcacctgtgcgtggagagcaccgccctgagactgatcaccgccctgggcagcagcgaggtgcagccccagttcaccagattcctgagcgaccccaagaccgtgctgagcgccgagagcgaggagctgaacagagccctgatcctgaccctggccagagccacccacgtgaccgacttcttcaccggcagcgacagcatccagggcacctggtgcaaggacatcctgcagaccatcatgagcttcaccccccacaactgggccagccacaccctgagctgcttccccggccccctgcaggccttcttcaagcagaacaacgtgccccaggagagcagattcaacctgaagaagaacgtggaggaggagtacagaaagtggaagagcatgagcaacgagaacgacatcatcacccacttcagcatgcagggcagcccccccctgttcctgtgcctgctgtggaagatgctgctggagaccgaccacatcaaccagatcggctacagagtgctggagagaatcggcgccagagccctggtggcccacgtgagaaccttcgccgacttcctggtgtacgagttcagcaccagcgccggcggccagcagctgaacaagtgcatcgagatcctgaacgacatggtgtggaagtacaacatcgtgaccctggacagactgatcctgtgcctggccatgagaagccacgagggcaacgaggcccaggtgtgctacttcatcatccagctgctgctgctgaagcccaacgacttcagaaacagagtgagcgacttcgtgaaggagaacagccccgagcactggctgcagaacgactggcacaccaagcacatgaactaccacaagaagtaccccgagaagctgtacttcgagggcctggccgagcaggtggacccccccgtgcagatccagagcccctacctgcccatctacttcggcaacgtgtgcctgagattcctgcccgtgttcgacatcgtgatccacagattcctggagctgctgcccgtgagcaagagcctggagaccctgctggaccacctgggcggcctgtacaagttccacgacagacccgtgacctacctgtacaacaccctgcactactacgagatgcacctgagagacagagccttcctgaagagaaagctggtgcacgccatcatcggcagcctgaaggacaacagaccccagggctggtgcctgagcgacacctacctgaagtgcgccatgaacgccagagaggagaacccctgggtgcccgacgacacctactactgcagactgatcggcagactggtggacaccatggccggcaagagccccggccccttccccaactgcgactggagattcaacgagttccccaaccccgccgcccacgccctgcacgtgacctgcgtggagctgatggccctggccgtgagcggcaaggaggtgggcaacgccctgctgaacgtggtgctgaagagccagcccctggtgcccagagagaacatcaccgcctggatgaacgccatcggcctgatcatcaccgccctgcccgagccctactggatcgtgctgcacgacagaatcgtgagcgtgatcagcagccccagcctgaccagcgagaccgagtgggtgggctaccccttcagactgttcgacttcaccgcctgccaccagagctacagcgagatgagctgcagctacaccctggccctggcccacgccgtgtggcaccacagcagcatcggccagctgagcctgatccccaagttcctgaccgaggtgctgctgcccatcgtgaagaccgagttccagctgctgtacgtgtaccacctggtgggccccttcctgcagagattccagcaggagagaaccagatgcatgatcgagatcggcgtggccttctacgacatgctgctgaacgtggaccagtgcagcacccacctgaactacatggaccccatctgcgacttcctgtaccacatgaagtacatgttcaccggcgacagcgtgaaggagcaggtggagaagatcatctgcaacctgaagcccgccctgaagctgagactgagattcatcacccacatcagcaagatggagcccgccgccgtgcccccccaggccatgaacagcggcagccccgccccccagagcaaccagtag

SEQ ID NO: 188708 - DNA, 2661 bp, Artificial Sequence
  derived and/or modified sequence
atggagacccagctgcagagcatcttcgaggaggtggtgaagaccgaggtgatcgaggaggccttccccggcatgttcatggacacccccgaggacgagaagaccaagctgatcagctgcctgggcgccttcagacagttctggggcggcctgagccaggagagccacgagcagtgcatccagtggatcgtgaagttcatccacggccagcacagccccaagagaatcagcttcctgtacgactgcctggccatggccgtggagaccggcctgctgccccccagactggtgtgcgagagcctgatcaacagcgacaccctggagtgggagagaacccagctgtgggccctgaccttcaagctggtgagaaagatcatcggcggcgtggactacaagggcgtgagagacctgctgaaggtgatcctggagaagatcctgaccatccccaacaccgtgagcagcgccgtggtgcagcagctgctggccgccagagaggtgatcgcctacatcctggagagaaacgcctgcctgctgcccgcctacttcgccgtgaccgagatcagaaagctgtaccccgagggcaagctgccccactggctgctgggcaacctggtgagcgacttcgtggacaccttcagacccaccgccagaatcaacagcatctgcggcagatgcagcctgctgcccgtggtgaacaacagcggcgccatctgcaacagctggaagctggaccccgccaccctgagattccccctgaagggcctgctgccctacgacaaggacctgttcgagccccagaccgccctgctgagatacgtgctggagcagccctacagcagagacatggtgtgcaacatgctgggcctgaacaagcagaccctgaacatcgcccagcacaagcagagatgccccgtgctggaggaccagctggtggacctggtggtgtacgccatggagagaagcgagaccgaggagaagttcgacgacggcggcaccagccagctgctgtggcagcacctgagcagccagctgatcttcttcgtgctgttccagttcgccagcttcccccacatggtgctgagcctgcaccagaagctggccggcagaggcctgatcaagggcagagaccacctgatgtgggtgctgctgcagttcatcagcggcagcatccagaagaacgccctggccgacttcctgcccgtgatgaagctgttcgacctgctgtaccccgagaaggagtacatccccgtgcccgacatcaacaagccccagagcacccacgccttcgccatgacctgcatctggatccacctgaacagaaaggcccagaacgacaacagcaagctgcagatccccatcccccacagcctgagactgcaccacgagttcctgcagcagagcctgagaaacaagagcctgcagatgaacgactacaagatcgccctgctgtgcaacgcctacagcaccaacagcgagtgcttcaccctgcccatgggcgccctggtggagaccatctacggcaacggcatcatgagaatccccctgcccggcaccaactgcatggccagcggcagcatcacccccctgcccatgaacctgctggacagcctgaccgtgcacgccaagatgagcctgatccacagcatcgccaccagagtgatcaagctggcccacgccaagagcagcgtggccctggcccccgccctggtggagacctacagcagactgctggtgtacatggagatcgagagcctgggcatcaagggcttcatcagccagctgctgcccaccgtgttcaagagccacgcctggggcatcctgcacaccctgctggagatgttcagctacagaatgcaccacatccagccccactacagagtgcagctgctgagccacctgcacaccctggccgccgtggcccagaccaaccagaaccagctgcacctgtgcgtggagagcaccgccctgagactgatcaccgccctgggcagcagcgaggtgcagccccagttcaccagattcctgagcgaccccaagaccgtgctgagcgccgagagcgaggagctgaacagagccctgatcctgaccctggccagagccacccacgtgaccgacttcttcaccggcagcgacagcatccagggcacctggtgcaaggacatcctgcagaccatcatgagcttcaccccccacaactgggccagccacaccctgagctgcttccccggccccctgcaggccttcttcaagcagaacaacgtgccccaggagagcagattcaacctgaagaagaacgtggaggaggagtacagaaagtggaagagcatgagcaacgagaacgacatcatcacccacttcagcatgcagggcagcccccccctgttcctgtgcctgctgtggaagatgctgctggagaccgaccacatcaaccagatcggctacagagtgctggagagaatcggcgccagagccctggtggcccacgtgagaaccttcgccgacttcctggtgtacgagttcagcaccagcgccggcggccagcagctgaacaagtgcatcgagatcctgaacgacatggtgtggaagtacaacatcgtgaccctggacagactgatcctgtgcctggtgagaatcaacaccttcctgagcctgttcagctag

SEQ ID NO: 188709 - DNA, 2661 bp, Artificial Sequence
  derived and/or modified sequence
atggagacccagctgcagagcatcttcgaggaggtggtgaagaccgaggtgatcgaggaggccttccccggcatgttcatggacacccccgaggacgagaagaccaagctgatcagctgcctgggcgccttcagacagttctggggcggcctgagccaggagagccacgagcagtgcatccagtggatcgtgaagttcatccacggccagcacagccccaagagaatcagcttcctgtacgactgcctggccatggccgtggagaccggcctgctgccccccagactggtgtgcgagagcctgatcaacagcgacaccctggagtgggagagaacccagctgtgggccctgaccttcaagctggtgagaaagatcatcggcggcgtggactacaagggcgtgagagacctgctgaaggtgatcctggagaagatcctgaccatccccaacaccgtgagcagcgccgtggtgcagcagctgctggccgccagagaggtgatcgcctacatcctggagagaaacgcctgcctgctgcccgcctacttcgccgtgaccgagatcagaaagctgtaccccgagggcaagctgccccactggctgctgggcaacctggtgagcgacttcgtggacaccttcagacccaccgccagaatcaacagcatctgcggcagatgcagcctgctgcccgtggtgaacaacagcggcgccatctgcaacagctggaagctggaccccgccaccctgagattccccctgaagggcctgctgccctacgacaaggacctgttcgagccccagaccgccctgctgagatacgtgctggagcagccctacagcagagacatggtgtgcaacatgctgggcctgaacaagcaggtgctgaagatcttcaagcacaagcagagatgccccgtgctggaggaccagctggtggacctggtggtgtacgccatggagagaagcgagaccgaggagaagttcgacgacggcggcaccagccagctgctgtggcagcacctgagcagccagctgatcttcttcgtgctgttccagttcgccagcttcccccacatggtgctgagcctgcaccagaagctggccggcagaggcctgatcaagggcagagaccacctgatgtgggtgctgctgcagttcatcagcggcagcatccagaagaacgccctggccgacttcctgcccgtgatgaagctgttcgacctgctgtaccccgagaaggagtacatccccgtgcccgacatcaacaagccccagagcacccacgccttcgccatgacctgcatctggatccacctgaacagaaaggcccagaacgacaacagcaagctgcagatccccatcccccacagcctgagactgcaccacgagttcctgcagcagagcctgagaaacaagagcctgcagatgaacgactacaagatcgccctgctgtgcaacgcctacagcaccaacagcgagtgcttcaccctgcccatgggcgccctggtggagaccatctacggcaacggcatcatgagaatccccctgcccggcaccaactgcatggccagcggcagcatcacccccctgcccatgaacctgctggacagcctgaccgtgcacgccaagatgagcctgatccacagcatcgccaccagagtgatcaagctggcccacgccaagagcagcgtggccctggcccccgccctggtggagacctacagcagactgctggtgtacatggagatcgagagcctgggcatcaagggcttcatcagccagctgctgcccaccgtgttcaagagccacgcctggggcatcctgcacaccctgctggagatgttcagctacagaatgcaccacatccagccccactacagagtgcagctgctgagccacctgcacaccctggccgccgtggcccagaccaaccagaaccagctgcacctgtgcgtggagagcaccgccctgagactgatcaccgccctgggcagcagcgaggtgcagccccagttcaccagattcctgagcgaccccaagaccgtgctgagcgccgagagcgaggagctgaacagagccctgatcctgaccctggccagagccacccacgtgaccgacttcttcaccggcagcgacagcatccagggcacctggtgcaaggacatcctgcagaccatcatgagcttcaccccccacaactgggccagccacaccctgagctgcttccccggccccctgcaggccttcttcaagcagaacaacgtgccccaggagagcagattcaacctgaagaagaacgtggaggaggagtacagaaagtggaagagcatgagcaacgagaacgacatcatcacccacttcagcatgcagggcagcccccccctgttcctgtgcctgctgtggaagatgctgctggagaccgaccacatcaaccagatcggctacagagtgctggagagaatcggcgccagagccctggtggcccacgtgagaaccttcgccgacttcctggtgtacgagttcagcaccagcgccggcggccagcagctgaacaagtgcatcgagatcctgaacgacatggtgtggaagtacaacatcgtgaccctggacagactgatcctgtgcctggtgagaatcaacaccttcctgagcctgttcagctag

SEQ ID NO: 188710 - protein, 171 aa, Artificial Sequence
  derived and/or modified sequence
MVKLNSNPSEKGTKPPSVEDGFQTVPLITPLEVNHLQLPAPEKVIVKTRTEYQPEQKNKGKFRVPKIAEFTVTILVSLALAFLACIVFLVVYKAFTYDHSCPEGFVYKHKRCIPASLDAYYSSQDPNSRSRFYTVISHYSVAKQSTARAIGPWLSAAAVIHEPKPPKTQGH

SEQ ID NO: 188711 - protein, 146 aa, Artificial Sequence
  derived and/or modified sequence
MVKLNSNPSEKGTKPPSVEDGFQTVPLITPLEVNHLQLPAPEKVIVKTRTEYQPEQKNKGKFRVPKIAEFTVTILVSLALAFLACIVFLVVYKAFTYDHSCPEGFVYKHKRCIPASLDAYYSSQDPNSRSRFYTVISHYSVAKQST

SEQ ID NO: 188712 - protein, 159 aa, Artificial Sequence
  derived and/or modified sequence
MVKLNSNPSEKGTKPPSVEDGFQTVPLITPLEVNHLQLPAPEKVIVKTRTEYQPEQKNKGKFRVPKIAEFTVTILVSLALAFLACIVFLVVYKAFTYDHSCPEGFVYKHKRCIPASLDAYYSSQDPNSRSRFYTVISHYSVAKQSTARAIGPWLSAAAV

SEQ ID NO: 188713 - DNA, 516 bp, Artificial Sequence
  derived and/or modified sequence
atggtgaagctgaacagcaaccccagcgagaagggcaccaagccccccagcgtggaggacggcttccagaccgtgcccctgatcacccccctggaggtgaaccacctgcagctgcccgcccccgagaaggtgatcgtgaagaccagaaccgagtaccagcccgagcagaagaacaagggcaagttcagagtgcccaagatcgccgagttcaccgtgaccatcctggtgagcctggccctggccttcctggcctgcatcgtgttcctggtggtgtacaaggccttcacctacgaccacagctgccccgagggcttcgtgtacaagcacaagagatgcatccccgccagcctggacgcctactacagcagccaggaccccaacagcagaagcagattctacaccgtgatcagccactacagcgtggccaagcagagcaccgccagagccatcggcccctggctgagcgccgccgccgtgatccacgagcccaagccccccaagacccagggccactag

SEQ ID NO: 188714 - DNA, 441 bp, Artificial Sequence
  derived and/or modified sequence
atggtgaagctgaacagcaaccccagcgagaagggcaccaagccccccagcgtggaggacggcttccagaccgtgcccctgatcacccccctggaggtgaaccacctgcagctgcccgcccccgagaaggtgatcgtgaagaccagaaccgagtaccagcccgagcagaagaacaagggcaagttcagagtgcccaagatcgccgagttcaccgtgaccatcctggtgagcctggccctggccttcctggcctgcatcgtgttcctggtggtgtacaaggccttcacctacgaccacagctgccccgagggcttcgtgtacaagcacaagagatgcatccccgccagcctggacgcctactacagcagccaggaccccaacagcagaagcagattctacaccgtgatcagccactacagcgtggccaagcagagcacctag

SEQ ID NO: 188715 - DNA, 480 bp, Artificial Sequence
  derived and/or modified sequence
atggtgaagctgaacagcaaccccagcgagaagggcaccaagccccccagcgtggaggacggcttccagaccgtgcccctgatcacccccctggaggtgaaccacctgcagctgcccgcccccgagaaggtgatcgtgaagaccagaaccgagtaccagcccgagcagaagaacaagggcaagttcagagtgcccaagatcgccgagttcaccgtgaccatcctggtgagcctggccctggccttcctggcctgcatcgtgttcctggtggtgtacaaggccttcacctacgaccacagctgccccgagggcttcgtgtacaagcacaagagatgcatccccgccagcctggacgcctactacagcagccaggaccccaacagcagaagcagattctacaccgtgatcagccactacagcgtggccaagcagagcaccgccagagccatcggcccctggctgagcgccgccgccgtgtag

SEQ ID NO: 188716 - DNA, 516 bp, Artificial Sequence
  derived and/or modified sequence
atggtaaagttaaacagtaatccaagcgaaaagggaaccaaacctccaagcgtggaggacggcttccaaaccgttccgcttataacgcctttggaagtcaatcatcttcagctccccgcacccgaaaaggtgatagtgaaaaccagaactgaatatcagcccgagcagaaaaacaaaggaaaatttcgagtgccaaaaattgctgagttcactgttactatcctggtatctctggccctggccttcctggcctgtattgtctttctcgtggtgtataaggctttcacatacgatcactcatgtccagagggcttcgtttacaaacataagaggtgtatccccgcatccctcgacgcgtactactcatctcaggatcccaatagtcgctcccgtttttataccgttatcagccattattcagtggcaaaacagtcaaccgccagggctattgggccctggcttagtgccgccgcagtgatccatgagcccaaaccacccaaaacgcaaggtcactag

SEQ ID NO: 188717 - DNA, 516 bp, Artificial Sequence
  derived and/or modified sequence
atggtaaagcttaattcaaatcccagcgagaaaggtaccaagcccccatccgtggaagatggattccagacggtgccgctaatcacgcccctcgaagtcaaccatctgcagctccccgctcctgaaaaggtgatcgtcaagacacgaactgagtaccaaccagaacaaaagaataagggaaagttccgagtgcccaaaatagcggagttcaccgtgaccatcctggtttcactggccctggctttcctggcctgcatcgtgttcttagtggtttataaagcctttacgtacgaccattcttgccctgaggggtttgtttataaacataaacgttgcattcccgcctctttggatgcttattattcctcacaggacccaaactcacgctccagattctacacagtgatcagtcactacagcgtcgcgaaacagtctactgcacgcgccatcggcccttggctgtcagcggccgctgttatccatgagccaaagcctcccaaaacacagggccattag

SEQ ID NO: 188718 - DNA, 441 bp, Artificial Sequence
  derived and/or modified sequence
atggtgaaactcaactcaaatccttctgagaagggcaccaagccccccagtgtggaggacggatttcagacagttccactcatcacaccccttgaggtgaatcacctacagctgcccgccccagaaaaagtgattgtaaaaacacggacagaatatcagcccgagcagaaaaataagggtaaatttcgcgtgcctaaaatcgccgagtttacagtaactattctcgtgagtctggcgctcgccttcctagcgtgcatcgtattcctggtcgtgtataaggccttcacctatgatcactcttgccctgagggttttgtctataagcacaagcgctgcatcccagcaagcctggacgcttactactcaagtcaagaccccaatagtaggagccgattctacacagtcataagccattatagtgtggcaaaacaaagcacatag

SEQ ID NO: 188719 - DNA, 480 bp, Artificial Sequence
  derived and/or modified sequence
atggtaaagctgaacagtaacccttccgagaagggcaccaaaccaccgagtgtggaagatgggtttcaaacggtacccttaatcactccattggaagtcaaccaccttcagctgccggcacctgagaaggtcatagtgaagaccaggacggagtatcaacctgaacagaagaacaaggggaaattcagggtgcccaagatcgccgagtttaccgtgacaatactggtgtccttggctctggcatttcttgcttgcattgtatttctggtagtgtataaagcatttacatacgatcactcttgtcccgagggattcgtgtataaacacaagcgctgcatccctgccagtctcgacgcatactactcaagccaggaccccaatagtcgtagtcgattttataccgtaatctcacattatagcgtggccaagcagtctacggcccgcgcaattggcccctggctgagcgcggcagcggtgtag

SEQ ID NO: 188720 - DNA, 516 bp, Artificial Sequence
  derived and/or modified sequence
atggtgaagctgaacagcaaccccagcgagaagggcaccaagcccccatctgtggaggatggcttccagacagtgcccctcatcacccccctggaggtgaaccacctgcagctgcctgcccctgagaaggtgattgtgaagaccaggacagagtaccagcctgagcagaagaacaagggcaagttccgggtgcccaagattgctgagttcaccgtgaccatcctggtgtccctggccctggccttcctggcctgcatcgtgttcctggtggtgtacaaggccttcacctatgaccacagctgcccagagggctttgtgtacaagcacaagcgctgcatcccagccagcctggatgcctactacagcagccaggaccccaacagccgcagccgcttctacaccgtcatcagccactacagcgtggccaagcagagcacagcccgggccatcggcccctggctgtctgctgctgctgtgattcatgagcccaagccacccaagacccagggccactag

SEQ ID NO: 188721 - DNA, 441 bp, Artificial Sequence
  derived and/or modified sequence
atggtgaagctgaacagcaaccccagcgagaagggcaccaagcccccatctgtggaggatggcttccagacagtgcccctcatcacccccctggaggtgaaccacctgcagctgcctgcccctgagaaggtgattgtgaagaccaggacagagtaccagcctgagcagaagaacaagggcaagttccgggtgcccaagattgctgagttcaccgtgaccatcctggtgtccctggccctggccttcctggcctgcatcgtgttcctggtggtgtacaaggccttcacctatgaccacagctgcccagagggctttgtgtacaagcacaagcgctgcatcccagccagcctggatgcctactacagcagccaggaccccaacagccgcagccgcttctacaccgtcatcagccactacagcgtggccaagcagagcacctag

SEQ ID NO: 188722 - DNA, 480 bp, Artificial Sequence
  derived and/or modified sequence
atggtgaagctgaacagcaaccccagcgagaagggcaccaagcccccatctgtggaggatggcttccagacagtgcccctcatcacccccctggaggtgaaccacctgcagctgcctgcccctgagaaggtgattgtgaagaccaggacagagtaccagcctgagcagaagaacaagggcaagttccgggtgcccaagattgctgagttcaccgtgaccatcctggtgtccctggccctggccttcctggcctgcatcgtgttcctggtggtgtacaaggccttcacctatgaccacagctgcccagagggctttgtgtacaagcacaagcgctgcatcccagccagcctggatgcctactacagcagccaggaccccaacagccgcagccgcttctacaccgtcatcagccactacagcgtggccaagcagagcacagcccgggccatcggcccctggctgtctgctgctgctgtgtag

SEQ ID NO: 188723 - DNA, 2452 bp, Artificial Sequence
  derived and/or modified sequence
acagatggtgtgggagcgcgttccccggtaggagggggcgcgagcgagcaagcaggcaggcagctgccaggagctcttccctgctcgctcacgcctgctctcagaagctccgatccagacacacgcgaggcgctgtcctttcagcaccacaagctcgggctgaggagggaggactcctggccgtcctcctcctcttcaaattggcttgaatctgctctgaccccccacgagtgcagcacagtctgggaagaaaggcgtaaggatggtgaagctgaacagtaaccccagcgagaagggaaccaagccgccttcagttgaggatggcttccagaccgtccctctcatcactcccttggaggttaatcacttacagctgcctgctccagaaaaggtgattgtgaagacaagaacggaatatcagccggaacagaagaacaaagggaagttccgggtgccgaaaatcgctgaatttacggtcaccatccttgtcagcctggccctagctttccttgcgtgcatcgtgttcctggtggtttacaaagccttcacctatgatcacagctgcccagagggattcgtctataagcacaaacgctgtatcccagcctccctggatgcttactactcctcccaggaccccaattccagaagccgcttctacacagtcatcagccactacagcgtggccaagcagagcactgcccgggccatcgggccgtggctgtcagcagccgctgtcatccatgagcccaagccgcccaagacccagggccactagaggcctgccccagccagaatggggggcggggtggagaggaggacccccattggctaagccaagctccagttacaagacaacactgtactcctgggatatgggggcgggggcggggcagggcagggtggggggaagaacgcaccaaaaacgtggtgtgtgctggagttgtctgaaccgatatttctttttgttccttggtattgttgattcgtcgccgagtcaggctcatgtacaaaggcatgtttcgtgttgattgttcccatgtaagatatttttaaagccactgcttattctttgttaggaaaatgtaacagcagaaaaggaaagaaacaaagaacatgaacaaaaagcattaaactggctccatcagaagacgttgaagggcagtgaagagcacagactctgtgggcttcttagataagaaaacgtagcttcagtgggggctccagggttgcagagtatgagtgacacagaccgggactattccattagcctgtggtctgcagggtaggcccgcaggaaatgaggaatggccgagctggagagaagagctgattttggcattactaagcccagaacgcacataacccatagtgaaatgtgctggcctctggtgcattttgcaagatgagcacaaactttctgggcctccatcctaggacctgggcagacccacatggcctgggctctgaatgcccaccctgcgacggtgggttctgcatcagcaaacgctgaggagtgggcagattttctttgtcttttgcttgcattttctagatccacacctggatactgcccatgttgacgagacagcagcagggggagagggagggaaggaaggtgcggctgcaagaaggaaggcacgggacaggcatgtgacactaggccacaagcgataagcacaggcacctgacttttaagtttttgtttgtttgttgtttcccaaagtgctgataacaataacaacaacaataggattccaaccaggagcctcaagtgacagccaggaagagacctgaaggttggggccaccacaatgccaaatcgtttctaaaggaagctgaaaaatgggactgtcttttgcccacttcgttgtgttaaaaggggacatttgtccaaactccccaaccgagttctagaagctcctgacaaggaggcagcatccagccttgaccaggcctcccagttccctggaaccgtatcaggcattcgcctgcctctcacaaatgtttcagggaggccagttctgcagggtgtcagctccaggacccacagggccagaaccagctgggagaattggttatttgagatgtggtactgcttcctcacaagtctcccacaggccatgtaaagggtatttttttgtggcttgctgtgttgctgagatcatcgtatgcaacagctgggtaataagactagcatagctcaaactatcctgccaaacgctctcatctgatttttcctcccttctcccccaacctccaatcaccctgagtcacctgtaaattcatttgtcattcaaagcggaataacaagttgtccctagcaaaaccgctgagcgctttataattttgtggtgtatttttgtcagtaggtagcagaggcggaagtattttttggtgtaattcttgaaattttctgacaggaaacaaataaagatagatgtgtctgaga

SEQ ID NO: 188724 - DNA, 613 bp, Artificial Sequence
  derived and/or modified sequence
gctattttctctgtcgtcagccctctctttctgcctcacctcctgctgtaaccagaatcccactgcttgccttaggtctgggaagaaaggcgtaaggatggtgaagctgaacagtaaccccagcgagaagggaaccaagccgccttcagttgaggatggcttccagaccgtccctctcatcactcccttggaggttaatcacttacagctgcctgctccagaaaaggtgattgtgaagacaagaacggaatatcagccggaacagaagaacaaagggaagttccgggtgccgaaaatcgctgaatttacggtcaccatccttgtcagcctggccctagctttccttgcgtgcatcgtgttcctggtggtttacaaagccttcacctatgatcacagctgcccagagggattcgtctataagcacaaacgctgtatcccagcctccctggatgcttactactcctcccaggaccccaattccagaagccgcttctacacagtcatcagccactacagcgtggccaagcagagcactgcccgggccatcgggccgtggctgtcagcagccgctgtcatccatgagcccaagccgcccaagacccagggccactag

SEQ ID NO: 188725 - DNA, 643 bp, Artificial Sequence
  derived and/or modified sequence
gatccagacacacgcgaggcgctgtcctttcagcaccacaagctcgggctgaggagggaggactcctggccgtcctcctcctcttcaaattggcttgaatctgctctgaccccccacgagtgcagcacaccctctctttctgcctcacctcctgctgtaaccagaatcccactgcttgccttaggtctgggaagaaaggcgtaaggatggtgaagctgaacagtaaccccagcgagaagggaaccaagccgccttcagttgaggatggcttccagaccgtccctctcatcactcccttggaggttaatcacttacagctgcctgctccagaaaaggtgattgtgaagacaagaacggaatatcagccggaacagaagaacaaagggaagttccgggtgccgaaaatcgctgaatttacggtcaccatccttgtcagcctggccctagctttccttgcgtgcatcgtgttcctggtggtttacaaagccttcacctatgatcacagctgcccagagggattcgtctataagcacaaacgctgtatcccagcctccctggatgcttactactcctcccaggaccccaattccagaagccgcttctacacagtcatcagccactacagcgtggccaagcagagcac

SEQ ID NO: 188726 - DNA, 568 bp, Artificial Sequence
  derived and/or modified sequence
aaaaaaaaaaaaaaatggcccttcgctattgaggaaatggaggcattccatggctgaataacaggatcaggtctgggaagaaaggcgtaaggatggtgaagctgaacagtaaccccagcgagaagggaaccaagccgccttcagttgaggatggcttccagaccgtccctctcatcactcccttggaggttaatcacttacagctgcctgctccagaaaaggtgattgtgaagacaagaacggaatatcagccggaacagaagaacaaagggaagttccgggtgccgaaaatcgctgaatttacggtcaccatccttgtcagcctggccctagctttccttgcgtgcatcgtgttcctggtggtttacaaagccttcacctatgatcacagctgcccagagggattcgtctataagcacaaacgctgtatcccagcctccctggatgcttactactcctcccaggaccccaattccagaagccgcttctacacagtcatcagccactacagcgtggccaagcagagcactgcccgggccatcgggccgtggctgtcagcagccgctgt

SEQ ID NO: 188727 - DNA, 516 bp, Artificial Sequence
  derived and/or modified sequence
atggtgaagctgaacagcaaccccagcgagaagggcaccaagcccccctccgtggaagatggcttccaaaccgtgccactgattacccccctggaggtgaaccacttacaactgcccgccccggagaaggtgatcgtgaagaccagaaccgagtaccagccagaacagaagaacaagggcaaattccgagttccgaagatcgctgagtttacagtgactatccttgtgtcactggccctggcattccttgcctgcatcgtattcctggtggtctacaaagcattcacttacgatcactcctgcccagagggctttgtgtataagcataaacgatgcattcccgcgtccttggatgcttactacagcagccaggacccaaactccagatctcgattttacactgtcatcagtcattactccgtggcaaagcaaagtactgcaagagcaattggaccatggctctccgccgcagccgttattcacgaacccaagccaccaaagacacagggccattag

SEQ ID NO: 188728 - DNA, 516 bp, Artificial Sequence
  derived and/or modified sequence
atggtgaagctgaacagcaaccccagcgagaagggcaccaagcccccctcagtcgaggatggttttcaaacggtgcccttaatcacccccctggaggtgaaccatcttcagctgcccgcacctgaaaaagtcatagtcaagacgcggaccgagtaccaacccgagcagaaaaacaagggtaaatttcgggtccccaaaattgctgaattcaccgtaaccatcttagtttcactggcactcgcctttctggcatgtatcgtatttcttgtggtttataaggcgtttacgtatgaccattcttgtccagagggttttgtatataagcataaaaggtgtatcccggcatcgctggatgcgtactactccagtcaggaccccaactctcgcagcaggttttacaccgttatctcccactactcggtggccaaacagtctactgctcgggccatcgggccctggttaagcgctgcggcggtgattcacgaaccaaaacctcctaaaacccaaggacattag

SEQ ID NO: 188729 - DNA, 441 bp, Artificial Sequence
  derived and/or modified sequence
atggtgaagctgaacagcaaccccagcgagaagggcaccaagcccccaagcgtcgaggacgggtttcagactgtcccacttattactccattggaagtcaatcatttacagttgcctgcccccgaaaaagtgattgtgaaaacgaggaccgagtatcagcccgagcagaaaaacaagggcaaattccgggtacccaaaatcgcagagtttaccgtaacgatccttgtgagtttggctttggcttttctcgcttgtattgtgttcctggtggtgtataaggcttttacttacgaccatagctgccccgaaggtttcgtatacaaacataagagatgcatccctgccagcctagatgcttattattcctcgcaggaccccaactctcgtagccgcttttacaccgtgattagccactacagcgtggccaaacaatccacctag

SEQ ID NO: 188730 - DNA, 480 bp, Artificial Sequence
  derived and/or modified sequence
atggtgaagctgaacagcaaccccagcgagaagggcaccaagccccccagtgttgaggatggttttcagacggtgccgttaattacaccattggaggtgaaccacctgcagctaccagcccctgagaaggtgatcgtaaagacacgcacggagtaccagcctgagcagaaaaataaggggaaattccgggtgccaaagattgctgagtttactgtcaccattcttgtctcgctggctttagccttcctagcctgtatcgttttcctggtggtgtacaaggcctttacatacgaccactcttgcccagaaggcttcgtttacaagcataagcgatgtattccagcctcgctggacgcctactattcttcacaagaccccaatagccggtcccgcttctatacggtcattagccactactccgtggccaagcaatctactgcacgtgctatagggccatggctcagtgccgctgccgtatag

SEQ ID NO: 188731 - DNA, 516 bp, Artificial Sequence
  derived and/or modified sequence
atggtcaaactgaatagcaacccaagtgagaagggtactaagccaccctctgttgaggatggttttcaaacggtccccctgatcacccctctggaggtgaaccacctccagctgccggcacctgaaaaggtcatcgtaaaaactaggacagagtatcagccagaacagaaaaacaaaggcaagtttagagtgcctaaaatagctgagtttaccgttacgatactggtgagcttggcccttgcctttctcgcatgcatagtgttcctggtggtgtataaggcattcacgtacgaccattcctgtcctgaagggtttgtttataaacataaacggtgcatccctgcatcactggacgcctattactccagccaggatccaaatagccggtctaggttctatacagtaatttctcactattctgtggcgaaacagtcgacggccagggccatcggcccttggctttctgcggcagcagtcatccacgaacccaagcccccaaagacccagggccattag

SEQ ID NO: 188732 - DNA, 516 bp, Artificial Sequence
  derived and/or modified sequence
atggttaagctaaatagtaatcctagcgagaaaggcacaaagcccccaagcgttgaagatggcttccagactgttcccctgattactccactggaggtgaatcacctccagttaccagcgcctgaaaaggtgattgttaaaactcggaccgagtatcaaccagagcagaagaataagggcaaatttcgcgtgccgaagattgccgaattcaccgtcaccattctcgtgagcttggctctggcctttctggcatgcatcgtgttcctcgtggtgtacaaggccttcacctatgatcatagctgccccgagggcttcgtctataagcacaagagatgcatcccagcatcactggatgcctattatagctcgcaggatccaaactctcgcagtcgattctacactgtcatttctcactattccgtcgccaagcagagtacggccagagctattggcccatggttatcagccgcagctgtaatccatgagcccaaaccccctaagacacagggccattag

SEQ ID NO: 188733 - DNA, 441 bp, Artificial Sequence
  derived and/or modified sequence
atggttaaactcaacagtaacccctctgagaaggggactaagccaccatctgtcgaagatgggttccagacagtgcccctcattactccactggaggtgaatcacctgcagctcccagcaccagaaaaagtgattgtcaaaactagaaccgagtaccagcccgaacagaagaacaagggaaagttccgcgttcctaaaattgccgaatttaccgtaaccatacttgtgagccttgctctggcatttctggcatgcattgtctttttggttgtatataaagcattcacatacgaccattcctgccctgaggggttcgtgtataagcacaaaaggtgtattcccgcttccctggatgcttattattcgagccaagatccaaattctagatcgcgcttttatacagtcatcagccattattcggtcgccaaacagtcaacatag

SEQ ID NO: 188734 - DNA, 480 bp, Artificial Sequence
  derived and/or modified sequence
atggtgaagctaaatagcaacccgtcagagaagggaacaaaacccccatctgttgaagacggcttccaaacagtaccactcatcactcccctggaggtcaatcacttacagctacccgctcccgaaaaggtgatcgttaaaaccaggactgaatatcaaccagaacagaagaataagggaaagtttcgggttcccaaaatagcggagttcaccgtgaccatattggtgtcactcgctttggcatttctggcatgtattgtgtttcttgttgtctacaaagcctttacctacgaccatagctgcccagaaggctttgtatataagcacaagcgctgcatccctgctagcctcgacgcttactactccagccaggatcccaattctagatccaggttctataccgtcatatcacactatagcgtggcaaaacagagcaccgcccgagctatagggccatggctgtcagcagccgctgtgtag

SEQ ID NO: 188735 - protein, 489 aa, Artificial Sequence
  derived and/or modified sequence
MATITCTRFTEEYQLFEELGKGAFSVVRRCVKVLAGQEYAAKIINTKKLSARDHQKLEREARICRLLKHPNIVRLHDSISEEGHHYLIFDLVTGGELFEDIVAREYYSEADASHCIQQILEAVLHCHQMGVVHRDLKPENLLLASKLKGAAVKLADFGLAIEVEGEQQAWFGFAGTPGYLSPEVLRKDPYGKPVDLWACGVILYILLVGYPPFWDEDQHRLYQQIKAGAYDFPSPEWDTVTPEAKDLINKMLTINPSKRITAAEALKHPWISHRSTVASCMHRQETVDCLKKFNARRKLKGAILTTMLATRNFSGGKSGGNKKSDGVKKRKSSSSVQLMESSESTNTTIEDEDTKVRKQEIIKVTEQLIEAISNGDFESYTKMCDPGMTAFEPEALGNLVEGLDFHRFYFENLWSRNSKPVHTTILNPHIHLMGDESACIAYIRITQYLDAGGIPRTAQSEETRVWHRRDGKWQIVHFHRSGAPSVLPH

SEQ ID NO: 188736 - protein, 91 aa, Artificial Sequence
  derived and/or modified sequence
MATITCTRFTEEYQLFEELGKGAFSVVRRCVKVLAGQEYAAKIINTKKLSARDHQKLEREARICRLLKHPNIVRLHDSISEEGHHYLIFDL

SEQ ID NO: 188737 - DNA, 1470 bp, Artificial Sequence
  derived and/or modified sequence
atggcaacaatcacctgcacacggtttaccgaggaataccaattgttcgaggaattgggaaagggcgccttctccgtggtgcggagatgcgtgaaagtgcttgctggacaggaatacgcagcaaaaattatcaacacaaaaaaattgtcagcacgagatcatcagaaattagaaagagaggcccgcatttgcagattgttaaaacaccctaacatcgtccggctgcatgactcaatttccgaagaagggcaccactacctgattttcgacttagttaccggaggcgaacttttcgaagacattgtcgcccgagagtactactcggaggcagatgcaagtcattgcatacagcagatcttggaagcagtccttcactgtcaccagatgggggttgtccacagagatctgaaacctgagaatcttttgttggcgagcaagcttaagggggctgctgtgaagctggcagactttggtttggcgatagaggtggaaggcgagcagcaagcgtggtttgggtttgccggcacgcccggatacctctctcccgaggtcttgagaaaagacccatacggcaagcctgtggatctgtgggcctgcggggtgattttgtatatcttgctggtggggtatccaccattttgggatgaagatcagcaccgcctttaccagcagatcaaggcaggcgcatatgactttccctctccggagtgggataccgtgacacccgaggccaaagatctgatcaataagatgctgaccatcaatccaagcaagcggattaccgccgccgaggctcttaaacatccctggatcagccaccgctccactgtcgcgtcctgtatgcaccggcaggagacagtggactgtctcaagaaatttaatgcacggagaaagcttaaaggcgctattcttactaccatgctagccaccagaaactttagcggaggcaagagcggaggtaacaagaagtctgatggggtaaaaaagagaaaaagcagctccagcgttcagcttatggagtcaagcgagtctaccaacaccactatcgaagatgaggataccaaagttcgcaagcaagagatcataaaggttacagagcagctgatagaagctatcagcaacggcgatttcgaaagctatactaaaatgtgtgaccctggaatgacggcctttgaacccgaggcgctgggtaatctggtggagggcctggatttccataggttttactttgaaaatctgtggagcaggaactcaaaacccgtccatacaacaatattgaatcctcatatccacctcatgggagatgaaagcgcatgcatcgcttatattaggatcacacagtacctggatgccggtggaattccgcggacagcccagtccgaggagacgcgggtgtggcaccgaagagatggcaaatggcagattgtgcactttcaccgctccggagcaccctcagtgctgcctcactag

SEQ ID NO: 188738 - DNA, 1470 bp, Artificial Sequence
  derived and/or modified sequence
atggccaccatcacctgcacccgcttcacagaggagtaccagctgtttgaggagctgggcaaaggagccttctctgtggtgcggcgctgtgtgaaggtgctggccggccaggagtatgctgccaagatcatcaacaccaagaagctgagcgcccgggaccaccagaagctggagcgggaggcccgcatctgccgcctgctgaagcaccccaacatcgtgcggctgcatgacagcatcagcgaggagggccaccactacctgatctttgacctggtgactggaggagagctgtttgaagatattgtggcccgggagtactacagcgaggctgatgccagccactgcatccagcagatcctggaggccgtgctgcactgccaccagatgggcgtggtgcaccgggacctgaagccagagaacctgctgctggccagcaagctgaagggagctgctgtgaagctggccgactttggcctggccatcgaggtggagggggagcagcaggcctggtttggatttgctggcaccccaggctacctgagccctgaggtgctgaggaaggacccctacggcaagcctgtggacctgtgggcctgtggggtcatcctgtacatcctgctggtgggctacccacccttctgggatgaggaccagcaccggctgtaccagcagatcaaggccggggcctatgacttccccagccctgagtgggacacagtgaccccagaggccaaggacctgatcaacaagatgctgaccatcaaccccagcaagaggatcacagctgctgaggccctgaagcacccctggatcagccacaggagcacagtggccagctgcatgcaccggcaggagaccgtggactgcctgaagaagttcaatgcccggaggaagctgaagggggccatcctgaccaccatgctggccaccaggaacttcagcggcggcaagagcggcggcaacaagaagagtgatggagtgaagaagaggaagagcagcagctctgtgcagctgatggagagcagcgagagcaccaacaccaccattgaagatgaggacaccaaggtgaggaagcaggagatcatcaaggtgacagagcagctgattgaggccatcagcaatggagactttgagagctacaccaagatgtgtgaccccggcatgacagcctttgagcctgaggccctgggcaacctggtggagggcctggacttccaccgcttctactttgagaacctgtggagcaggaacagcaagcctgtgcacaccaccatcctgaacccccacatccacctgatgggagatgaaagtgcctgcatcgcctacatccgcatcacccagtacctggatgctgggggcatccccaggacagcccagagcgaggagaccagggtgtggcacagaagagatggcaagtggcagatcgtgcacttccacaggtctggggcccccagcgtgctgccccactag

SEQ ID NO: 188739 - DNA, 1470 bp, Artificial Sequence
  derived and/or modified sequence
atggccaccatcacctgcacccggttcaccgaggagtaccagctgttcgaggagctcgggaaaggggctttttccgttgtcaggaggtgtgtgaaggtgctcgccgggcaggagtacgcagcgaagatcatcaacacgaaaaaactttcggcccgggatcaccagaaattggaaagggaggccagaatttgtagactgttaaaacatccaaatatcgtccgattgcacgatagcatctcggaggaaggacaccattacctgatcttcgatctggtgaccgggggggagctttttgaggatatcgtggccagggagtactactcagaggcggacgcttcccactgtatccagcagattctggaagcggtgttgcattgccaccagatgggtgtggtccacagagacctgaagcctgagaaccttctcctcgccagcaaactcaagggagctgctgttaagctggctgacttcgggcttgcaattgaagttgagggggagcagcaggcatggttcggttttgccggaactcctgggtacctgagcccggaggttctgcgtaaggacccttatggcaagccggtggatctctgggcctgtggagtgattttatacatcttgctggtgggataccccccattctgggatgaagatcagcataggctgtaccagcagattaaggcaggagcttacgacttcccatctccagaatgggatactgttactccagaggcaaaagaccttatcaataagatgttgacgattaatcctagcaaacgcatcacagcagcagaggccctcaaacatccttggatttcacaccgctccacagtagccagctgtatgcatcgccaggagaccgtggattgcttaaagaagtttaatgcccgccggaaactgaagggggcgattctgaccactatgctcgcaaccaggaatttctccggcggaaaatccgggggcaacaagaaatcggacggggttaaaaaaaggaagagctcctcatctgttcagctgatggagtccagcgagtcaaccaataccaccatagaggatgaggatactaaggtgcgtaagcaggaaataatcaaggtcaccgaacagcttattgaggctataagcaatggtgattttgaatcctacacaaagatgtgtgatcccggtatgactgcatttgaacctgaagcgctgggcaaccttgtcgagggtttggatttccatcggttctactttgagaatctgtggagcaggaattctaagcccgtccataccaccatcctgaaccctcacattcacctcatgggtgacgagtctgcctgtatcgcttacatccggatcacacaataccttgacgcgggggggatccctcggactgcccagtccgaagaaactagggtttggcatcgcagagacggaaagtggcagatcgtgcattttcacaggagcggcgccccatccgtcctccctcactag

SEQ ID NO: 188740 - DNA, 1470 bp, Artificial Sequence
  derived and/or modified sequence
atggccaccattacgtgcacaaggtttacagaagagtaccagctttttgaggagttaggtaaaggggctttttctgttgtgcggcgatgtgtgaaagtactcgccggacaggaatacgctgccaagattattaataccaagaagctgtcagctagagaccaccaaaaattggagagggaggcacgaatctgccgtctgcttaagcatccgaatatcgtgcgtctgcacgactctatatctgaagaaggacaccattatctgatatttgacctcgtaaccggtggtgaactgttcgaggacattgtggcaagggagtattactctgaagccgatgcatcccactgcatccagcagatcctggaagcagtgctccactgtcatcaaatgggcgtggtgcacagggacctgaagccggagaatctcctgcttgcttctaaactgaaaggagccgcagtcaaactggctgatttcggactcgccattgaagtggagggagagcagcaggcttggttcggcttcgcaggaactcccggatacctgtcgcccgaggttttgcggaaggacccgtatgggaaacccgttgatctgtgggcctgtggcgtgatcttatacatcctgctggtggggtatcctccgttttgggatgaagaccagcatcggctttaccagcagataaaagcaggggcatacgacttcccctccccagaatgggacacagtcactcccgaggcaaaagaccttataaacaagatgctcacgattaacccctccaagcggatcacagcggcagaggctctcaaacacccctggatcagccaccgtagcacagtggcctcatgtatgcaccggcaggagaccgtggactgcctgaaaaagttcaacgcgagacgcaagctgaagggagcgatattgactactatgcttgcaacgaggaacttctctggcggtaagtctggcggaaacaagaaatcagatggagtaaagaaaagaaagagtagcagctctgtgcagctgatggagagctcagagagtactaacacaacgattgaagacgaggacacaaaggtgcgcaagcaggaaataataaaagtgaccgagcagcttattgaagccatctcaaatggagatttcgaatcctatacaaaaatgtgcgacccaggcatgacagcttttgaacccgaagccctgggcaacttggtggagggcctggatttccaccgcttctatttcgagaacttatggtcgaggaatagcaaacccgtccacacaaccattctcaacccacacatccatctgatgggggacgagagcgcctgtatcgcttacataagaataacgcagtatctggacgccggagggattccgcgaacagcccagtcagaggaaacccgagtatggcatagacgcgatggaaaatggcagatcgtccacttccatcggtctggtgctccttcagtgctgcctcactag

SEQ ID NO: 188741 - DNA, 1493 bp, Artificial Sequence
  derived and/or modified sequence
caggatggccaccatcacctgcacccgcttcacggaagagtaccagctcttcgaggaattgggcaagggagccttctcggtggtgcgaaggtgtgtgaaggtgctggctggccaggagtatgctgccaagatcatcaacacaaagaagctgtcagccagagaccatcagaagctggagcgtgaagcccgcatctgccgcctgctgaagcaccccaacatcgtccgactacatgacagcatctcagaggagggacaccactacctgatcttcgacctggtcactggtggggaactgtttgaagatatcgtggcccgggagtattacagtgaggcggatgccagtcactgtatccagcagatcctggaggctgtgctgcactgccaccagatgggggtggtgcaccgggacctgaagcctgagaatctgttgctggcctccaagctcaagggtgccgcagtgaagctggcagactttggcctggccatagaggtggagggggagcagcaggcatggtttgggtttgcagggactcctggatatctctccccagaagtgctgcggaaggacccgtacgggaagcctgtggacctgtgggcttgtggggtcatcctgtacatcctgctggttgggtaccccccgttctgggatgaggaccagcaccgcctgtaccagcagatcaaagccggcgcctatgatttcccatcgccggaatgggacactgtcaccccggaagccaaggatctgatcaataagatgctgaccattaacccatccaaacgcatcacagctgccgaagcccttaagcacccctggatctcgcaccgctccaccgtggcatcctgcatgcacagacaggagaccgtggactgcctgaagaagttcaatgccaggaggaaactgaagggagccattctcaccacgatgctggccaccaggaacttctccggagggaagagtgggggaaacaagaagagcgatggtgtgaagaaaagaaagtccagttccagcgttcagttaatggaatcctcagagagcaccaacaccaccatcgaggatgaagacaccaaagtgcggaaacaggaaattataaaagtgacagagcagctgattgaagccataagcaatggagattttgagtcctacacgaagatgtgcgaccctggcatgacagccttcgaacctgaggccctggggaacctggttgagggcctggacttccatcgattctattttgaaaacctgtggtcccggaacagcaagcccgtgcacaccaccatcctgaatccccacatccacctgatgggcgacgagtcagcctgcatcgcctacatccgcatcacgcagtacctggacgctggcggcatcccacgcaccgcccagtcggaggagacccgtgtctggcaccgccgggatggcaaatggcagatcgtccacttccacagatctggggcgccctccgtcctgccccactgagggaccaggctggggtcgc

SEQ ID NO: 188742 - DNA, 1470 bp, Artificial Sequence
  derived and/or modified sequence
atggccaccatcacctgcaccagattcaccgaggagtaccagctgttcgaggagctgggcaagggcgccttcagcgtggtgagaagatgcgtgaaggtgctggccggccaggagtacgccgccaagatcatcaacaccaagaagctgagcgccagagaccaccagaagctggagagagaggccagaatctgcagactgctgaagcaccccaacatcgtgagactgcacgacagcatcagcgaggagggccaccactacctgatcttcgacctggtgaccggcggcgagctgttcgaggacatcgtggccagagagtactacagcgaggccgacgccagccactgcatccagcagatcctggaggccgtgctgcactgccaccagatgggcgtggtgcacagagacctgaagcccgagaacctgctgctggccagcaagctgaagggcgccgccgtgaagctggccgacttcggcctggccatcgaggtggagggcgagcagcaggcctggttcggcttcgccggcacccccggctacctgagccccgaggtgctgagaaaggacccctacggcaagcccgtggacctgtgggcctgcggcgtgatcctgtacatcctgctggtgggctacccccccttctgggacgaggaccagcacagactgtaccagcagatcaaggccggcgcctacgacttccccagccccgagtgggacaccgtgacccccgaggccaaggacctgatcaacaagatgctgaccatcaaccccagcaagagaatcaccgccgccgaggccctgaagcacccctggatcagccacagaagcaccgtggccagctgcatgcacagacaggagaccgtggactgcctgaagaagttcaacgccagaagaaagctgaagggcgccatcctgaccaccatgctggccaccagaaacttcagcggcggcaagagcggcggcaacaagaagagcgacggcgtgaagaagagaaagagcagcagcagcgtgcagctgatggagagcagcgagagcaccaacaccaccatcgaggacgaggacaccaaggtgagaaagcaggagatcatcaaggtgaccgagcagctgatcgaggccatcagcaacggcgacttcgagagctacaccaagatgtgcgaccccggcatgaccgccttcgagcccgaggccctgggcaacctggtggagggcctggacttccacagattctacttcgagaacctgtggagcagaaacagcaagcccgtgcacaccaccatcctgaacccccacatccacctgatgggcgacgagagcgcctgcatcgcctacatcagaatcacccagtacctggacgccggcggcatccccagaaccgcccagagcgaggagaccagagtgtggcacagaagagacggcaagtggcagatcgtgcacttccacagaagcggcgcccccagcgtgctgccccactag

SEQ ID NO: 188743 - protein, 364 aa, Artificial Sequence
  derived and/or modified sequence
MSEVEAAAGATAVPAATVPATAAGVVAVVVPVPAGEPQKGGGAGGGGGAASGPAAGTPSAPGSRTPGNPATAVSGTPAPPARSQADKPVLAIQVLGTVKWFNVRNGYGFINRNDTKEDVFVHQTAIKRNNPRKFLRSVGDGETVEFDVVEGEKGAEATNVTGPGGVPVKGSRYAPNRRKSRRFIPRPPSVAPPPMVAEIPSAGTGPGSKGERAEDSGQRPRRWCPPPFFYRRRFVRGPRPPNQQQPIEGTDRVEPKETAPLEGHQQQGDERVPPPRFRPRYRRPFRPRPRQQPTTEGGDGETKPSQGPADGSRPEPQRPRNRPYFQRRRQQAPGPQQAPGPRQPAAPETSAPVNSGDPTTTILE

SEQ ID NO: 188744 - DNA, 1606 bp, Artificial Sequence
  derived and/or modified sequence
gagccggggggaggggccggggcggtggcggctgtggccggtactggacccggcgggatgagcgaggtggaggcggcagcgggggctacagcggtccccgcggcgacggtgcccgcgacggcggcaggggtggtagcggtggtggtaccggtgcccgcaggggagccgcagaaaggcggcggggcgggcggcgggggcggagccgcctcgggccccgctgctgggaccccctcggcgccgggctcccgcacccctggcaatccggcgacggcggtctcgggaacccccgcccccccggcccggagtcaggcggacaagccggtgctggcaatccaagtcctgggcactgtcaaatggttcaacgtccggaatggttacggattcatcaacaggaatgacaccaaggaagatgtctttgttcaccagacagctattaaaagaaacaaccccaggaagtttctgcgcagcgttggagatggggagactgtggaatttgatgtcgtggaaggagagaagggcgcagaagccactaatgtaactgggcctgggggagtacccgtgaagggcagccgttatgcccccaaccgacgtaagtcccgccgattcatcccccggcctccctcagttgccccaccacccatggtggcagagatcccctcggcggggacaggacctggcagtaaaggggagcgggctgaagactctgggcaacggccccgacgatggtgccccccacccttcttctaccgacggcggtttgtgcgaggcccccggcctcccaaccagcagcagcctatagagggcactgacagggtagaacccaaagagacagccccattggaggggcaccaacagcagggagatgagcgagtccccccgcccagattccggcccaggtaccgaaggcctttccgccccaggccacgccagcagcctaccacagaaggtggggatggtgagaccaagcccagccaaggtcccgctgatggttcccggcctgagccccagcgcccacgaaaccgcccctacttccagcggagacggcagcaggcccctggcccccagcaggcccctggcccccggcagcccgcagcccctgagacctcagcccctgtcaacagtggggaccccaccaccaccatcctggagtgattccaactcaactcagaggacacccagagctgccatctggtatctgccagtttttccaaatgacctgtaccctacccagtaccctgctccccctttcccataattcatgacatcaaaacaccagcttttcaccttttccttgagactcaggaggaccaaagcagcagccttttgctttttcttttttcttccctccccttatcaagggttgaaggaagggagccatccttactgttcagagacagcaactccctcccgtaactcaggctgagaaggaaccagccagctcttacctcctcctggttgcttttcttgcccccaccccaagtttatttttgttttcccccggccccctacctctgaagccattttatgatctgtcatgtgccacctgagcctccagtaaaaacaaaaacaggctttcctgtggtaaaaaaaaaaaaaaaaaaaaaaa

SEQ ID NO: 188745 - DNA, 1095 bp, Artificial Sequence
  derived and/or modified sequence
atgtccgaagtggaagctgccgccggggccaccgccgtgccagctgctactgtgccggcaacagcggctggcgtcgtggcagtagtcgttcccgttccagcaggcgaaccccagaaggggggaggagcaggcggtggcggcggtgcagcgagtggacccgccgctgggacccctagcgcgcccggtagcagaacgcccggaaatccagcaacggccgttagcggcaccccggcaccccctgcccgctctcaggctgacaaacccgttctggcgattcaggtgcttggaacagtgaaatggtttaatgtcagaaatgggtacggcttcatcaataggaacgataccaaagaggacgtttttgttcaccaaaccgcaataaagcggaacaatccccgaaaattcctgcgttccgttggagacggcgagacagtggagtttgatgtggtggaaggcgagaagggcgcggaggctaccaatgttacaggaccagggggagtcccagtaaaaggctcccgctacgccccaaaccggcgtaagtcccgaaggttcataccacggcccccaagcgttgcaccaccacctatggtggcagagataccctcagcgggcaccggaccaggttccaagggcgaaagagccgaagactctggccagaggcccagacgctggtgtccacctcctttcttctaccgccggaggttcgttaggggtccaaggccccctaatcagcagcaacctatagaggggactgacagggtggagcccaaggagacagcacccttggagggccaccaacagcagggagacgagagagtgcctcccccacgattccgcccaaggtatcgtagaccttttcgccctagaccaagacagcaaccaacgacagaaggcggtgatggcgagacaaagccttcgcagggtccagccgacggctcccggcctgagccgcagaggccaaggaaccggccatactttcagagacgacgacagcaggctccaggcccccaacaggcaccaggccctagacagcccgcggcacctgaaacctcggcaccagtgaattcgggggatcccactacaaccatcctggaatag

SEQ ID NO: 188746 - DNA, 1583 bp, Artificial Sequence
  derived and/or modified sequence
gagccggggggaggggccggggcggtggcggctgtggccggtactggacccggcgggatgagcgaggtggaggcggcagcgggggctacagcggtccccgcggcgacggtgcccgcgacggcggcaggggtggtagcggtggtggtaccggtgcccgcaggggagccgcagaaaggcggcggggcgggcggcgggggcggagccgcctcgggccccgctgctgggaccccctcggcgccgggctcccgcacccctggcaatccggcgacggcggtctcgggaacccccgcccccccggcccggagtcaggcggacaagccggtgctggcaatccaagtcctgggcactgtcaaatggttcaacgtccggaatggttacggattcatcaacaggaatgacaccaaggaagatgtctttgttcaccagacagctattaaaagaaacaaccccaggaagtttctgcgcagcgttggagatggggagactgtggaatttgatgtcgtggaaggagagaagggcgcagaagccactaatgtaactgggcctgggggagtacccgtgaagggcagccgttatgcccccaaccgacgtaagtcccgccgattcatcccccggcctccctcagttgccccaccacccatggtggcagagatcccctcggcggggacaggacctggcagtaaaggggagcgggctgaagactctgggcaacggccccgacgatggtgccccccacccttcttctaccgacggcggtttgtgcgaggcccccggcctcccaaccagcagcagcctatagagggcactgacagggtagaacccaaagagacagccccattggaggggcaccaacagcagggagatgagcgagtccccccgcccagattccggcccaggtaccgaaggcctttccgccccaggccacgccagcagcctaccacagaaggtggggatggtgagaccaagcccagccaaggtcccgctgatggttcccggcctgagccccagcgcccacgaaaccgcccctacttccagcggagacggcagcaggcccctggcccccagcaggcccctggcccccggcagcccgcagcccctgagacctcagcccctgtcaacagtggggaccccaccaccaccatcctggagtgattccaactcaactcagaggacacccagagctgccatctggtatctgccagtttttccaaatgacctgtaccctacccagtaccctgctccccctttcccataattcatgacatcaaaacaccagcttttcaccttttccttgagactcaggaggaccaaagcagcagccttttgctttttcttttttcttccctccccttatcaagggttgaaggaagggagccatccttactgttcagagacagcaactccctcccgtaactcaggctgagaaggaaccagccagctcttacctcctcctggttgcttttcttgcccccaccccaagtttatttttgttttcccccggccccctacctctgaagccattttatgatctgtcatgtgccacctgagcctccagtaaaaacaaaaacaggctttcctgtggt

SEQ ID NO: 188747 - DNA, 1095 bp, Artificial Sequence
  derived and/or modified sequence
atgtctgaggtggaggccgccgccggggccacagctgtgcctgctgccaccgtgcctgccacagctgctggggtggtggccgtggtggtgcctgtgcctgctggggagccccagaagggcggcggggccggcggcggcggcggggccgccagcggccctgctgctggcaccccatctgcccctggcagcaggaccccaggcaacccagccacagctgtgtctggcaccccagcccccccagcccggagccaggccgacaagcctgtgctggccatccaggtgctgggcaccgtgaagtggttcaacgtgagaaatggctacggcttcatcaacagaaatgacaccaaggaggatgtgtttgtgcaccagacagccatcaagaggaacaaccccaggaagttcctgcggtctgtgggagatggagaaacagtggagtttgatgtggtggagggggagaagggagctgaggccaccaacgtgactggacctggaggagtgcctgtgaagggcagccgctatgcccccaacagaaggaagagccgccgcttcatccccaggcctccttctgtggcccccccacccatggtggccgagatccccagcgctggcaccggccctggcagcaaaggagagagagctgaggacagcggccagaggccccggcgctggtgccccccacccttcttctacagaagaagatttgtgcggggcccccggccccccaaccagcagcagcccatcgagggcacagacagagtggagcccaaggagacagcccccctggagggccaccagcagcagggagatgagcgggtgcccccaccccgcttccggccccgctaccgccggcccttccggccccggccccggcagcagcccaccacagaaggaggagatggagagaccaagcccagccagggccctgcagatggcagcaggcctgagccccagaggcccaggaaccggccctacttccagaggcggcggcagcaggcccctggcccccagcaggcccctggcccccggcagcctgctgcccctgagaccagcgcccctgtgaacagcggggaccccaccaccaccatcctggagtag

SEQ ID NO: 188748 - DNA, 1095 bp, Artificial Sequence
  derived and/or modified sequence
atgagcgaggtggaggccgccgccggcgccaccgccgtgcccgccgctactgtcccagcaactgctgctggggtcgtggccgttgtggtccctgtgcccgccggggagccccagaagggaggcggcgccggggggggcggaggcgccgcctctggccctgctgcaggaaccccaagtgcccccggctccaggactcccgggaatcctgcgaccgctgtgagcgggacacctgcaccaccggcgcgctctcaggcggataaaccagtcctggctatccaggtgctcgggactgtcaagtggtttaacgtgagaaatggctacggcttcattaatagaaatgacaccaaggaggacgtcttcgtgcaccagaccgccattaagcgtaacaacccgagaaagtttttacggtcagttggagatggcgagacagtggagttcgatgttgtggaaggagagaaaggcgccgaggccaccaacgtaaccgggcctgggggcgtgcctgtcaaagggtctcgttatgcaccaaaccgcaggaaaagccggcggtttatcccacggcccccatccgtggccccacctccaatggttgctgaaatcccctctgccggcacagggccagggtcaaaaggcgaacgggctgaggactcagggcagcgccctcgtcgatggtgcccccctccgttcttttaccgccgtagattcgtcagggggccgcgcccgccaaatcagcagcagcctatcgaggggacagatcgggtggaacctaaggaaaccgcacctctggaggggcaccagcagcaaggcgacgaacgggtgccccctccaagattcagaccaagataccggcgaccttttcgcccaagaccacgtcagcagcctacgacagagggaggggatggcgagaccaaacccagtcagggcccagcggacggcagcaggcctgaaccacagcgccctcgcaataggccatactttcagcgcaggcgacaacaggctcccggcccacagcaagctccaggcccacgacaacccgccgcgcccgagaccagcgcccctgtcaactctggggaccctacgacaactattcttgagtag

SEQ ID NO: 188749 - DNA, 1095 bp, Artificial Sequence
  derived and/or modified sequence
atgtcagaagtggaagccgctgcaggcgctactgccgtgcctgcggcaactgtccccgctactgccgctggggttgtggcagtggtcgttcctgttcccgctggcgaacctcaaaagggcggtggcgcaggtgggggaggcggagccgcatcggggccagcggcaggcacaccttctgcccctggcagccgtacacccggtaatccagccacagccgtgtctggaactccggctccccctgcacggagccaagctgacaagcctgtgttggcaattcaggttctaggcacggtgaaatggtttaacgtcagaaacggatacgggtttatcaacagaaatgatacgaaggaagatgttttcgtgcatcaaacagctattaagcggaataacccacgaaaattcctccggtctgtgggggatggcgagactgtcgagttcgatgtggtcgagggagaaaagggggcagaggcaaccaacgtgacaggacccggaggcgtgcctgtgaagggcagtcggtacgcccctaacagaagaaaatctaggaggtttatcccacgccctccatcagttgccccacccccaatggtcgccgagattccctcagctgggactggccctgggagtaaaggcgagcgcgctgaggatagtgggcagcgaccgaggagatggtgcccacctccgttcttctaccgaagaaggttcgttaggggacccaggccacccaaccaacagcagcccatcgagggaaccgatcgtgtggagccgaaagaaacagcgcctcttgaggggcaccagcagcagggagatgagcgggtgcccccaccccgattccgcccaaggtatcgtcggcctttcagacccaggcctagacagcagccaactaccgaggggggagatggagaaaccaagccttctcaaggcccagctgatggctccagacccgaaccccagcggcctaggaataggccctacttccagcgtcggaggcaacaagcccctggcccacagcaggccccaggcccacggcagcctgcagccccagagacttccgcacctgttaactccggggatccaacaactactatattggagtag

SEQ ID NO: 188750 - DNA, 1095 bp, Artificial Sequence
  derived and/or modified sequence
atgtcggaggtagaggccgccgctggagccacagccgtgccagccgccacagtccctgccacggccgctggagtagtagcagtggtggttccggtccccgctggagagccccagaagggtggaggtgcaggcggcggcggcggagcagctagtggtccagctgccggaactcctagtgcacccggctcaagaactccaggtaacccagcaaccgcagtgtcaggcacccctgcacctcccgctcggagccaggctgacaagcccgtgttggcgatacaggtacttgggacagttaagtggttcaacgtgagaaacggctatggcttcattaatcgtaatgataccaaagaagacgtgtttgtccaccaaactgcgatcaaacgaaacaatcctcgtaagttcttaaggagtgtgggcgatggtgagactgttgagtttgacgtggtggagggggagaagggtgccgaggcaaccaacgtcacagggccagggggtgtcccggtaaaaggatcacgttacgcacctaatcgcagaaagagtaggagattcatcccccggccaccgtctgtggcacctccccctatggtggccgagatcccaagcgccggcacagggcccggtagtaagggagagcgcgcagaagattcgggccagagaccgaggagatggtgcccacctccattcttctacagaagaaggttcgttcgggggcctagaccaccaaaccagcagcagccaattgaaggaacagatcgtgtggagcctaaagagacagcacccctagagggacaccagcaacagggcgacgagcgggtgccaccacctagatttaggccgagataccgaagaccattcagacccagacctaggcagcagccgactacagagggaggtgacggcgagaccaagccctctcagggccccgctgatggttcccggcctgaaccgcagagacctcgcaaccgaccgtattttcagcggaggagacaacaggctcccggtccccagcaggcccctggcccacggcagccagccgcacctgaaaccagtgcccccgtcaactcaggcgacccaacgacaaccatcttagagtag

SEQ ID NO: 188751 - DNA, 1095 bp, Artificial Sequence
  derived and/or modified sequence
atgtccgaagtcgaagccgcagcgggggccacagcagttcctgccgcaaccgtgcccgcaaccgccgccggggtagtggcagtggtggttcctgttccagcaggtgagccacagaagggaggaggcgcaggcggaggggggggggccgcgtccgggcccgccgcggggacaccctcagcaccaggaagtaggactcccggcaatcctgccacggctgtctctggaacaccggcaccacccgccagatcacaggccgacaagccagtactagctattcaggtgttagggaccgtaaaatggttcaacgtaaggaatgggtacggatttataaaccgcaatgacaccaaagaagacgtgttcgtgcaccagacagccataaagcgtaataatcctcgcaaattcctgagaagcgttggggacggagaaacagtggaattcgatgtcgtggagggggagaagggagctgaagccaccaatgtaacaggccctggaggggtgccagtcaaaggatctcgatacgcgcctaatcgaagaaaaagccgacgcttcatcccccgcccaccctccgtggcgcccccgcctatggttgccgagataccttctgcgggaaccggacccggctcgaagggggaacgagcggaagattcaggacagagaccacggagatggtgcccgcccccttttttctacagacgcagattcgtaagaggcccacggccacctaaccagcaacagcctattgagggcacagaccgcgtggaacccaaagaaaccgcccctctagagggccaccagcaacagggagacgagcgggtacctccacctagattcagaccccggtaccgtcgcccttttcggccacgtcctaggcaacagcccactactgaaggaggggatggcgaaaccaaaccaagccagggcccagcagacggttcgagaccagaacctcagagaccccgaaaccgtccctattttcagagaagacgccaacaagctccgggcccacaacaggctcccggtcctcgccagcccgccgctccagagacatcagccccggttaattccggcgaccctaccaccacaattctggagtag

SEQ ID NO: 188752 - DNA, 1095 bp, Artificial Sequence
  derived and/or modified sequence
atgagcgaggtggaggccgccgccggcgccaccgccgtgcccgccgccaccgtgcccgccaccgccgccggcgtggtggccgtggtggtgcccgtgcccgccggcgagccccagaagggcggcggcgccggcggcggcggcggcgccgccagcggccccgccgccggcacccccagcgcccccggcagcagaacccccggcaaccccgccaccgccgtgagcggcacccccgccccccccgccagaagccaggccgacaagcccgtgctggccatccaggtgctgggcaccgtgaagtggttcaacgtgagaaacggctacggcttcatcaacagaaacgacaccaaggaggacgtgttcgtgcaccagaccgccatcaagagaaacaaccccagaaagttcctgagaagcgtgggcgacggcgagaccgtggagttcgacgtggtggagggcgagaagggcgccgaggccaccaacgtgaccggccccggcggcgtgcccgtgaagggcagcagatacgcccccaacagaagaaagagcagaagattcatccccagaccccccagcgtggcccccccccccatggtggccgagatccccagcgccggcaccggccccggcagcaagggcgagagagccgaggacagcggccagagacccagaagatggtgccccccccccttcttctacagaagaagattcgtgagaggccccagaccccccaaccagcagcagcccatcgagggcaccgacagagtggagcccaaggagaccgcccccctggagggccaccagcagcagggcgacgagagagtgcccccccccagattcagacccagatacagaagacccttcagacccagacccagacagcagcccaccaccgagggcggcgacggcgagaccaagcccagccagggccccgccgacggcagcagacccgagccccagagacccagaaacagaccctacttccagagaagaagacagcaggcccccggcccccagcaggcccccggccccagacagcccgccgcccccgagaccagcgcccccgtgaacagcggcgaccccaccaccaccatcctggagtag

SEQ ID NO: 188753 - RNA, 1095 nt, Artificial Sequence
  derived and/or modified sequence
augucggagguagaggccgccgcuggagccacagccgugccagccgccacagucccugccacggccgcuggaguaguagcaguggugguuccgguccccgcuggagagccccagaaggguggaggugcaggcggcggcggcggagcagcuagugguccagcugccggaacuccuagugcacccggcucaagaacuccagguaacccagcaaccgcagugucaggcaccccugcaccucccgcucggagccaggcugacaagcccguguuggcgauacagguacuugggacaguuaagugguucaacgugagaaacggcuauggcuucauuaaucguaaugauaccaaagaagacguguuuguccaccaaacugcgaucaaacgaaacaauccucguaaguucuuaaggagugugggcgauggugagacuguugaguuugacgugguggagggggagaagggugccgaggcaaccaacgucacagggccagggggugucccgguaaaaggaucacguuacgcaccuaaucgcagaaagaguaggagauucaucccccggccaccgucuguggcaccucccccuaugguggccgagaucccaagcgccggcacagggcccgguaguaagggagagcgcgcagaagauucgggccagagaccgaggagauggugcccaccuccauucuucuacagaagaagguucguucgggggccuagaccaccaaaccagcagcagccaauugaaggaacagaucguguggagccuaaagagacagcaccccuagagggacaccagcaacagggcgacgagcgggugccaccaccuagauuuaggccgagauaccgaagaccauucagacccagaccuaggcagcagccgacuacagagggaggugacggcgagaccaagcccucucagggccccgcugaugguucccggccugaaccgcagagaccucgcaaccgaccguauuuucagcggaggagacaacaggcucccgguccccagcaggccccuggcccacggcagccagccgcaccugaaaccagugcccccgucaacucaggcgacccaacgacaaccaucuuagaguag

SEQ ID NO: 188754 - RNA, 1095 nt, Artificial Sequence
  derived and/or modified sequence
auguccgaagucgaagccgcagcgggggccacagcaguuccugccgcaaccgugcccgcaaccgccgccgggguaguggcaguggugguuccuguuccagcaggugagccacagaagggaggaggcgcaggcggaggggggggggccgcguccgggcccgccgcggggacacccucagcaccaggaaguaggacucccggcaauccugccacggcugucucuggaacaccggcaccacccgccagaucacaggccgacaagccaguacuagcuauucagguguuagggaccguaaaaugguucaacguaaggaauggguacggauuuauaaaccgcaaugacaccaaagaagacguguucgugcaccagacagccauaaagcguaauaauccucgcaaauuccugagaagcguuggggacggagaaacaguggaauucgaugucguggagggggagaagggagcugaagccaccaauguaacaggcccuggaggggugccagucaaaggaucucgauacgcgccuaaucgaagaaaaagccgacgcuucaucccccgcccacccuccguggcgcccccgccuaugguugccgagauaccuucugcgggaaccggacccggcucgaagggggaacgagcggaagauucaggacagagaccacggagauggugcccgcccccuuuuuucuacagacgcagauucguaagaggcccacggccaccuaaccagcaacagccuauugagggcacagaccgcguggaacccaaagaaaccgccccucuagagggccaccagcaacagggagacgagcggguaccuccaccuagauucagaccccgguaccgucgcccuuuucggccacguccuaggcaacagcccacuacugaaggaggggauggcgaaaccaaaccaagccagggcccagcagacgguucgagaccagaaccucagagaccccgaaaccgucccuauuuucagagaagacgccaacaagcuccgggcccacaacaggcucccgguccucgccagcccgccgcuccagagacaucagccccgguuaauuccggcgacccuaccaccacaauucuggaguag

SEQ ID NO: 188755 - protein, 329 aa, Artificial Sequence
  derived and/or modified sequence
MTGNAGEWCLMESDPGVFTELIKGFGCRGAQVEEIWSLEPENFEKLKPVHGLIFLFKWQPGEEPAGSVVQDSRLDTIFFAKQVINNACATQAIVSVLLNCTHQDVHLGETLSEFKEFSQSFDAAMKGLALSNSDVIRQVHNSFARQQMFEFDTKTSAKEEDAFHFVSYVPVNGRLYELDGLREGPIDLGACNQDDWISAVRPVIEKRIQKYSEGEIRFNLMAIVSDRKMIYEQKIAELQRQLAEEEPMDTDQGNSMLSAIQSEVAKNQMLIEEEVQKLKRYKIENIRRKHNYLPFIMELLKTLAEHQQLIPLVEKAKEKQNAKKAQETK

SEQ ID NO: 188756 - DNA, 990 bp, Artificial Sequence
  derived and/or modified sequence
atgaccggcaacgccggcgagtggtgcctgatggagagcgaccccggcgtgttcaccgagctgatcaagggcttcggctgcagaggcgcccaggtggaggagatctggagcctggagcccgagaacttcgagaagctgaagcccgtgcacggcctgatcttcctgttcaagtggcagcccggcgaggagcccgccggcagcgtggtgcaggacagcagactggacaccatcttcttcgccaagcaggtgatcaacaacgcctgcgccacccaggccatcgtgagcgtgctgctgaactgcacccaccaggacgtgcacctgggcgagaccctgagcgagttcaaggagttcagccagagcttcgacgccgccatgaagggcctggccctgagcaacagcgacgtgatcagacaggtgcacaacagcttcgccagacagcagatgttcgagttcgacaccaagaccagcgccaaggaggaggacgccttccacttcgtgagctacgtgcccgtgaacggcagactgtacgagctggacggcctgagagagggccccatcgacctgggcgcctgcaaccaggacgactggatcagcgccgtgagacccgtgatcgagaagagaatccagaagtacagcgagggcgagatcagattcaacctgatggccatcgtgagcgacagaaagatgatctacgagcagaagatcgccgagctgcagagacagctggccgaggaggagcccatggacaccgaccagggcaacagcatgctgagcgccatccagagcgaggtggccaagaaccagatgctgatcgaggaggaggtgcagaagctgaagagatacaagatcgagaacatcagaagaaagcacaactacctgcccttcatcatggagctgctgaagaccctggccgagcaccagcagctgatccccctggtggagaaggccaaggagaagcagaacgccaagaaggcccaggagaccaagtag

SEQ ID NO: 188757 - DNA, 990 bp, Artificial Sequence
  derived and/or modified sequence
atgactggaaacgcaggtgagtggtgtctcatggagtcagaccccggggtctttaccgagctcattaaggggttcgggtgtaggggagctcaggtcgaggagatttggtctcttgaacctgagaattttgagaaattgaagcctgtccacggactgatttttctcttcaaatggcagcctggagaggagccggccggtagcgtcgtccaggatagtagattagacaccatattctttgccaaacaggtaataaataatgcttgtgccacacaggccatcgtttcagtcctgctcaattgtacccaccaggacgtgcatctcggggagactcttagtgaatttaaagaattcagccaaagctttgatgccgcgatgaagggccttgctctgagcaattctgacgtgatccggcaggtacacaattctttcgccaggcagcaaatgttcgagtttgacaccaagacttcagccaaagaggaggatgccttccactttgtgtcttacgtgccagtcaacgggagactgtacgaactggatggccttcgcgaaggcccaatcgatttgggcgcttgtaaccaggacgactggatctctgcggtacgacccgtaattgaaaaacggatccagaagtacagtgaaggggaaataagattcaacctcatggccatagtgagcgaccggaagatgatctatgagcagaagatcgcagaactccagaggcagttggctgaagaagagccgatggatacagatcagggcaattccatgctgtctgccattcagtcggaagtcgcaaaaaaccagatgctgattgaggaagaggtgcaaaaactgaagcgctacaagattgagaatattcgccgaaagcacaattatctgccctttattatggaactgttaaaaacccttgcagagcaccagcaactgatccccctcgtcgaaaaggcaaaggagaaacagaacgcgaaaaaggcccaggaaaccaaatag

SEQ ID NO: 188758 - DNA, 990 bp, Artificial Sequence
  derived and/or modified sequence
atgactggaaatgctggggagtggtgcctgatggagagtgaccccggggtcttcacagagctgatcaagggcttcggctgccgcggggcccaggtggaggagatctggagcctggagccagaaaattttgagaagctgaagcctgtgcacggcctcatcttcctgttcaagtggcagcccggggaggagcctgctggctctgtggtgcaggacagccggctggacaccatcttctttgccaagcaggtgatcaacaatgcctgtgccacccaggccatcgtgtctgtgctgctgaactgcacccaccaggatgtgcacctgggggagaccctgtctgagttcaaggagttcagccagagctttgatgctgccatgaagggcctggccctgagcaacagtgatgtgatccggcaggtgcacaacagctttgcccggcagcagatgtttgaatttgacaccaagaccagcgccaaggaggaggatgccttccactttgtgtcctatgtgcctgtgaatggccgcctgtatgagctggatggcctgcgggagggccccatcgacctgggcgcctgcaaccaggatgactggatctctgctgtgcggcctgtgattgagaagaggatccagaagtacagcgagggggagatccgcttcaacctgatggccatcgtgtctgacaggaagatgatctatgagcagaagattgctgagctgcagaggcagctggccgaggaggagcccatggacacagaccagggcaacagcatgctgagcgccatccagagcgaggtggccaagaaccagatgctgattgaggaggaggtgcagaagctgaagcgctacaagattgagaacatccggaggaagcacaactacctgcccttcatcatggagctgctgaagaccctggccgagcaccagcagctgatccccctggtggagaaggccaaggagaagcagaatgccaagaaggcccaggagaccaagtag

SEQ ID NO: 188759 - DNA, 990 bp, Artificial Sequence
  derived and/or modified sequence
atgaccggcaacgccggcgagtggtgcctgatggagagcgaccccggcgttttcacggaactcatcaagggcttcggttgtcgtggcgctcaggtagaagaaatttggagcctggagcccgagaacttcgaaaaactgaaacctgtgcacgggttgatctttctgttcaagtggcagcccggcgaggaacccgctggatctgtggtccaggacagcagattggacaccatcttcttcgccaaacaagtaataaacaatgcatgtgcgactcaggctatcgtgtcagtcctacttaactgtactcatcaggacgtgcacctgggagagacactgtcagagttcaaggagttttcccagtcttttgatgcagccatgaaggggctggctctctccaactcggatgtaatcagacaggtgcataactccttcgcacgccagcaaatgtttgagttcgataccaagaccagtgcaaaagaagaggacgcttttcatttcgtgtcttatgtcccagtcaacggccgtctgtacgagctggatgggctgcgtgagggcccaattgaccttggagcttgcaaccaagatgactggattagtgccgtacgaccggtgatcgagaaacgcatacagaagtatagcgagggggaaatacgctttaacctgatggccatcgtgagtgaccgaaaaatgatctacgagcagaagattgctgagctccaacgccaacttgccgaggaagaacctatggataccgatcagggtaactccatgttgtcagcaatccagtctgaggtggcaaaaaatcaaatgctgatcgaagaggaagtgcagaaattaaaacggtataagatcgagaacattaggcgaaagcacaactatctgcccttcattatggagctgctcaagaccttggccgagcatcagcaactcattccgctggtcgaaaaggcgaaggagaagcagaacgccaagaaggcccaggagacaaagtag

SEQ ID NO: 188760 - DNA, 990 bp, Artificial Sequence
  derived and/or modified sequence
atgactgggaatgcgggagaatggtgcctgatggaatctgaccccggtgtgtttaccgagctcataaagggctttggatgtcgaggtgcacaagtggaagagatctggtccctcgaaccggagaattttgaaaagctcaaaccagttcatgggctgattttcttgttcaaatggcagccaggggaagagccagccggtagcgtggtacaagactctcggctagatactatctttttcgcaaaacaggtgatcaacaacgcctgcgccactcaggcgatagtgtctgttctcttaaattgcactcaccaggacgttcacctgggggaaaccttgagtgaatttaaggaattcagtcagtcatttgacgccgcaatgaagggtctggccctgagcaactccgacgtcatcaggcaggtccacaatagctttgccagacagcagatgttcgagttcgataccaaaactagcgctaaggaagaggacgcatttcacttcgtgagttacgtaccagtcaatggaaggctttatgagttagacggcctgagggagggtcccattgatctgggcgcatgtaaccaggacgactggatctccgctgtcaggcccgtgatcgagaagcgaatacaaaagtattctgaaggcgaaattcgattcaatctgatggcgattgtgtccgacaggaaaatgatttatgaacagaaaattgccgagcttcagaggcaactcgcggaagaggagcctatggacacggaccaaggcaacagcatgctgagcgctattcaaagcgaggttgcgaagaatcagatgctgatcgaggaagaagtgcagaaacttaaacgctataagatcgagaatatacgtcgaaaacacaactatctccctttcattatggagctcttgaaaaccctcgccgagcatcagcagctcattcctcttgtggagaaagcgaaagagaagcaaaacgcgaagaaggcgcaagaaaccaagtag

SEQ ID NO: 188761 - protein, 503 aa, Artificial Sequence
  derived and/or modified sequence
MLSQLAMLQGSLLLVVATMSVAQQTRQEADRGCETLVVQHGHCSYTFLLPKSEPCPPGPEVSRDSNTLQRESLANPLHLGKLPTQQVKQLEQALQNNTQWLKKLERAIKTILRSKLEQVQQQMAQNQTAPMLELGTSLLNQTTAQIRKLTDMEAQLLNQTSRMDAQMPETFLSTNKLENQLLLQRQKLQQLQGQNSALEKRLQALETKQQEELASILSKKAKLLNTLSRQSAALTNIERGLRGVRHNSSLLQDQQHSLRQLLVLLRHLVQERANASAPAFIMAGEQVFQDCAEIQRSGASASGVYTIQVSNATKPRKVFCDLQSSGGRWTLIQRRENGTVNFQRNWKDYKQGFGDPAGEHWLGNEVVHQLTRRAAYSLRVELQDWEGHEAYAQYEHFHLGSENQLYRLSVVGYSGSAGRQSSLVLQNTSFSTLDSDNDHCLCKCAQVMSGGWWFDACGLSNLNGVYYHAPDNKYKMDGIRWHYFKGPSYSLRASRMMIRPLDI

SEQ ID NO: 188762 - DNA, 1512 bp, Artificial Sequence
  derived and/or modified sequence
atgctttctcagttagccatgctccagggaagcctgctgctggtggtggccacaatgagcgtcgctcagcagaccaggcaggaagctgaccgggggtgcgagacattggtagttcagcacggacactgctcgtacacatttttgcttccgaagtccgagccatgtcctcctggtcccgaagtcagcagggactctaacaccctccagcgtgagtcgctcgcaaatccgctgcacctcgggaaactgcctacgcagcaggtcaaacagctcgaacaggcccttcagaataatacacagtggcttaagaagctggaacgcgctatcaagactattcttcgttcaaaattggaacaggttcagcaacagatggcccagaaccagaccgcgcccatgctcgaactggggacgtccctcctcaatcagacaacagcgcagatccgcaagctcacagacatggaagctcagctactgaaccagacttcccggatggatgcacaaatgccagagacttttctgtcaactaataaacttgagaaccagctcctgctacagcgccaaaaattacagcagctgcagggtcagaactctgctctcgaaaagaggctccaggccctggagaccaaacaacaggaggagttggcctccatcctatcgaagaaagccaagctgctgaacaccctgtcccgtcagtccgccgcactaacaaatatcgaacgcggcctgcggggcgtaaggcacaacagcagcctgctgcaagaccagcaacatagtctgcgtcagcttctcgttttactgcgacacttggtgcaggagagggcaaacgcttctgcccctgccttcatcatggctggagaacaagttttccaggactgtgccgagatacagcgatccggcgcctcagcgtccggtgtctataccattcaagtgtcaaatgcaaccaagcctcggaaggtattctgcgacttgcagagctctgggggtaggtggactctgatacagcggcgtgaaaacggtactgtgaacttccagagaaactggaaggattataagcaaggtttcggagatcccgccggcgagcactggctcgggaatgaagtcgttcaccaattaacccgcagagccgcttactctttgagggtagaactccaggattgggagggacatgaggcatacgcacaatacgaacactttcacctaggatcagaaaatcagctgtatcgcttgagcgtcgtcgggtactcgggatcggccggaaggcagtcttcactggtgttgcaaaacacctcctttagtactttggacagcgataatgaccactgtctgtgtaaatgcgcccaagtgatgtctggtggatggtggttcgacgcctgtgggctgagtaatctaaatggtgtctactatcatgctcctgacaataagtacaaaatggatgggatcaggtggcactacttcaaagggcccagctattcccttcgcgcttcgagaatgatgattagacccctcgacatttag

SEQ ID NO: 188763 - DNA, 1512 bp, Artificial Sequence
  derived and/or modified sequence
atgctgagccagctggccatgctgcagggcagcctgctgctggtggtggccaccatgtctgtggcccagcagacccggcaggaggccgaccggggctgtgagaccctggtggtgcagcacggccactgcagctacaccttcctgctgcccaagtctgagccctgccccccaggccctgaggtgtcccgggacagcaacaccctgcagcgggagagcctggccaaccccctgcacctgggcaagctgcccacccagcaggtgaagcagctggagcaggccctgcagaacaacacccagtggctgaagaagctggagcgggccatcaagaccatcctgcggagcaagctggagcaggtgcagcagcagatggcccagaaccagacagcccccatgctggagctgggcaccagcctgctgaaccagaccacagcccagatcaggaagctgacagacatggaggcccagctgctgaaccagaccagcaggatggatgcccagatgcctgagaccttcctgagcaccaacaagctggagaaccagctgctgctgcagaggcagaagctgcagcagctgcagggccagaacagcgccctggagaagaggctgcaggccctggagaccaagcagcaggaggagctggccagcatcctgagcaagaaggccaagctgctgaacaccctgagccggcagagcgctgccctgaccaacatcgagcggggcctgcggggcgtgcgccacaacagcagcctgctgcaggaccagcagcacagcctgcggcagctgctggtgctgctgcggcacctggtgcaggagcgggccaatgccagcgccccagccttcatcatggccggggagcaggtgttccaggactgtgccgagatccagaggtctggggccagcgccagcggcgtgtacaccatccaggtgtccaatgccaccaagcccaggaaggtgttctgtgacctgcagagcagcggcggccgctggaccctcatccagaggcgggagaatggaacagtgaacttccagaggaactggaaggactacaagcagggctttggagaccctgctggggagcactggctgggcaatgaggtggtgcaccagctgacccggcgggccgcctacagcctgcgggtggagctgcaggactgggagggccacgaggcctatgcccagtatgagcacttccacctgggcagcgagaaccagctgtaccgcctgtctgtggtgggctacagcggcagcgctggccggcagagcagcctggtgctgcagaacaccagcttcagcaccctggacagcgacaatgaccactgcctgtgcaagtgtgcccaggtgatgtctgggggctggtggtttgatgcctgtggcctgagcaacctgaatggagtgtactaccacgccccagacaacaagtacaagatggatggcatccgctggcactacttcaagggccccagctacagcctgcgggccagcaggatgatgatccggcccctggacatctag

SEQ ID NO: 188764 - DNA, 1512 bp, Artificial Sequence
  derived and/or modified sequence
atgctgagccagctggccatgctgcagggcagcctgctgctggtggttgctactatgtctgtcgctcagcagacaaggcaggaagctgataggggctgtgagaccctcgtggtgcagcacggccactgtagttatacttttctgctgccgaagtccgagccatgccctccgggccccgaggtatctcgggactccaatactctgcagcgtgaatccctggctaaccccttgcatttgggaaagctgcccacccagcaggtcaagcagttagagcaagctctccagaataacacgcaatggctgaagaagctcgagcgagctataaaaaccatactgagaagcaagcttgagcaagtccagcagcagatggctcagaaccagaccgctcccatgttagagctcggaacatctctgctgaaccagacaactgcacagattcgcaagttgacagacatggaggcccagctgctaaaccagacctccagaatggacgctcaaatgcccgaaacattcctgagcacaaacaagctggagaatcaattgctgctccagcggcagaagctacaacagctgcaaggacaaaacagcgcactcgaaaaacggctgcaggccttggagaccaaacaacaggaagagctggcctctattttgtccaagaaggctaaactgttgaacaccctctcacgccaatctgcggctcttaccaacatagaaagggggttgcggggagtacggcacaatagctcgctgctccaggaccaacaacattccctgcgtcagctgcttgtcttacttaggcacctggtccaagagagggccaatgcctccgctcccgcattcattatggctggagagcaggtatttcaagattgcgccgagatccagcgaagcggcgcttccgcatcgggagtctacacaatacaggtctctaatgctacaaaaccaagaaaggtcttctgcgatctccagagcagcggcgggcggtggactttaattcagaggcgggagaatggcactgtgaacttccagcgaaattggaaagactacaagcagggtttcggagatcctgcaggcgagcactggttgggcaacgaggtcgtccatcagctgactagacgcgccgcttactctctacgtgtagaactccaggattgggaaggacatgaggcctacgctcagtacgaacactttcatctcgggagcgagaaccagttgtaccgtctgtccgtagtagggtacagcgggtcagcaggacgccagagctccttagttttgcagaacacctccttttctactctggattcagataacgaccattgcctttgcaaatgcgcccaggtgatgtctggaggctggtggttcgacgcatgtggtctcagcaatttaaacggggtgtactatcacgctcccgacaataagtacaaaatggatggcattcggtggcactactttaagggtccttcttatagcctccgagccagtaggatgatgatcagacctctcgatatctag

SEQ ID NO: 188765 - DNA, 1922 bp, Artificial Sequence
  derived and/or modified sequence
tgcagctgcaggcaagcctggccactgttggctgcagcaggacatcccaggcacagcccctagggctctgagcagacatccctcgccattgacacatcttcagatgctctcccagctagccatgctgcagggcagcctcctccttgtggttgccaccatgtctgtggctcaacagacaaggcaggaggcggataggggctgcgagacacttgtagtccagcacggccactgtagctacaccttcttgctgcccaagtctgagccctgccctccggggcctgaggtctccagggactccaacaccctccagagagaatcactggccaacccactgcacctggggaagttgcccacccagcaggtgaaacagctggagcaggcactgcagaacaacacgcagtggctgaagaagctagagagggccatcaagacgatcttgaggtcgaagctggagcaggtccagcagcaaatggcccagaatcagacggcccccatgctagagctgggcaccagcctcctgaaccagaccactgcccagatccgcaagctgaccgacatggaggctcagctcctgaaccagacatcaagaatggatgcccagatgccagagacctttctgtccaccaacaagctggagaaccagctgctgctacagaggcagaagctccagcagcttcagggccaaaacagcgcgctcgagaagcggttgcaggccctggagaccaagcagcaggaggagctggccagcatcctcagcaagaaggcgaagctgctgaacacgctgagccgccagagcgccgccctcaccaacatcgagcgcggcctgcgcggtgtcaggcacaactccagcctcctgcaggaccagcagcacagcctgcgccagctgctggtgttgttgcggcacctggtgcaagaaagggctaacgcctcggccccggccttcataatggcaggtgagcaggtgttccaggactgtgcagagatccagcgctctggggccagtgccagtggtgtctacaccatccaggtgtccaatgcaacgaagcccaggaaggtgttctgtgacctgcagagcagtggaggcaggtggaccctcatccagcgccgtgagaatggcaccgtgaattttcagcggaactggaaggattacaaacagggcttcggagacccagctggggagcactggctgggcaatgaagtggtgcaccagctcaccagaagggcagcctactctctgcgtgtggagctgcaagactgggaaggccacgaggcctatgcccagtacgaacatttccacctgggcagtgagaaccagctatacaggctttctgtggtcgggtacagcggctcagcagggcgccagagcagcctggtcctgcagaacaccagctttagcacccttgactcagacaacgaccactgtctctgcaagtgtgcccaagtgatgtctggagggtggtggtttgacgcctgtggcctgtcaaacctcaacggcgtctactaccacgctcccgacaacaagtacaagatggacggcatccgctggcactacttcaagggccccagctactcactgcgtgcctctcgcatgatgatacggcctttggacatctaacgagcagctgtgccagaggctggaccacacaggagaagctcggacttggcactcctggacaacctggacccagatgcaagacactgtgccaccgccttccctgacaccctgggcttcctgagccagccctccttgacccagaagtccagaagggtcatctgccccccaactcccctccgtctgtgacatggagggtgttcggggcccatccctctgatgtagtcctcgcccctcttctctccctcccccttcaggggctccctgcctgagggtcacagtaccttgaatgggctgagaacagaccaaa

SEQ ID NO: 188766 - DNA, 1512 bp, Artificial Sequence
  derived and/or modified sequence
atgctgagccagcttgccatgctgcaaggatcgctcctacttgtagtggctaccatgtccgtggcccaacagaccaggcaggaggccgaccgaggatgtgaaaccctggtggtgcagcatgggcactgctcctacacttttctcctccccaaatccgagccctgtccccctggccctgaggtgagtcgcgactcaaacactttgcaaagggaatccctcgcgaatccactgcatcttggtaaactgcctacccagcaggtgaaacagctggagcaggccttacaaaataacacgcagtggctgaaaaaactagagcgagctattaaaaccatcttgaggtctaaattagaacaagtgcagcagcaaatggcacagaaccagacggctccaatgctcgagctgggcacatcgctgttaaaccagacaactgctcagattagaaagctaaccgacatggaggctcagctactcaatcaaactagcagaatggacgctcagatgcctgagacctttctgagtactaacaagctcgagaatcagctgttactgcagcgtcaaaaacttcaacagttgcagggtcagaactctgccctggaaaaacgactgcaagcacttgaaacaaagcagcaggaggaactggcgtccatcttgtctaaaaaagccaagcttctcaatacgctgagcagacaaagcgccgctcttactaacatcgaacggggactaaggggcgtgcggcataactcttcactgcttcaagaccagcagcactccctgcgccagctgttggttctgctcagacacctggttcaggagagagccaatgcatcagcgcctgccttcatcatggccggagaacaggtctttcaggactgcgccgagatacagcggtccggggcttcggcttccggtgtgtatacaattcaagtgagtaacgccacaaaaccgcgaaaggtgttctgcgatctgcaaagcagcggcggacgctggacgctgatccaacggagggaaaacggaacagtgaatttccagaggaattggaaggactataagcaagggtttggcgaccccgctggtgaacactggctgggcaacgaggtggtccaccagttgacgcgtcgtgctgcttatagcctgcgcgtggagttgcaggattgggaggggcatgaagcgtatgcacagtacgagcactttcaccttggctcggaaaaccaactgtacaggcttagcgtggttggttatagcggttcagcgggaaggcagagctccctggttcttcaaaacacaagcttttccacacttgattccgataacgaccactgcctttgcaagtgtgctcaggtaatgagtggaggttggtggtttgacgcatgcggcctgagcaacctcaacggtgtgtactatcacgcccctgataacaagtacaaaatggacggaattaggtggcactacttcaagggcccaagctatagcctgcgagcctcccgcatgatgattcgccctctcgatatttag

SEQ ID NO: 188767 - DNA, 1512 bp, Artificial Sequence
  derived and/or modified sequence
atgctgagccagctggccatgctgcagggcagcctgctgctggtggtggccaccatgagcgtggcccagcagaccagacaggaggccgacagaggctgcgagaccctggtggtgcagcacggccactgcagctacaccttcctgctgcccaagagcgagccctgcccccccggccccgaggtgagcagagacagcaacaccctgcagagagagagcctggccaaccccctgcacctgggcaagctgcccacccagcaggtgaagcagctggagcaggccctgcagaacaacacccagtggctgaagaagctggagagagccatcaagaccatcctgagaagcaagctggagcaggtgcagcagcagatggcccagaaccagaccgcccccatgctggagctgggcaccagcctgctgaaccagaccaccgcccagatcagaaagctgaccgacatggaggcccagctgctgaaccagaccagcagaatggacgcccagatgcccgagaccttcctgagcaccaacaagctggagaaccagctgctgctgcagagacagaagctgcagcagctgcagggccagaacagcgccctggagaagagactgcaggccctggagaccaagcagcaggaggagctggccagcatcctgagcaagaaggccaagctgctgaacaccctgagcagacagagcgccgccctgaccaacatcgagagaggcctgagaggcgtgagacacaacagcagcctgctgcaggaccagcagcacagcctgagacagctgctggtgctgctgagacacctggtgcaggagagagccaacgccagcgcccccgccttcatcatggccggcgagcaggtgttccaggactgcgccgagatccagagaagcggcgccagcgccagcggcgtgtacaccatccaggtgagcaacgccaccaagcccagaaaggtgttctgcgacctgcagagcagcggcggcagatggaccctgatccagagaagagagaacggcaccgtgaacttccagagaaactggaaggactacaagcagggcttcggcgaccccgccggcgagcactggctgggcaacgaggtggtgcaccagctgaccagaagagccgcctacagcctgagagtggagctgcaggactgggagggccacgaggcctacgcccagtacgagcacttccacctgggcagcgagaaccagctgtacagactgagcgtggtgggctacagcggcagcgccggcagacagagcagcctggtgctgcagaacaccagcttcagcaccctggacagcgacaacgaccactgcctgtgcaagtgcgcccaggtgatgagcggcggctggtggttcgacgcctgcggcctgagcaacctgaacggcgtgtactaccacgcccccgacaacaagtacaagatggacggcatcagatggcactacttcaagggccccagctacagcctgagagccagcagaatgatgatcagacccctggacatctag

SEQ ID NO: 188768 - protein, 442 aa, Artificial Sequence
  derived and/or modified sequence
MRGAMELEPELLLQEARENVEAAQSYRRELGHRLEGLREARRQIKESASQTRDVLKQHFNDLKGTLGKLLDERLVTLLQEVDTIEQETIKPLDDCQKLIEHGVNTAEDLVREGEIAMLGGVGEENEKLWSFTKKASHIQLDSLPEVPLLVDVPCLSAQLDDSILNIVKDHIFKHGTVASRPPVQIEELIEKPGGIIVRWCKVDDDFTAQDYRLQFRKCTSNHFEDVYVGSETEFIVLHIDPNVDYQFRVCARGDGRQEWSPWSVPQIGHSTLVPHEWTAGFEGYSLSSRRNIALRNDSESSGVLYSRAPTYFCGQTLTFRVETVGQPDRRDSIGVCAEKQDGYDSLQRDQAVCISTNGAVFVNGKEMTNQLPAVTSGSTVTFDIEAVTLGTTSNNEGGHFKLRVTISSNNREVVFDWLLDQSCGSLYFGCSFFYPGWKVLVF

SEQ ID NO: 188769 - protein, 326 aa, Artificial Sequence
  derived and/or modified sequence
MLGGVGEENEKLWSFTKKASHIQLDSLPEVPLLVDVPCLSAQLDDSILNIVKDHIFKHGTVASRPPVQIEELIEKPGGIIVRWCKVDDDFTAQDYRLQFRKCTSNHFEDVYVGSETEFIVLHIDPNVDYQFRVCARGDGRQEWSPWSVPQIGHSTLVPHEWTAGFEGYSLSSRRNIALRNDSESSGVLYSRAPTYFCGQTLTFRVETVGQPDRRDSIGVCAEKQDGYDSLQRDQAVCISTNGAVFVNGKEMTNQLPAVTSGSTVTFDIEAVTLGTTSNNEGGHFKLRVTISSNNREVVFDWLLDQSCGSLYFGCSFFYPGWKVLVF

SEQ ID NO: 188770 - DNA, 1329 bp, Artificial Sequence
  derived and/or modified sequence
atgcgaggagcaatggagttggaacctgagctcctcctgcaggaggcaagggagaatgtggaggccgcacagtcttatcgacgggagttaggccacaggcttgaagggctgagagaggcacgtcgacagataaaagaaagcgcatcacaaactagggacgttctgaagcaacatttcaatgacctgaaggggactttggggaaacttctggacgaaaggcttgtcactctcctgcaggaagtagatactattgaacaagagactatcaaacctctggatgattgtcagaagctcatcgagcatggagttaacacagctgaagatctggtgcgtgagggggagatcgcgatgctggggggcgtaggcgaggagaatgaaaaactctggagctttaccaagaaggcctctcatattcaactggatagcttgcctgaagtgcctctgctggtagatgttccatgcctcagtgcacagttggacgactcaatcctgaacatcgtaaaggatcatatcttcaagcacggtacagtggcgtcccggccacccgtacaaattgaggagctcattgagaagcccgggggcatcatagtgcgttggtgtaaggtcgacgacgatttcaccgctcaggactatcggctgcagttccggaagtgtacgagcaatcactttgaggatgtctacgttggctctgagaccgagtttatcgtcctccatatcgacccaaatgtggattatcaatttagagtctgcgcacggggcgacggcaggcaggaatggtctccgtggtccgtgccccagatcggccattccacactggtgccacacgagtggactgctgggtttgaaggatactccctgagctccaggcggaacattgccctaaggaatgatagtgaatcctccggagtactgtatagcagggcccctacctacttctgtgggcagacgctgacatttcgcgtcgagaccgtggggcagcctgatcgaagagactctatcggagtctgcgccgaaaagcaggacggctacgacagtttacaaagagatcaggcggtatgtattagtacgaacggggcggtatttgtaaacggaaaagagatgactaaccagcttccggcagtgacgagcggatcgaccgtaaccttcgatattgaggcagttacgctagggaccaccagcaacaatgagggaggccacttcaagctgcgcgtgacgatttcttccaacaaccgcgaggttgtgttcgattggttgttagatcagagctgcgggtccctatactttgggtgcagcttcttctacccagggtggaaagtgcttgtattctag

SEQ ID NO: 188771 - DNA, 1329 bp, Artificial Sequence
  derived and/or modified sequence
atgagaggagccatggagctggagcctgagctgctgctgcaggaggcccgggagaatgtggaggccgcccagagctacagaagagagctgggccaccggctggagggcctgcgggaggcccggcggcagatcaaggagagcgccagccagaccagagatgtgctgaagcagcacttcaatgacctgaagggcaccctgggcaagctgctggatgagcggctggtgaccctgctgcaggaggtggacaccatcgagcaggagaccatcaagcccctggatgactgccagaagctgattgaacatggagtgaacacagctgaggacctggtgcgggagggggagatcgccatgctgggcggcgtgggggaggagaatgagaagctgtggagcttcaccaagaaggccagccacatccagctggacagcctgcctgaggtgcccctgctggtggatgtgccctgcctgagcgcccagctggatgacagcatcctgaacatcgtgaaggaccacatcttcaagcacggcaccgtggccagcaggcctcctgtgcagatcgaggagctgattgagaagccaggcggcatcatcgtgcgctggtgcaaggtggatgatgacttcaccgcccaggactaccgcctgcagttcaggaagtgcaccagcaaccactttgaagatgtgtatgtgggcagcgagacagagttcatcgtgctgcacatcgaccccaacgtggactaccagttccgggtgtgtgcccggggagatggccggcaggagtggagcccctggagcgtgccccagatcggccacagcaccctggtgccccatgagtggacagctggctttgagggctacagcctgagcagcagaagaaacatcgccctgagaaatgacagcgagagcagtggagtgctgtacagccgggcccccacctacttctgtggccagaccctgaccttccgggtggagaccgtgggccagcctgacagaagagacagcattggagtgtgtgccgagaagcaggacggctatgacagcctgcagagggaccaggccgtgtgcatcagcaccaatggagctgtgtttgtgaatggcaaggagatgaccaaccagctgcctgctgtgaccagcggcagcacagtgacctttgacatcgaggccgtgaccctgggcaccaccagcaacaatgaaggaggccacttcaagctgcgggtgaccatcagcagcaacaaccgggaggtggtgtttgactggctgctggaccagagctgtggcagcctgtacttcggctgcagcttcttctacccaggctggaaggtgctggtgttctag

SEQ ID NO: 188772 - DNA, 1329 bp, Artificial Sequence
  derived and/or modified sequence
atgcggggcgccatggagctggagcccgagctgctgctgcaggaggctcgcgagaatgttgaagccgcccagtcataccgacgcgagctcggacacaggctggaggggctgcgggaagcaaggcggcaaatcaaagaatctgcgtcgcagactagagacgtattgaaacagcatttcaacgatttgaaggggacattgggcaagctgttagatgaaaggctcgttactctgctgcaggaagtagacacaattgaacaggagactattaagcctttggacgattgccagaaattaatagaacatggcgttaacaccgccgaagacctggtccgcgagggcgagattgctatgctggggggtgtgggcgaagagaatgagaagctatggagctttaccaaaaaagcatctcacatccagttagacagtctgcctgaagtgcctcttctggttgatgtcccttgtctgtccgcccagttagacgactccatactaaacattgtgaaggaccatatcttcaagcacggcacagtggcttctcgcccccccgttcaaatcgaggaactcatcgagaaacctggaggaatcatcgtgagatggtgcaaggtggacgacgactttactgctcaggactatcgcttacagttccggaagtgcacctctaatcactttgaagacgtctatgtgggttctgaaacagaattcatagtattacatattgaccctaacgtcgattatcagtttagggtatgcgccagaggcgacggaaggcaggaatggtcaccatggtccgtacctcagatcggccattcaacactcgtgcctcacgaatggaccgcagggtttgaaggctattcactgtcctcaaggaggaacattgccctgcggaatgatagcgaatcatcaggtgtcctgtactctagggcaccaacctatttctgcggtcagactctcacatttcgggtggaaacagtaggccagccggacaggagagattccatcggagtctgcgcagagaagcaggacggttacgattcactccaaagggaccaagccgtgtgcattagcaccaatggcgcagtgtttgtgaacggcaaggagatgaccaaccagctccccgctgtgacaagcggctctaccgtgactttcgatattgaggctgttacactcggaaccaccagtaacaacgaaggtggtcatttcaaattacgggtcaccatctcctctaataaccgggaggtggtgttcgactggttgctcgatcagtcatgcggttccctctattttggatgtagtttcttctaccctgggtggaaggttcttgtgttttag

SEQ ID NO: 188773 - DNA, 1329 bp, Artificial Sequence
  derived and/or modified sequence
atgaggggtgccatggagctggagcccgagctgctcctccaggaggcaagagaaaatgtggaggcagcccagtcgtacaggagagaactagggcaccggctggagggccttcgggaggcaaggaggcagatcaaagagagcgcctcgcagactagggatgtgctcaaacagcactttaatgacctcaaagggaccctgggcaagctcctggacgaacgcctcgttacacttttgcaagaggtcgacacgattgagcaagagactatcaaacctctcgatgattgtcaaaagctgattgaacatggtgtcaataccgcagaggacctggtgagggagggagagattgccatgctgggtggtgtgggcgaggaaaacgagaaattgtggtccttcacaaagaaggcaagccatatacagctcgatagcctgcccgaagtgccattgttggtggatgtaccatgtctctcagcgcagctggacgatagtattcttaatatcgtcaaggaccacatattcaagcacggtaccgtggccagcagacctccagtacagatcgaggagctcatcgaaaaacccggagggataatagtccgttggtgtaaagtagatgatgatttcactgcccaggattatagactacagttcaggaagtgcacctctaaccatttcgaggatgtgtacgtgggatcagagaccgaatttattgtattgcatattgaccccaacgtggattatcagttcagagtatgtgcgaggggcgatgggcgacaggagtggtctccttggtcagttccgcagatcggccattctacactggttccgcacgagtggaccgcaggcttcgaaggttattccctatcaagcaggaggaacatcgccttgcgcaatgacagtgagtcctcaggtgtcctgtactcaagagcccctacatatttttgcgggcagaccctcaccttcagggtagaaacggtcggtcaaccggaccggagagattccatcggcgtttgcgccgaaaagcaggatgggtacgacagtctgcagagagatcaggcagtatgcatctctaccaacggtgctgtgtttgttaatggcaaggagatgaccaaccaactgccagccgtaacctcaggtagcactgttaccttcgacatagaggccgtgacgctgggcaccaccagcaataatgaaggcggtcatttcaagcttagagttaccatatcctccaataacagggaggtggtgttcgattggttgctcgatcagtcatgcggaagtctgtatttcgggtgcagtttcttttaccccggatggaaggtccttgttttctag

SEQ ID NO: 188774 - DNA, 2917 bp, Artificial Sequence
  derived and/or modified sequence
ggcggcggggctgggcggtgcttccgcctgcgcgaggccgcgccgggccgcttggaggcgcccggtgcagtcgggaacccgcgctaggtttcgccggccgcgcggccagatgaggggggcgatggagctggagcctgagctgctgttgcaggaggcccgcgagaacgtggaggcagcgcagagctaccggcgggagctgggtcaccggcttgaggggctgcgtgaggcgcggaggcagatcaaagaaagtgcatcacagacaagggatgttctcaaacagcattttaatgatttaaagggaacccttggaaagctcctggatgagcgattggtgacccttttgcaagaggtggacaccattgaacaggagaccattaaaccactagatgactgccagaagctcatagaacacggagtcaacactgcagaggacttagtccgagaaggtgaaatcgccatgcttggtggtgtgggagaagagaatgagaaactgtggagctttaccaaaaaggcctcgcacattcagttggacagcttaccagaagtacctttactggttgatgtgccttgtttatctgctcagttggatgactcaattcttaacatagtgaaagaccacatttttaagcatggaacagtagcatctcgcccaccagtacagatagaagaactaatagagaaacctggaggcatcattgtacgatggtgtaaggtggatgatgactttacagcccaagattacaggctccagtttcgtaaatgtacttcaaatcattttgaggatgtatatgtaggttctgaaactgaattcatagtattgcacatagaccccaacgttgattaccagttcagagtctgcgcccgaggagatggccgacaggagtggagtccttggagtgtcccccagataggtcattccacattggtgcctcatgagtggacagctggttttgaggggtacagtctgagcagtcgaagaaatatagcacttcggaacgattctgaatcatcgggtgttctctactccagagctccgacttatttctgtgggcagacattaacattcagagttgaaactgtgggacagccagacagaagagatagcataggagtgtgtgcagaaaaacaggatggatatgactctctgcagcgggatcaagctgtgtgcattagtacaaatggtgcagtttttgtcaatggaaaagaaatgacaaatcagttacccgcagttacttctgggtccactgtcacgtttgacattgaagccgtgactctaggaaccaccagtaataatgaaggtggacacttcaagcttcgagtaactataagttcaaataatagagaagtggtttttgactggttacttgatcagtcttgtggttctctttactttggatgctcatttttctatcctggatggaaagtgttagtgttttagatgtttgggtgcttggctttggttttcagggtctaacgtagctgtcctcagcccagcgtagttgtaattgctttaaaaaaaaagttgaattcatctctaacttaggccattggaaagtgtttactggattcattttgtaatattttagcaaaaagagacttcaatgttgtggacaaaatcatacaattcagtcaattttatttttagcatactgttaaatatcacatcacaataaaaatcaaattggcattaaaagtatagaagatataggaagttctatacccttccactgtacttctcaaagttggttattagaccaggaaaacttaatgtaatattatttttaaaatcatcttaaaggatccaagtccatgtaactctttagaacaagaggaataggtcagatagaagaagctgtgtaatgtattaatacatccgttcatgtgctgtccacatgaatgtgttgactgtgctctccatgttcaggtatttgtaagcagtgttgacttttatcccctcttcagtaatctttaagtccccaaaacattataactttttctttttttgttgagacggagtctcactcttgtcactcaggctggagtgcagtggtgtgatctcagttcactgcaacctctgcctcccacgttcaagcgatcctcctgcctcaggctcctgagtagctgggattacaggcgtcggccaccacacctggctaatttttgtatttttagtagagacagggtttcaccatgttggccaggctggtcttgaactcctgacctcaggtgttccacccacctcagccttccaaagtgctaggattacaggtgtgagccactgcagtggaccaatttttgtatttttttaaatgcttgaccaagtgtctaaaataggcaagtagtaccttttgttctttcattgcaatttgatacagtataggctacagtatttttacagggtaaaactagttatggcagtagtatgcacagcagtgttagccatttcatatgtatgtaatatgcacgtgtgtatccaatctgcctgtgacatgcattttactctttgcagagaatgagctgcagtccagtttaatgtcagtttaataagtggtctctttttagcagagcaaaaaaatatagcgtaaatacttattttttttaaaaacttacttaaatttgtgtgtaaaatatttatttgaaggactttaatatgtaaaaataattgtcttctatgccaccctacagattttattttaatgtgaattatttttttcatttcatttttaccagtatagtaaaaaagtagaaaagcaagtatgatatttttgtaagataatttatttggggattcatgttccctgttagacaatcatgaccttttctacttgtctttttatatataagtagtagatttccacttgtttagggattaagaagatgttctagaatgtagataccttgtccagccataggaatc

SEQ ID NO: 188775 - DNA, 1329 bp, Artificial Sequence
  derived and/or modified sequence
atgagaggcgccatggagctggagcccgagctgctgctgcaggaggccagagagaacgtggaggccgcccagagctacagaagagagctgggccacagactggagggcctgagagaggccagaagacagatcaaggagagcgccagccagaccagagacgtgctgaagcagcacttcaacgacctgaagggcaccctgggcaagctgctggacgagagactggtgaccctgctgcaggaggtggacaccatcgagcaggagaccatcaagcccctggacgactgccagaagctgatcgagcacggcgtgaacaccgccgaggacctggtgagagagggcgagatcgccatgctgggcggcgtgggcgaggagaacgagaagctgtggagcttcaccaagaaggccagccacatccagctggacagcctgcccgaggtgcccctgctggtggacgtgccctgcctgagcgcccagctggacgacagcatcctgaacatcgtgaaggaccacatcttcaagcacggcaccgtggccagcagaccccccgtgcagatcgaggagctgatcgagaagcccggcggcatcatcgtgagatggtgcaaggtggacgacgacttcaccgcccaggactacagactgcagttcagaaagtgcaccagcaaccacttcgaggacgtgtacgtgggcagcgagaccgagttcatcgtgctgcacatcgaccccaacgtggactaccagttcagagtgtgcgccagaggcgacggcagacaggagtggagcccctggagcgtgccccagatcggccacagcaccctggtgccccacgagtggaccgccggcttcgagggctacagcctgagcagcagaagaaacatcgccctgagaaacgacagcgagagcagcggcgtgctgtacagcagagcccccacctacttctgcggccagaccctgaccttcagagtggagaccgtgggccagcccgacagaagagacagcatcggcgtgtgcgccgagaagcaggacggctacgacagcctgcagagagaccaggccgtgtgcatcagcaccaacggcgccgtgttcgtgaacggcaaggagatgaccaaccagctgcccgccgtgaccagcggcagcaccgtgaccttcgacatcgaggccgtgaccctgggcaccaccagcaacaacgagggcggccacttcaagctgagagtgaccatcagcagcaacaacagagaggtggtgttcgactggctgctggaccagagctgcggcagcctgtacttcggctgcagcttcttctaccccggctggaaggtgctggtgttctag

SEQ ID NO: 188776 - protein, 189 aa, Artificial Sequence
  derived and/or modified sequence
MLGMIKNSLFGSVETWPWQVLSKGDKEEVAYEERACEGGKFATVEVTDKPVDEALREAMPKVAKYAGGTNDKGIGMGMTVPISFAVFPNEDGSLQKKLKVWFRIPNQFQSDPPAPSDKSVKIEEREGITVYSMQFGGYAKEADYVAQATRLRAALEGTATYRGDIYFCTGYDPPMKPYGRRNEIWLLKT

SEQ ID NO: 188777 - DNA, 570 bp, Artificial Sequence
  derived and/or modified sequence
atgctaggtatgataaagaactctctttttggaagcgttgagacatggccttggcaggtcctctcaaaaggagataaagaggaagtggcctacgaagagcgagcatgcgagggcggcaagtttgctacagttgaagtgacagacaagccagtggatgaggcacttagagaagccatgcccaaagttgcgaaatacgcaggggggactaatgacaaagggataggcatggggatgaccgtgcccataagtttcgctgtgtttccaaacgaagatggctctttacagaaaaaactgaaggtctggttccgcatacctaaccagttccagtcagatcctccagcaccttcggataagagtgtcaaaatcgaggagcgtgaaggcataactgtgtattcaatgcaattcggcgggtacgctaaggaggctgactatgttgctcaggccactaggctgagagccgcactagagggtactgctacctatcggggagatatctatttttgtaccgggtacgatccgcccatgaaaccatacggtcggcgaaatgaaatttggctactgaagacctag

SEQ ID NO: 188778 - DNA, 1173 bp, Artificial Sequence
  derived and/or modified sequence
ctcgccgcctcgccgtcccgccgccttgccgccctgccaccctgccgccctgccgccctgccgccctgccgccctgccgccggtggtcgctgcccgtggtgctccgtcgcccccgccacctcacgtcctcccgtgcgtcgggagcgtctcggctacaacatgttgggcatgatcaagaactcgctgttcggaagcgtagagacgtggccttggcaggtcctaagcaaaggggacaaggaagaagttgcctatgaagaaagggcctgtgaaggcggcaaatttgccacagtagaagtgacagataagcctgtggatgaggctctacgggaagcaatgcccaaggtcgcaaagtatgcggggggcaccaatgacaagggaattgggatggggatgacagtccctatttcctttgctgtgttccccaatgaagatggctctctgcagaagaaattaaaagtctggttccggattccaaaccaatttcaaagcgacccaccagctcccagtgacaaaagcgttaagattgaggaacgggaaggcatcactgtctattccatgcagtttggtggttatgccaaggaagcagactacgtagcacaagccacccgtctgcgtgctgccctggagggcacagccacctaccggggggacatctacttctgcacgggttatgaccctcccatgaagccctacggacggcgcaatgagatctggctgttgaagacatgagtgacccactgaaccaagaacttactggaagtgtgcctctgtgtctccttcctcgggggtaaggaggggacagtgcttcccaagttccagctgcaagtccaacttaaccaactttccttcaaagtcagttactgccaattttctgaaaaaagcatgttccatatactaagtctcttttctcacagtaggaaataatacagccaagatatgcagcatccttctcattgatgtagaaaattctgcgatagaccagaaaaatcctggcagcttttctccaggcatctgggtcactaaaaactgattttctaaaattattggatttgtattttgttattaagggggaaaatgtgatttgtgcctgatctttcatctgtgattcttataagagctttgtcttcagaaaaactaaaaataaaaggcattgacttaaacagctgagacaaa

SEQ ID NO: 188779 - DNA, 570 bp, Artificial Sequence
  derived and/or modified sequence
atgctgggcatgatcaagaacagcctgtttggatctgtggagacctggccctggcaggtgctgagcaaaggagacaaggaggaggtggcctatgaggagcgggcctgtgagggcggcaagtttgccaccgtggaggtgacagacaagcctgtggatgaggccctgcgggaggccatgcccaaggtggccaagtatgctgggggcaccaatgacaagggcatcggcatgggcatgacagtgcccatcagctttgctgtgttccccaatgaagatggcagcctgcagaagaagctgaaggtgtggttccgcatccccaaccagttccagagcgaccccccagcccccagcgacaagtctgtgaagattgaggagcgggagggcatcaccgtgtacagcatgcagtttggaggctacgccaaggaggccgactatgtggcccaggccacccggctgcgggccgccctggagggcacagccacctacagaggagacatctacttctgcaccggctatgacccccccatgaagccctacggcagaagaaatgagatctggctgctgaagacctag

SEQ ID NO: 188780 - DNA, 570 bp, Artificial Sequence
  derived and/or modified sequence
atgctgggcatgatcaagaacagcctgttcggcagcgtggagacctggccctggcaggtgttgtctaagggggacaaggaggaggtggcctatgaggaaagagcgtgcgagggaggtaagtttgctacagtggaggtcaccgacaagcctgtcgacgaagccctcagggaagccatgcccaaagtcgctaagtacgctgggggcacgaatgataagggaatcgggatgggaatgactgtacctatcagctttgccgttttccctaatgaggacgggtccctgcaaaagaagctgaaagtctggtttagaatccccaaccagtttcaaagtgatcctcctgcaccttcggataaaagtgtgaagattgaggaacgagaaggaattaccgtgtactctatgcagttcgggggttacgctaaggaagcagattacgtggcacaggcaacccggttacgggcggctctggagggcaccgctacataccggggcgacatctatttctgcactggctacgatccaccaatgaagccctatggacgcaggaatgagatctggctgctcaaaacttag

SEQ ID NO: 188781 - DNA, 570 bp, Artificial Sequence
  derived and/or modified sequence
atgctggggatgatcaagaacagtctcttcggatccgtggagacgtggccatggcaggtcctgtctaagggcgataaagaggaggttgcctatgaagaacgagcatgcgagggcggaaagttcgcaacagtggaagtcacagataaaccggtggacgaagctcttcgggaggcaatgccgaaagtggccaagtacgctggcggtactaatgataaaggaattgggatgggaatgaccgtaccaatatctttcgccgtgtttcctaatgaggacggtagtttgcagaaaaaacttaaggtctggtttagaatacctaaccagtttcaatccgatccgccagccccatcggataagtccgttaaaatcgaggagcgggaaggcattaccgtgtacagcatgcagtttgggggatacgcaaaagaagcagactatgtcgcacaagctacacgtctcagagcggcactcgaagggacagccacctaccgcggagatatctacttttgtacaggctacgatccgcctatgaagccttacggccgaaggaatgagatctggctgctgaaaacatag

SEQ ID NO: 188782 - DNA, 570 bp, Artificial Sequence
  derived and/or modified sequence
atgttaggcatgataaagaactcactgttcggaagcgtagagacgtggccttggcaggtgctaagtaaaggtgataaggaagaggtcgcgtacgaagagcgcgcctgtgaaggaggcaaatttgcaaccgtggaagtgaccgacaaaccagttgacgaggcactcagagaagccatgcctaaggtagccaagtatgccggcggcaccaacgataaggggataggaatgggcatgactgtaccaattagcttcgctgtctttccaaacgaggatggatcactgcagaaaaagctgaaggtctggttccggatccccaatcagtttcagagcgacccccccgccccatccgataagagcgtgaagatcgaagaaagagaaggcatcaccgtgtacagtatgcagttcggaggctatgccaaagaggcagattatgtcgctcaagccacacgactgcgcgccgctctggaggggaccgcaacctaccgaggggacatctatttttgtacaggctacgatcctccaatgaaaccctacgggagacgcaacgagatctggctgctgaaaacctag

SEQ ID NO: 188783 - DNA, 570 bp, Artificial Sequence
  derived and/or modified sequence
atgttaggtatgatcaagaattcactctttggatcagtggagacctggccttggcaggtgttgagcaaaggagataaggaggaggttgcctatgaggaaagagcgtgtgagggaggtaaatttgcaaccgttgaagtgaccgacaaacctgtggacgaagctctcagagaggccatgcccaaagtggctaagtacgctgggggtactaatgataagggtatcggaatggggatgaccgtgcctatcagcttcgctgtgttcccaaatgaggatgggtctctccagaagaagcttaaggtgtggttccgaattcccaatcaattccagtccgatcccccagcaccatctgataagagcgtaaagatagaggaacgcgaagggattacagtttactcaatgcagtttggtggatacgcaaaagaagccgactatgttgcacaggctacacggctccgtgctgctctggaggggacagctacgtacaggggggacatctatttttgcacaggttacgacccacccatgaagccatacgggcgcagaaacgagatttggctgctcaaaacctag

SEQ ID NO: 188784 - DNA, 570 bp, Artificial Sequence
  derived and/or modified sequence
atgctgggcatgatcaagaacagcctgttcggcagcgtggagacctggccctggcaggtgctgagcaagggcgacaaggaggaggtggcctacgaggagagagcctgcgagggcggcaagttcgccaccgtggaggtgaccgacaagcccgtggacgaggccctgagagaggccatgcccaaggtggccaagtacgccggcggcaccaacgacaagggcatcggcatgggcatgaccgtgcccatcagcttcgccgtgttccccaacgaggacggcagcctgcagaagaagctgaaggtgtggttcagaatccccaaccagttccagagcgacccccccgcccccagcgacaagagcgtgaagatcgaggagagagagggcatcaccgtgtacagcatgcagttcggcggctacgccaaggaggccgactacgtggcccaggccaccagactgagagccgccctggagggcaccgccacctacagaggcgacatctacttctgcaccggctacgacccccccatgaagccctacggcagaagaaacgagatctggctgctgaagacctag

SEQ ID NO: 188785 - protein, 520 aa, Artificial Sequence
  derived and/or modified sequence
MSIPLKSSFLLSYLCTLPPALLSREILMADSEALPSLAGDPVAVEALLRAVFGVVVDEAIQKGTSVSQKVCEWKEPEELKQLLDLELRSQGESQKQILERCRAVIRYSVKTGHPRFFNQLFSGLDPHALAGRIITESLNTSQYTYEIAPVFVLMEEEVLRKLRALVGWSSGDGIFCPGGSISNMYAVNLARYQRYPDCKQRGLRTLPPLALFTSKECHYSIQKGAAFLGLGTDSVRVVKADERGKMVPEDLERQIGMAEAEGAVPFLVSATSGTTVLGAFDPLEAIADVCQRHGLWLHVDAAWGGSVLLSQTHRHLLDGIQRADSVAWNPHKLLAAGLQCSALLLQDTSNLLKRCHGSQASYLFQQDKFYDVALDTGDKVVQCGRRVDCLKLWLMWKAQGDQGLERRIDQAFVLARYLVEEMKKREGFELVMEPEFVNVCFWFVPPSLRGKQESPDYHERLSKVAPVLKERMVKEGSMMIGYQPHGTRGNFFRVVVANSALTCADMDFLLNELERLGQDL

SEQ ID NO: 188786 - protein, 582 aa, Artificial Sequence
  derived and/or modified sequence
HGLRATEALPSVRTTLRSLGLAPTCQARPPAGSLAARRLLQAPAHPANPTAAAAPTGTEATSQMWATHSGRPRSYLCTLPPALLSREILMADSEALPSLAGDPVAVEALLRAVFGVVVDEAIQKGTSVSQKVCEWKEPEELKQLLDLELRSQGESQKQILERCRAVIRYSVKTGHPRFFNQLFSGLDPHALAGRIITESLNTSQYTYEIAPVFVLMEEEVLRKLRALVGWSSGDGIFCPGGSISNMYAVNLARYQRYPDCKQRGLRTLPPLALFTSKECHYSIQKGAAFLGLGTDSVRVVKADERGKMVPEDLERQIGMAEAEGAVPFLVSATSGTTVLGAFDPLEAIADVCQRHGLWLHVDAAWGGSVLLSQTHRHLLDGIQRADSVAWNPHKLLAAGLQCSALLLQDTSNLLKRCHGSQASYLFQQDKFYDVALDTGDKVVQCGRRVDCLKLWLMWKAQGDQGLERRIDQAFVLARYLVEEMKKREGFELVMEPEFVNVCFWFVPPSLRGKQESPDYHERLSKVAPVLKERMVKEGSMMIGYQPHGTRGNFFRVVVANSALTCADMDFLLNELERLGQDL

SEQ ID NO: 188787 - protein, 346 aa, Artificial Sequence
  derived and/or modified sequence
MADSEALPSLAGDPVAVEALLRAVFGVVVDEAIQKGTSVSQKCHYSIQKGAAFLGLGTDSVRVVKADERGKMVPEDLERQIGMAEAEGAVPFLVSATSGTTVLGAFDPLEAIADVCQRHGLWLHVDAAWGGSVLLSQTHRHLLDGIQRADSVAWNPHKLLAAGLQCSALLLQDTSNLLKRCHGSQASYLFQQDKFYDVALDTGDKVVQCGRRVDCLKLWLMWKAQGDQGLERRIDQAFVLARYLVEEMKKREGFELVMEPEFVNVCFWFVPPSLRGKQESPDYHERLSKVAPVLKERMVKEGSMMIGYQPHGTRGNFFRVVVANSALTCADMDFLLNELERLGQDL

SEQ ID NO: 188788 - protein, 454 aa, Artificial Sequence
  derived and/or modified sequence
MADSEALPSLAGDPVAVEALLRAVFGVVVDEAIQKGTSVSQKVCEWKEPEELKQLLDLELRSQGESQKQILERCRAVIRYSVKTGHPRFFNQLFSGLDPHALAGRIITESLNTSQYTYEIAPVFVLMEEEVLRKLRALVGWSSGDGISALCHYSIQKGAAFLGLGTDSVRVVKADERGKMVPEDLERQIGMAEAEGAVPFLVSATSGTTVLGAFDPLEAIADVCQRHGLWLHVDAAWGGSVLLSQTHRHLLDGIQRADSVAWNPHKLLAAGLQCSALLLQDTSNLLKRCHGSQASYLFQQDKFYDVALDTGDKVVQCGRRVDCLKLWLMWKAQGDQGLERRIDQAFVLARYLVEEMKKREGFELVMEPEFVNVCFWFVPPSLRGKQESPDYHERLSKVAPVLKERMVKEGSMMIGYQPHGTRGNFFRVVVANSALTCADMDFLLNELERLGQDL

SEQ ID NO: 188789 - protein, 493 aa, Artificial Sequence
  derived and/or modified sequence
MADSEALPSLAGDPVAVEALLRAVFGVVVDEAIQKGTSVSQKVCEWKEPEELKQLLDLELRSQGESQKQILERCRAVIRYSVKTGHPRFFNQLFSGLDPHALAGRIITESLNTSQYTYEIAPVFVLMEEEVLRKLRALVGWSSGDGIFCPGGSISNMYAVNLARYQRYPDCKQRGLRTLPPLALFTSKECHYSIQKGAAFLGLGTDSVRVVKADERGKMVPEDLERQIGMAEAEGAVPFLVSATSGTTVLGAFDPLEAIADVCQRHGLWLHVDAAWGGSVLLSQTHRHLLDGIQRADSVAWNPHKLLAAGLQCSALLLQDTSNLLKRCHGSQASYLFQQDKFYDVALDTGDKVVQCGRRVDCLKLWLMWKAQGDQGLERRIDQAFVLARYLVEEMKKREGFELVMEPEFVNVCFWFVPPSLRGKQESPDYHERLSKVAPVLKERMVKEGSMMIGYQPHGTRGNFFRVVVANSALTCADMDFLLNELERLGQDL

SEQ ID NO: 188790 - protein, 152 aa, Artificial Sequence [sequence omitted]

SEQ ID NO: 188791 - DNA, 1563 bp, Artificial Sequence
  derived and/or modified sequence
atgagcatccccctgaagagcagcttcctgctgagctacctgtgcaccctgccccccgccctgctgagcagagagatcctgatggccgacagcgaggccctgcccagcctggccggcgaccccgtggccgtggaggccctgctgagagccgtgttcggcgtggtggtggacgaggccatccagaagggcaccagcgtgagccagaaggtgtgcgagtggaaggagcccgaggagctgaagcagctgctggacctggagctgagaagccagggcgagagccagaagcagatcctggagagatgcagagccgtgatcagatacagcgtgaagaccggccaccccagattcttcaaccagctgttcagcggcctggacccccacgccctggccggcagaatcatcaccgagagcctgaacaccagccagtacacctacgagatcgcccccgtgttcgtgctgatggaggaggaggtgctgagaaagctgagagccctggtgggctggagcagcggcgacggcatcttctgccccggcggcagcatcagcaacatgtacgccgtgaacctggccagataccagagataccccgactgcaagcagagaggcctgagaaccctgccccccctggccctgttcaccagcaaggagtgccactacagcatccagaagggcgccgccttcctgggcctgggcaccgacagcgtgagagtggtgaaggccgacgagagaggcaagatggtgcccgaggacctggagagacagatcggcatggccgaggccgagggcgccgtgcccttcctggtgagcgccaccagcggcaccaccgtgctgggcgccttcgaccccctggaggccatcgccgacgtgtgccagagacacggcctgtggctgcacgtggacgccgcctggggcggcagcgtgctgctgagccagacccacagacacctgctggacggcatccagagagccgacagcgtggcctggaacccccacaagctgctggccgccggcctgcagtgcagcgccctgctgctgcaggacaccagcaacctgctgaagagatgccacggcagccaggccagctacctgttccagcaggacaagttctacgacgtggccctggacaccggcgacaaggtggtgcagtgcggcagaagagtggactgcctgaagctgtggctgatgtggaaggcccagggcgaccagggcctggagagaagaatcgaccaggccttcgtgctggccagatacctggtggaggagatgaagaagagagagggcttcgagctggtgatggagcccgagttcgtgaacgtgtgcttctggttcgtgccccccagcctgagaggcaagcaggagagccccgactaccacgagagactgagcaaggtggcccccgtgctgaaggagagaatggtgaaggagggcagcatgatgatcggctaccagccccacggcaccagaggcaacttcttcagagtggtggtggccaacagcgccctgacctgcgccgacatggacttcctgctgaacgagctggagagactgggccaggacctgtag

SEQ ID NO: 188792 - DNA, 1749 bp, Artificial Sequence
  derived and/or modified sequence
cacggcctgagagccaccgaggccctgcccagcgtgagaaccaccctgagaagcctgggcctggcccccacctgccaggccagaccccccgccggcagcctggccgccagaagactgctgcaggcccccgcccaccccgccaaccccaccgccgccgccgcccccaccggcaccgaggccaccagccagatgtgggccacccacagcggcagacccagaagctacctgtgcaccctgccccccgccctgctgagcagagagatcctgatggccgacagcgaggccctgcccagcctggccggcgaccccgtggccgtggaggccctgctgagagccgtgttcggcgtggtggtggacgaggccatccagaagggcaccagcgtgagccagaaggtgtgcgagtggaaggagcccgaggagctgaagcagctgctggacctggagctgagaagccagggcgagagccagaagcagatcctggagagatgcagagccgtgatcagatacagcgtgaagaccggccaccccagattcttcaaccagctgttcagcggcctggacccccacgccctggccggcagaatcatcaccgagagcctgaacaccagccagtacacctacgagatcgcccccgtgttcgtgctgatggaggaggaggtgctgagaaagctgagagccctggtgggctggagcagcggcgacggcatcttctgccccggcggcagcatcagcaacatgtacgccgtgaacctggccagataccagagataccccgactgcaagcagagaggcctgagaaccctgccccccctggccctgttcaccagcaaggagtgccactacagcatccagaagggcgccgccttcctgggcctgggcaccgacagcgtgagagtggtgaaggccgacgagagaggcaagatggtgcccgaggacctggagagacagatcggcatggccgaggccgagggcgccgtgcccttcctggtgagcgccaccagcggcaccaccgtgctgggcgccttcgaccccctggaggccatcgccgacgtgtgccagagacacggcctgtggctgcacgtggacgccgcctggggcggcagcgtgctgctgagccagacccacagacacctgctggacggcatccagagagccgacagcgtggcctggaacccccacaagctgctggccgccggcctgcagtgcagcgccctgctgctgcaggacaccagcaacctgctgaagagatgccacggcagccaggccagctacctgttccagcaggacaagttctacgacgtggccctggacaccggcgacaaggtggtgcagtgcggcagaagagtggactgcctgaagctgtggctgatgtggaaggcccagggcgaccagggcctggagagaagaatcgaccaggccttcgtgctggccagatacctggtggaggagatgaagaagagagagggcttcgagctggtgatggagcccgagttcgtgaacgtgtgcttctggttcgtgccccccagcctgagaggcaagcaggagagccccgactaccacgagagactgagcaaggtggcccccgtgctgaaggagagaatggtgaaggagggcagcatgatgatcggctaccagccccacggcaccagaggcaacttcttcagagtggtggtggccaacagcgccctgacctgcgccgacatggacttcctgctgaacgagctggagagactgggccaggacctgtag

SEQ ID NO: 188793 - DNA, 2619 bp, Artificial Sequence
  derived and/or modified sequence
gcttggggacgcacggagaggtgcagctgggccgtccagcatcaaacactagcctccacacgtggaaaagaccctgactcccacagtagactagtcttatgggagtcctggctcttgggccaggctgcattaggaaaatggaaaccagactgtcttcaaattcttctgcctagccttagccattagagagaggtcctgctaaagatggactgcaaatgcgcttgatggaaggagatgtcaattccactgaagtcctcatttctgctgagctacctgtgcaccctgcctccggctctcctgagcagagagatcctgatggctgactcagaagcactcccctcccttgctggggacccagtggctgtggaagccttgctccgggccgtgtttggggttgttgtggatgaggccattcagaaaggaaccagtgtctcccagaaggtctgtgagtggaaggagcctgaggagctgaagcagctgctggatttggagctgcggagccagggcgagtcacagaagcagatcctggagcggtgtcgggctgtgattcgctacagtgtcaagactggtcaccctcggttcttcaaccagctcttctctgggttggatccccatgctctggccgggcgcattatcactgagagcctcaacaccagccagtacacatatgaaatcgcccccgtgtttgtgctcatggaagaggaggtgctgaggaaactgcgggccctggtgggctggagctctggggacggaatcttctgccctggtggctccatctccaacatgtatgctgtaaatctggcccgctatcagcgctacccggattgcaagcagaggggcctccgcacactgccgcccctggccctattcacatcgaaggagtgtcactactccatccagaagggagctgcgtttctgggacttggcaccgacagtgtccgagtggtcaaggctgatgagagagggaaaatggtccccgaggatctggagaggcagattggtatggccgaggctgagggtgctgtgccgttcctggtcagtgccacctctggcaccactgtgctaggggcctttgaccccctggaggcaattgctgatgtgtgccagcgtcatgggctatggctgcatgtggatgctgcctggggtgggagcgtcctgctgtcacagacacacaggcatctcctggatgggatccagagggctgactctgtggcctggaatccccacaagctcctcgcagcaggcctgcaatgctctgcacttcttctccaggatacctcgaacctgctcaagcgctgccatgggtcccaggccagctaccttttccagcaggacaagttctacgatgtggctctggacacgggagacaaggtggtgcagtgtggccgccgtgtggactgtctgaagctgtggctcatgtggaaggcacagggcgatcaagggctggagcggcgcatcgaccaggcctttgtccttgcccggtacctggtggaggaaatgaagaagcgggaagggtttgagctagtcatggagcctgagtttgtcaatgtgtgtttctggttcgtaccccccagcctgcgagggaagcaggagagtccagattaccacgaaaggctgtcaaaggtggcccccgtgctcaaggagcgcatggtgaaggagggctccatgatgattggctaccagccccacgggacccggggcaacttcttccgtgtggttgtggccaactctgcactgacctgtgctgatatggacttcctcctcaacgagctggagcggctaggccaggacctgtgagccttctctgtcttgctgccggccttgataccacccctcacccgcagagtcactgcattccctcccagcctttgaggccgggtgcagtggctcacgcctgtaatcccagcactttgggaggccgaggcgggtggatcacttgaggtcaggagttcgagaccagcctggccaataaggtgaaaccctgtctctactaaaaatacaaaaattagccgagcatggtggcctgtgcctgtaaacccagctactcaggaggttggggcagaattgcttgaacccagggggcagaggttgcagtgagccgagattgcacccctgcactccaggctgggcaacagtacgagactctgttccaaaaaaaataaaaaagaacagcctttttaggccacagtgacctgcgcaatgtttatatgctttgacctactaactttctcctaactaaatatttgattttaggagagtgtttaaataaattacagtatgtctatatgatgaaatgttattttgccattaaaattttgtttacaaagataatttttattgacataaaaataactttaatgtaatttatgttgaaaaagctgaatacaagtctttatatagagtaatatttgagctgtgttcaaaaatacataggaaaagactgataaaatgaaatatggcaaaatgttaatagttttccctggaataggataataggcaattttaaaacagactcctttaaaaaaacaaacaaacaaaaaaaacatagacttctttatatcttttgagctccctcccttttattatgtaatgaatatgtgttgcttttgtaataggaaa

SEQ ID NO: 188794 - DNA, 2596 bp, Artificial Sequence
  derived and/or modified sequence
cacggcttgcgagctactgaagcgctgccgtctgtacggacgacgctgcggtctttggggcttgctcctacctgccaggcgcggcctcccgctggctccctggccgcgcggcgcctcctccaggccccagcacaccctgccaaccccaccgccgcggctgcccccaccgggaccgaggcaacctcccaaatgtgggcaactcactctgggagaccgaggagctacctgtgcaccctgcctccggctctcctgagcagagagatcctgatggctgactcagaagcactcccctcccttgctggggacccagtggctgtggaagccttgctccgggccgtgtttggggttgttgtggatgaggccattcagaaaggaaccagtgtctcccagaaggtctgtgagtggaaggagcctgaggagctgaagcagctgctggatttggagctgcggagccagggcgagtcacagaagcagatcctggagcggtgtcgggctgtgattcgctacagtgtcaagactggtcaccctcggttcttcaaccagctcttctctgggttggatccccatgctctggccgggcgcattatcactgagagcctcaacaccagccagtacacatatgaaatcgcccccgtgtttgtgctcatggaagaggaggtgctgaggaaactgcgggccctggtgggctggagctctggggacggaatcttctgccctggtggctccatctccaacatgtatgctgtaaatctggcccgctatcagcgctacccggattgcaagcagaggggcctccgcacactgccgcccctggccctattcacatcgaaggagtgtcactactccatccagaagggagctgcgtttctgggacttggcaccgacagtgtccgagtggtcaaggctgatgagagagggaaaatggtccccgaggatctggagaggcagattggtatggccgaggctgagggtgctgtgccgttcctggtcagtgccacctctggcaccactgtgctaggggcctttgaccccctggaggcaattgctgatgtgtgccagcgtcatgggctatggctgcatgtggatgctgcctggggtgggagcgtcctgctgtcacagacacacaggcatctcctggatgggatccagagggctgactctgtggcctggaatccccacaagctcctcgcagcaggcctgcaatgctctgcacttcttctccaggatacctcgaacctgctcaagcgctgccatgggtcccaggccagctaccttttccagcaggacaagttctacgatgtggctctggacacgggagacaaggtggtgcagtgtggccgccgtgtggactgtctgaagctgtggctcatgtggaaggcacagggcgatcaagggctggagcggcgcatcgaccaggcctttgtccttgcccggtacctggtggaggaaatgaagaagcgggaagggtttgagctagtcatggagcctgagtttgtcaatgtgtgtttctggttcgtaccccccagcctgcgagggaagcaggagagtccagattaccacgaaaggctgtcaaaggtggcccccgtgctcaaggagcgcatggtgaaggagggctccatgatgattggctaccagccccacgggacccggggcaacttcttccgtgtggttgtggccaactctgcactgacctgtgctgatatggacttcctcctcaacgagctggagcggctaggccaggacctgtgagccttctctgtcttgctgccggccttgataccacccctcacccgcagagtcactgcattccctcccagcctttgaggccgggtgcagtggctcacgcctgtaatcccagcactttgggaggccgaggcgggtggatcacttgaggtcaggagttcgagaccagcctggccaataaggtgaaaccctgtctctactaaaaatacaaaaattagccgagcatggtggcctgtgcctgtaaacccagctactcaggaggttggggcagaattgcttgaacccagggggcagaggttgcagtgagccgagattgcacccctgcactccaggctgggcaacagtacgagactctgttccaaaaaaaataaaaaagaacagcctttttaggccacagtgacctgcgcaatgtttatatgctttgacctactaactttctcctaactaaatatttgattttaggagagtgtttaaataaattacagtatgtctatatgatgaaatgttattttgccattaaaattttgtttacaaagataatttttattgacataaaaataactttaatgtaatttatgttgaaaaagctgaatacaagtctttatatagagtaatatttgagctgtgttcaaaaatacataggaaaagactgataaaatgaaatatggcaaaatgttaatagttttccctggaataggataataggcaattttaaaacagactcctttaaaaaaacaaacaaacaaaaaaaacatagacttctttatatcttttgagctccctcccttttattatgtaatgaatatgtgttgcttttgtaataggaaaataataaagttaaaatttcaactgc

SEQ ID NO: 188795 - DNA, 2659 bp, Artificial Sequence
  derived and/or modified sequence
tggtcttgaactcctgacctcaggtcatctacccaccttggcctcccaaagtgctgggattccaggtgtgagccaccacacccggccctattttcattctgtttaaagatagggtcttggtctgtcgcccaggctggagtgcaatggtgcagtcagggcacactgcagcctcaacctcctgggctcaaggaatcctcccatcttagcctcccaagtagttgggactacagatgtgggcaactgtgcctggataattttgtagttttttttttgtttttttgttttttgtagagacagggttttgccatgttgcccaggctggtctcgaattcctaggctcaagctatccattggcctcggcctcctagagtgctaggattacaggattgagccaccatgcctggccggatatgtaaattttaatagattctgtgaaaatgaattgtaaaagtttgtaacaactcccatgtttactcagaaccatgtgtgaatgttccctattcctacaactttggcaatgtttagtagacggggtttcaccgtgttagccaggatggtctcgatctcctgacctcgtgatccgcccgcctcggcctcccaaagtgctgggattacaggcgtgacccactgcgcctggcctgtatgacccgttttacatgaaatggccagactagacaaatctacagaaacaaagtagattagtagttgccaggggtcggggaaggggagaatgggaaatgactgctactgaggtttttttttgggtgatgaaaatgttctggcgttagatagtgatgatggttgcaacaactttgtgaatttatgaaaaaaacacttaattgtacacttttcaccccacttcctctgccatcttggtcctgctgtcctgaggagctacctgtgcaccctgcctccggctctcctgagcagagagatcctgatggctgactcagaagcactcccctcccttgctggggacccagtggctgtggaagccttgctccgggccgtgtttggggttgttgtggatgaggccattcagaaaggaaccagtgtctcccagaaggtctgtgagtggaaggagcctgaggagctgaagcagctgctggatttggagctgcggagccagggcgagtcacagaagcagatcctggagcggtgtcgggctgtgattcgctacagtgtcaagactggtcaccctcggttcttcaaccagctcttctctgggttggatccccatgctctggccgggcgcattatcactgagagcctcaacaccagccagtacacatatgaaatcgcccccgtgtttgtgctcatggaagaggaggtgctgaggaaactgcgggccctggtgggctggagctctggggacggaatctctgccctgtgtcactactccatccagaagggagctgcgtttctgggacttggcaccgacagtgtccgagtggtcaaggctgatgagagagggaaaatggtccccgaggatctggagaggcagattggtatggccgaggctgagggtgctgtgccgttcctggtcagtgccacctctggcaccactgtgctaggggcctttgaccccctggaggcaattgctgatgtgtgccagcgtcatgggctatggctgcatgtggatgctgcctggggtgggagcgtcctgctgtcacagacacacaggcatctcctggatgggatccagagggctgactctgtggcctggaatccccacaagctcctcgcagcaggcctgcaatgctctgcacttcttctccaggatacctcgaacctgctcaagcgctgccatgggtcccaggccagctaccttttccagcaggacaagttctacgatgtggctctggacacgggagacaaggtggtgcagtgtggccgccgtgtggactgtctgaagctgtggctcatgtggaaggcacagggcgatcaagggctggagcggcgcatcgaccaggcctttgtccttgcccggtacctggtggaggaaatgaagaagcgggaagggtttgagctagtcatggagcctgagtttgtcaatgtgtgtttctggttcgtaccccccagcctgcgagggaagcaggagagtccagattaccacgaaaggctgtcaaaggtggcccccgtgctcaaggagcgcatggtgaaggagggctccatgatgattggctaccagccccacgggacccggggcaacttcttccgtgtggttgtggccaactctgcactgacctgtgctgatatggacttcctcctcaacgagctggagcggctaggccaggacctgtgagccttctctgtcttgctgccggccttgataccacccctcacccgcagagtcactgcattccctcccagcctttgaggccgggtgcagtggctcacgcctgtaatcccagcactttgggaggccgaggcgggtggatcacttgaggtcaggagttcgagaccagcctggccaataaggtgaaaccctgtctctactaaaaatacaaaaattagccgagcatggtggcctgtgcctgtaaacccagctactcaggaggttggggcagaattgcttgaacccagggggcagaggttgcagtgagccgagattgcacccctgcactccaggctgggcaacagtacgagactctgttcc

SEQ ID NO: 188796 - DNA, 2122 bp, Artificial Sequence
  derived and/or modified sequence
ccacggcttgcgagctactgaagcgctgccgtctgtacggacgacgctgcggtctttggggcttgctcctacctgccaggcgcggcctcccgctggctccctggccgcgcggcgcctcctccaggccccagcacaccctgccaaccccaccgccgcggctgcccccaccgggaccgagggtggctcacacctgtaatcccagcacgttgggaagccgaggagctacctgtgcaccctgcctccggctctcctgagcagagagatcctgatggctgactcagaagcactcccctcccttgctggggacccagtggctgtggaagccttgctccgggccgtgtttggggttgttgtggatgaggccattcagaaaggaaccagtgtctcccagaaggtctgtgagtggaaggagcctgaggagctgaagcagctgctggatttggagctgcggagccagggcgagtcacagaagcagatcctggagcggtgtcgggctgtgattcgctacagtgtcaagactggtcaccctcggttcttcaaccagctcttctctgggttggatccccatgctctggccgggcgcattatcactgagagcctcaacaccagccagtacacatatgaaatcgcccccgtgtttgtgctcatggaagaggaggtgctgaggaaactgcgggccctggtgggctggagctctggggacggaatcttctgccctggtggctccatctccaacatgtatgctgtaaatctggcccgctatcagcgctacccggattgcaagcagaggggcctccgcacactgccgcccctggccctattcacatcgaaggagtgtcactactccatccagaagggagctgcgtttctgggacttggcaccgacagtgtccgagtggtcaaggctgatgagagagggaaaatggtccccgaggatctggagaggcagattggtatggccgaggctgagggtgctgtgccgttcctggtcagtgccacctctggcaccactgtgctaggggcctttgaccccctggaggcaattgctgatgtgtgccagcgtcatgggctatggctgcatgtggatgctgcctggggtgggagcgtcctgctgtcacagacacacaggcatctcctggatgggatccagagggctgactctgtggcctggaatccccacaagctcctcgcagcaggcctgcaatgctctgcacttcttctccaggatacctcgaacctgctcaagcgctgccatgggtcccaggccagctaccttttccagcaggacaagttctacgatgtggctctggacacgggagacaaggtggtgcagtgtggccgccgtgtggactgtctgaagctgtggctcatgtggaaggcacagggcgatcaagggctggagcggcgcatcgaccaggcctttgtccttgcccggtacctggtggaggaaatgaagaagcgggaagggtttgagctagtcatggagcctgagtttgtcaatgtgtgtttctggttcgtaccccccagcctgcgagggaagcaggagagtccagattaccacgaaaggctgtcaaaggtggcccccgtgctcaaggagcgcatggtgaaggagggctccatgatgattggctaccagccccacgggacccggggcaacttcttccgtgtggttgtggccaactctgcactgacctgtgctgatatggacttcctcctcaacgagctggagcggctaggccaggacctgtgagccttctctgtcttgctgccggccttgataccacccctcacccgcagagtcactgcattccctcccagcctttgaggccgggtgcagtggctcacgcctgtaatcccagcactttgggaggccgaggcgggtggatcacttgaggtcaggagttcgagaccagcctggccaataaggtgaaaccctgtctctactaaaaatacaaaaattagccgagcatggtggcctgtgcctgtaaacccagctactcaggaggttggggcagaattgcttgaacccagggggcagaggttgcagtgagccgagattgcacccctgcactccaggctgggcaacagtacgagactctgttccaaaaaaaataaaaaagaa

SEQ ID NO: 188797 - DNA, 1178 bp, Artificial Sequence
  derived and/or modified sequence
gcactttacagaggcggcaagactagggtggaggaaagctcaagggccatcgctgggtgcttcggtggcgggcagaaacgggactggcagtgcccacacgtgtgcgttctccccgtccgcccgaaggagctacctgtgcaccctgcctccggctctcctgagcagagagatcctgatggctgactcagaagcactcccctcccttgctggggacccagtggctgtggaagccttgctccgggccgtgtttggggttgttgtggatgaggccattcagaaaggaaccagtgtctcccagaaggtctgtgagtggaaggagcctgaggagctgaagcagctgctggatttggagctgcggagccagggcgagtcacagaagcagatcctggagcggtgtcgggctgtgattcgctacagtgtcaagactggtcaccctcggttcttcaaccagctcttctctgggttggatccccatgctctggccgggcgcattatcactgagagcctcaacaccagccagtacacatatgaaatcgcccccgtgtttgtgctcatggaagaggaggtgctgaggaaactgcgggccctggtgggctggagctctggggacggaatcttctgccctggtttgtgagaaggaggaggacctttctttgccctttttatgagttcctcctcccccaccgttctcttgctctagtgtctggcagggagggatgattcctctttgattcctctccagctggacccaggccaggccagggaggcggctgcctggtcccttcatgctcatgtttgtcaccattccctggggtcagtggtctagttcctgctatctccggacgggggctgtctcttgggggcagccccagatgtggagaggtgtggtcaagaggatctgctgatcctggatccattctgggatggtatgatcctgagaattgtggcctgggagccagtcatacctgcttctttgatgagctcttctggtagaaagggaagggaggcaagctccagtcttgacccactgctccttcctcttgccaccgccccctccctgtgacaggtggctccatctccaacatgtatgctgtaaatctggcccgctatcagcgctacccggattgcaagcagaggggcctccgcacactgccgcccctggccctattcacatcgaa

SEQ ID NO: 188798 - DNA, 1563 bp, Artificial Sequence
  derived and/or modified sequence
atgtccattccgctgaaaagctcctttttgttgtcctacctttgcaccttacctccggctctgttgtctcgcgaaatcctgatggcagattccgaggcattaccaagcctagctggcgacccagtggcagtggaagcgctattacgcgccgtgtttggggtcgtagtggacgaagcaattcagaaggggacctccgtgtcccagaaagtttgcgaatggaaagagccagaagagctcaagcagctcctggatcttgagctgcgcagtcagggagagtcgcagaaacaaatcctcgagcgctgtcgagctgtgatcagatacagcgtgaaaacaggacatccacgattttttaatcagcttttcagtgggctagacccccacgctcttgccgggcgaatcattaccgagtccctcaacactagtcagtacacttacgaaatcgcgcctgttttcgtgttgatggaggaggaagtgcttaggaaactccgggctctcgtcgggtggtcttcaggcgacggaatcttttgtccaggcgggtctatcagcaatatgtatgccgtcaatttagcccgctatcagcggtaccccgactgtaaacagaggggcctgagaactttacccccacttgccctgttcactagcaaagagtgccactatagcattcagaaaggtgccgcttttctgggactaggaaccgactcggtgagggtggtgaaagcagacgagcgcggaaaaatggtacctgaggacctagagcgacagatcggcatggctgaagccgagggggcagttccattccttgttagcgccaccagtggtactaccgtcctcggcgccttcgaccctcttgaggctatcgcagacgtgtgccagagacacggcctttggctgcatgttgacgcggcatggggaggaagtgtgttactcagccaaacgcaccggcatctgctggacggaatacaacgcgccgacagtgtagcttggaatcctcataagcttcttgcggccggactacagtgttctgccctcctcctacaggatacaagcaatcttttgaaaaggtgccacggatctcaggctagctacttattccaacaggacaagttctatgatgtcgcactggacaccggggacaaagtcgtccagtgcgggcggcgcgtcgattgcctgaagctttggttaatgtggaaagcacagggcgatcagggtctagaacgcaggatagaccaagcctttgtgctggccagatatttggtagaggaaatgaagaaaagagaggggttcgagctggtgatggagccagagtttgtgaatgtttgcttttggttcgtgccacctagcctgcgcggcaaacaagaatcaccagactaccatgagcgactgagcaaagtcgctcctgttttgaaagaacgaatggtgaaagaaggtagcatgatgatcgggtaccagccacatggaaccagagggaattttttcagagtggtggtcgcgaattcggctttgacttgtgccgatatggatttcctccttaacgaattagagaggctgggacaggatttatag

SEQ ID NO: 188799 - DNA, 1749 bp, Artificial Sequence
  derived and/or modified sequence
cacggccttagggccactgaagcgctgccaagtgttcggaccacccttaggtctctgggactcgcccctacctgccaagcgaggccccccgccggctcactggcggcgaggaggctactccaggcgcccgcccacccagctaaccccactgctgctgccgcccccacggggaccgaggcgacatctcagatgtgggccacccactcaggtcggccaagatcctacttatgcaccctgcctcccgccctccttagcagggagatattgatggcagacagcgaggccctgcccagcctggctggcgatccagtagccgtcgaagcactgcttcgcgccgtgttcggcgtcgttgtcgatgaggccatacaaaaaggcacgtctgtgagccagaaggtctgcgaatggaaggagccagaagagcttaagcagttactcgatctggaactgaggtcccagggagaatcacagaaacagattttggaaagatgccgcgccgtcatacggtacagtgtgaaaaccgggcatccaagattctttaatcaactgttcagcggactggacccacatgcactcgccggccgtatcattacagagtctttgaatacctcacagtatacctatgagatcgctcccgtgtttgtactgatggaagaggaagtcttgcgcaagttgcgggccctggttggatggtcttccggggacggtattttctgcccaggaggctccatttcaaacatgtatgctgtaaatctggctcgatatcagcgttatcccgattgcaaacaacgcggcctgcgcacattaccccccctggcgctgttcactagtaaagagtgccattattccattcaaaagggagccgcatttctgggcttgggtaccgactcagttagggtcgttaaagcagacgaacggggcaagatggtaccagaagacctggagcggcagatcggaatggctgaagctgagggcgccgtgcccttcttagtgtcagctacttcaggtactacagtgctgggagcttttgatccgctagaggccattgctgatgtctgtcaacgccatgggctttggctgcacgttgatgccgcctggggtggttctgtcctgctgagccagacccatcgtcacctgttggatgggatacagcgggcagacagcgtggcctggaatccccacaaactgctggcagctggactacagtgcagtgcactgttattgcaagatacctctaatctactgaaaaggtgccatggcagtcaggccagctatctgtttcaacaggacaaattttatgatgtggccctggacaccggcgataaggtcgtgcagtgtggcagaagggtggattgcttgaaattgtggttgatgtggaaagcccagggtgaccaagggctggagaggcggattgaccaggcctttgtcttggctcgctatctggtggaggaaatgaagaagagagaaggctttgagctggtaatggagcctgagttcgtgaatgtgtgtttctggtttgtgcctcccagtctgagagggaagcaggaatctcctgactaccatgaaaggcttagtaaagtggcacctgtgttgaaagagcgcatggttaaggaggggagtatgatgattggataccagccacatgggactagaggaaattttttccgagtcgtcgtcgcaaattctgctctgacatgtgcagacatggattttctgttaaacgagttagaaagactcggacaagacctctag

SEQ ID NO: 188800 - DNA, 1563 bp, Artificial Sequence
  derived and/or modified sequence
atgagcatccccctgaagagcagcttcctgctgagctacctgtgcaccctgcccccagccctgctgagccgggagatcctgatggctgacagcgaggccctgcccagcctggccggggaccctgtggccgtggaggccctgctgcgggctgtgtttggagtggtggtggatgaggccatccagaagggcacctctgtgtcccagaaggtgtgtgagtggaaggagcctgaggagctgaagcagctgctggacctggagctgcggagccagggcgagagccagaagcagatcctggagcgctgcagagctgtgatccgctacagcgtgaagacaggccacccccgcttcttcaaccagctgttcagcggcctggacccccacgccctggccggccgcatcatcacagagagcctgaacaccagccagtacacctatgaaattgcccctgtgtttgtgctgatggaggaggaggtgctgaggaagctgcgggccctggtgggctggagcagtggagatggcatcttctgccctgggggcagcatcagcaacatgtatgctgtgaacctggcccgctaccagcgctacccagactgcaagcagaggggcctgcggaccctgccccccctggccctcttcaccagcaaggagtgccactacagcatccagaagggagctgccttcctgggcctgggcacagacagcgtgcgggtggtgaaggcagatgagcggggcaagatggtgcctgaggacctggagcggcagatcggcatggccgaggccgagggcgctgtgcccttcctggtgtctgccaccagcggcaccaccgtgctgggcgcctttgaccccctggaggccatcgcagatgtgtgccagagacatggcctgtggctgcacgtggatgctgcctggggcggctctgtgctgctgagccagacccaccgccacctgctggatggcatccagagagctgacagcgtggcctggaacccccacaagctgctggccgccggcctgcagtgcagcgccctgctgctgcaggacaccagcaacctgctgaagcgctgccacggcagccaggccagctacctgttccagcaggacaagttctatgatgtggccctggacaccggggacaaggtggtgcagtgtggcagaagagtggactgcctgaagctgtggctgatgtggaaggcccagggcgaccagggcctggagaggagaattgaccaggcctttgtgctggcccgctacctggtggaggagatgaagaagcgggagggctttgagctggtgatggagcctgagtttgtgaatgtgtgcttctggtttgtgccccccagcctgcggggcaagcaggagagcccagactaccacgagcggctgagcaaggtggcccctgtgctgaaggagaggatggtgaaggagggctccatgatgattggctaccagccccacggcacccggggcaacttcttccgggtggtggtggccaacagcgccctgacctgtgccgacatggacttcctgctgaatgagctggagcggctgggccaggacctgtag

SEQ ID NO: 188801 - DNA, 1749 bp, Artificial Sequence
  derived and/or modified sequence
catggcctgcgggccacagaggccctgcccagcgtgaggaccaccctgcggagcctgggcctggcccccacctgccaggcccggcccccagctggcagcctggccgcccggcggctgctgcaggccccagcccacccagccaaccccacagctgctgctgcccccaccggcacagaggccaccagccagatgtgggccacccacagcggccggcccaggagctacctgtgcaccctgcccccagccctgctgagccgggagatcctgatggctgacagcgaggccctgcccagcctggccggggaccctgtggccgtggaggccctgctgcgggctgtgtttggagtggtggtggatgaggccatccagaagggcacctctgtgtcccagaaggtgtgtgagtggaaggagcctgaggagctgaagcagctgctggacctggagctgcggagccagggcgagagccagaagcagatcctggagcgctgcagagctgtgatccgctacagcgtgaagacaggccacccccgcttcttcaaccagctgttcagcggcctggacccccacgccctggccggccgcatcatcacagagagcctgaacaccagccagtacacctatgaaattgcccctgtgtttgtgctgatggaggaggaggtgctgaggaagctgcgggccctggtgggctggagcagtggagatggcatcttctgccctgggggcagcatcagcaacatgtatgctgtgaacctggcccgctaccagcgctacccagactgcaagcagaggggcctgcggaccctgccccccctggccctcttcaccagcaaggagtgccactacagcatccagaagggagctgccttcctgggcctgggcacagacagcgtgcgggtggtgaaggcagatgagcggggcaagatggtgcctgaggacctggagcggcagatcggcatggccgaggccgagggcgctgtgcccttcctggtgtctgccaccagcggcaccaccgtgctgggcgcctttgaccccctggaggccatcgcagatgtgtgccagagacatggcctgtggctgcacgtggatgctgcctggggcggctctgtgctgctgagccagacccaccgccacctgctggatggcatccagagagctgacagcgtggcctggaacccccacaagctgctggccgccggcctgcagtgcagcgccctgctgctgcaggacaccagcaacctgctgaagcgctgccacggcagccaggccagctacctgttccagcaggacaagttctatgatgtggccctggacaccggggacaaggtggtgcagtgtggcagaagagtggactgcctgaagctgtggctgatgtggaaggcccagggcgaccagggcctggagaggagaattgaccaggcctttgtgctggcccgctacctggtggaggagatgaagaagcgggagggctttgagctggtgatggagcctgagtttgtgaatgtgtgcttctggtttgtgccccccagcctgcggggcaagcaggagagcccagactaccacgagcggctgagcaaggtggcccctgtgctgaaggagaggatggtgaaggagggctccatgatgattggctaccagccccacggcacccggggcaacttcttccgggtggtggtggccaacagcgccctgacctgtgccgacatggacttcctgctgaatgagctggagcggctgggccaggacctgtag

SEQ ID NO: 188802 - DNA, 1563 bp, Artificial Sequence
  derived and/or modified sequence
atgagcatccccctgaagagcagcttcctgctgagctacctgtgcacgctaccgcctgctttgctgtctagggagattcttatggccgattccgaggccttgccaagtcttgctggcgatcctgttgctgtagaggcccttctgcgggccgtttttggagttgtggtggacgaagctatccaaaagggcaccagcgtgtcacagaaggtgtgtgagtggaaggaaccagaagagctgaagcagctgctcgacctggagctgaggtctcaaggcgagagccagaagcaaatacttgagagatgccgggcagtgatcagatacagtgtgaagacagggcaccccagattctttaaccagctgttcagtggactggaccctcacgcgctggctggacggattatcacagaatcactgaacacctcacaatacacatacgagatcgctcctgtattcgtgctgatggaggaagaggtgctgaggaaattgagagctctcgttggctggagcagcggagatgggatcttttgtccgggcggtagcatttctaatatgtacgccgtgaacctggcaagatatcaaaggtaccctgactgcaagcaaagagggctccgcacgctccccccattagcccttttcacaagcaaggaatgccactactctatacagaaaggcgctgcgttcctaggactgggcactgactcggttcgggtggtgaaggccgatgaaagggggaagatggtgccagaggatttagaaagacaaattgggatggcagaggctgaaggtgctgtgccattcctggtctctgctacgtctggcaccacagtactgggtgccttcgacccattggaggcaattgctgacgtttgtcagcgacatggactctggctacacgtagacgcggcctgggggggaagcgtcttgctgtctcagacacacagacaccttttagacggcattcagagggctgactccgtggcctggaacccgcacaagctgttagccgccgggctccagtgctctgccctgctgttgcaggatacctcaaatctgctcaaaagatgtcatggatcacaggccagctacctttttcagcaagataaattttatgacgttgcactcgacaccggggacaaagttgtacagtgcggtcggagggttgactgcctgaagctgtggctcatgtggaaggcccaaggcgatcagggacttgaacgccggatagaccaagcctttgtgttggcgcggtacctggtcgaggaaatgaagaaaagagaggggtttgagctggtgatggaacccgagttcgttaacgtctgcttttggtttgtccccccctcactgcggggtaaacaggaaagtccagattatcacgagcggctgtcaaaggtggcaccggttctcaaagagcgaatggtgaaggaagggtccatgatgataggataccagccccatggaacgcgcggaaactttttcagagttgtagtggcaaactccgccctgacctgtgctgacatggatttcctgcttaatgaactggagcggttgggccaggacctgtag

SEQ ID NO: 188803 - DNA, 1749 bp, Artificial Sequence
  derived and/or modified sequence
cacggcctgcgggccaccgaggccctgcccagcgtgcggaccaccctgcggtcccttggtctcgctcccacctgccaggcccgccctcccgctggctccctggccgcaaggaggctgttgcaggcaccggcccacccagcgaaccctaccgccgccgccgcccccactgggaccgaagccactagtcagatgtgggcgacacactcgggaaggccgcgcagctacctgtgcactctgccgccagcccttctctcccgagagattctgatggccgactctgaagctctaccctcactggctggtgatccagtcgctgtggaagccctgctgcgggccgtgtttggggtggtggttgacgaggcaatacagaaaggaactagcgtctcacagaaggtgtgcgagtggaaggaacctgaagagttgaagcaactgctggacctggagctgcgcagccagggagagtcccagaagcagattttggagcgctgtcgggctgttatccggtactcagtcaaaaccggacaccctagattttttaatcagctcttctctggcttggatccacatgccctcgcagggcgcatcattactgaatctctgaatacctcacagtatacctacgaaattgcaccagtatttgtactgatggaggaggaagtgctccgcaaactacgagctctcgttggctggagcagtggggacggtatcttttgccccggcggctctatctctaacatgtatgctgtcaatcttgctagataccagcgctaccctgattgtaaacagcgggggctcagaaccctcccgccgctcgccctcttcacttccaaagaatgtcactattccatccagaagggggcagcgttcctgggattaggcactgactccgtgcgcgttgtgaaagctgacgaacgtggtaagatggtgcctgaggacttggagcggcagataggtatggccgaagccgaaggggcagttcccttcctcgtatcggcaacatcaggaacaactgtgctgggcgcctttgacccgctggaggctatagccgacgtttgtcagagacacgggctctggcttcatgtggatgcagcctggggggggtcagttctgcttagccagactcatcgacacctgcttgacggaatccagcgggctgattctgttgcttggaatccacacaaactgctggctgccggcttgcagtgcagcgccttgctgctgcaagacacatccaacttactgaaaaggtgccacggctcccaggcctcctacttgttccagcaggataaattctatgatgtcgctcttgacaccggtgataaagtggtgcaatgtgggaggcgagtggactgtctgaaactctggctgatgtggaaagcccaaggagatcagggtttagagcgtcggattgatcaggccttcgtactggctagatatttggtagaggagatgaagaagcgggaaggctttgagttggtcatggagcccgagttcgtgaacgtgtgcttttggttcgtcccaccttctctgcggggtaagcaagagagtcctgactaccatgagcgcttatctaaggtggcccccgtcctaaaggaacgtatggttaaggaaggaagcatgatgattgggtaccagccgcatgggacaagagggaacttcttcagggtggtggtcgctaacagcgctttgacatgtgcggatatggactttctgctgaacgagttggagcgtttgggacaagacctgtag

SEQ ID NO: 188804 - DNA, 1563 bp, Artificial Sequence
  derived and/or modified sequence
atgtctataccactgaagtcgtcattcctgctgtcctacctgtgcactctgccccctgccttactgtcacgagaaatcctgatggcagacagtgaggcactcccgtcccttgccggagatcccgtggccgttgaggccctcttgcgggctgtcttcggcgttgtggtggacgaagccattcagaaggggacctcagtatcccaaaaggtctgtgagtggaaagaaccagaagaactgaagcaactcctggatctggagctccggtctcagggcgaaagccagaagcagattctggagcgatgtagggccgtcatcagatacagtgtgaagaccggccacccaaggttttttaaccagctgttttcagggttagatccacacgctctggcgggtagaatcattacagaatcacttaatacatctcagtacacttatgagatcgcaccagtatttgtgctgatggaggaggaagtgctgaggaaactgagggcactggtcggctggagcagcggcgacgggattttctgccccggtggcagcatttcaaatatgtatgcagtgaatctcgcccgataccaaaggtaccccgactgcaagcaacgtggccttaggactctgcctcccctggccctgttcacaagtaaggagtgtcattattcgattcaaaagggagcggcttttctggggctcgggacagattcagtgagggtcgtcaaggcagacgagagagggaagatggtcccagaggacctcgagcgacaaattggaatggccgaagcggagggagccgttcctttcctggttagcgcaacctcgggtacaactgtgctaggcgcattcgatccactggaagcaattgccgatgtgtgccagagacatgggctgtggctccacgtggacgctgcctgggggggttctgttcttctgagccaaacacataggcacctgttagatggaatccagcgagctgactctgtcgcttggaacccacacaagctattggctgccggactgcagtgctccgcattactgcttcaggataccagtaacttgttgaagagatgtcacggtagccaggcgtcctacctgtttcaacaggacaagttttatgacgttgctctcgacaccggtgacaaggttgtgcagtgcggcaggagagtagactgcttgaagctctggctgatgtggaaagctcagggcgatcagggacttgaaagacggatcgaccaggcctttgtgctggctaggtatctggtggaggaaatgaagaaaagggagggatttgagctcgtgatggagccggaattcgtgaacgtttgcttctggttcgtgcccccaagcctgcgcggaaaacaagaatcccctgactatcacgaaaggttatcaaaggtggcaccagttctgaaggagcgcatggtgaaggagggttcaatgatgatcggataccaacctcatggaactcggggaaacttctttcgggttgtggtggccaacagcgctctaacctgcgctgatatggattttctgctgaacgaattagaaaggttgggccaggatctctag

SEQ ID NO: 188805 - DNA, 1749 bp, Artificial Sequence
  derived and/or modified sequence
cacggtttaagggcgacagaggcgctgccttctgtgcggacaacgctcaggagtctcgggctcgccccaacctgccaggccagacctcctgccggaagcttagccgctcgcaggctgctccaggcccctgcgcacccagctaatcctacagccgcagccgctccaacgggcactgaggccacctcacaaatgtgggccacgcatagcggcagaccaagatcatatctatgtacattaccgcctgctctgctttcaagagagatcctgatggcggattctgaggcgctgccttctctggcgggtgaccccgttgccgtcgaggcactcttgagggctgtgttcggggtcgtggtggacgaagcgatacagaaagggacgagcgtgtctcagaaggtttgcgaatggaaagagcctgaagagctcaaacagcttttggacctggaactcaggtcgcagggagaatcccagaagcagatccttgaacggtgccgcgctgttatcaggtactctgtaaaaactggacacccacgctttttcaatcagttgtttagtggtctagacccacacgccctggcaggtcggatcataactgaatctctaaacactagtcagtacacctacgagattgctcccgtatttgtacttatggaggaggaagtcctgcggaaacttagagcgcttgttggttggtcctctggtgatggtatcttttgtcccggaggatccatatcaaatatgtacgctgtcaacctggcccgatatcagcggtacccagactgtaagcagcggggtcttaggactctcccgccattggctttattcacctccaaagagtgccactattccatccaaaagggggctgcattcctgggcctaggaaccgactctgtccgcgtggttaaagctgatgagcgcggtaaaatggttcccgaagatcttgaaaggcaaatcggcatggctgaggcagagggggcagtgccattcctcgtcagtgctaccagcgggacaaccgtgctgggggcattcgatcccctggaagccattgccgacgtctgtcaacgtcacggtctgtggctgcatgtcgatgcagcgtggggtggcagcgtcttactttcccagactcacaggcatctcctggatggtatacagcgcgctgacagcgtggcatggaatccccacaaactactcgcggctggcttacaatgttctgccttgctcctgcaagacacgagtaaccttttgaagagatgtcatggaagccaggcctcttatctctttcagcaagacaagttttatgatgttgcgctggatacaggagacaaggtagtgcagtgtggacgcagagtggactgtctgaagctgtggttaatgtggaaggctcagggtgaccagggtttggaacgcagaattgatcaagcatttgtgctcgctaggtatttggtggaggagatgaaaaagcgtgaaggtttcgaactagtaatggagcctgaattcgtgaatgtgtgcttctggtttgttcctccaagcttaaggggaaaacaggaatcccccgattaccacgagcgcctttctaaagtggcccctgttctcaaggaacgaatggtcaaggaagggtccatgatgatcggctatcagcctcacggtacacgtggcaatttttttcgggtggttgtcgcaaattccgcactcacttgcgccgacatggattttctgttgaatgaacttgaacgcctcggacaggacttgtag

SEQ ID NO: 188806 - protein, 757 aa, Artificial Sequence
  derived and/or modified sequence
MNVIYFPLHIFVVYSRAYTSLVLVGCTNLCAVLFARCLDDHLVSLRMSGSRKEFDVKQILKIRWRWFGHQASSPNSTVDSQQGEFWNRGQTGANGGRKFLDPCSLQLPLASIGYRRSSQLDFQNSPSWPMASTSEVPAFEFTAEDCGGAHWLDRPEVDDGTSEEENESDSSSCRTSNSSQTLSSCHTMEPCTSDEFFQALNHAEQTFKKMENYLRHKQLCDVILVAGDRRIPAHRLVLSSVSDYFAAMFTNDVREARQEEIKMEGVEPNSLWSLIQYAYTGRLELKEDNIECLLSTACLLQLSQVVEACCKFLMKQLHPSNCLGIRSFADAQGCTDLHKVAHNYTMEHFMEVIRNQEFVLLPASEIAKLLASDDMNIPNEETILNALLTWVRHDLEQRRKDLSKLLAYIRLPLLAPQFLADMENNVLFRDDIECQKLIMEAMKYHLLPERRPMLQSPRTKPRKSTVGTLFAVGGMDSTKGATSIEKYDLRTNMWTPVANMNGRRLQFGVAVLDDKLYVVGGRDGLKTLNTVECYNPKTKTWSVMPPMSTHRHGLGVAVLEGPMYAVGGHDGWSYLNTVERWDPQARQWNFVATMSTPRSTVGVAVLSGKLYAVGGRDGSSCLKSVECFDPHTNKWTLCAQMSKRRGGVGVTTWNGLLYAIGGHDAPASNLTSRLSDCVERYDPKTDMWTAVASMSISRDAVGVCLLGDKLYAVGGYDGQAYLNTVEAYDPQTNEWTQVWHSCFIITLTLFLLKQFLW

SEQ ID NO: 188807 - protein, 755 aa, Artificial Sequence
  derived and/or modified sequence
MNVIYFPLHIFVVYSRAYTSLVLVGCTNLCAVLFARCLDDHLVSLRMSGSRKEFDVKQILKIRWRWFGHQASSPNSTVDSQQGEFWNRGQTGANGGRKFLDPCSLQLPLASIGYRRSSQLDFQNSPSWPMASTSEVPAFEFTAEDCGGAHWLDRPEVDDGTSEEENESDSSSCRTSNSSQTLSSCHTMEPCTSDEFFQALNHAEQTFKKMENYLRHKQLCDVILVAGDRRIPAHRLVLSSVSDYFAAMFTNDVREARQEEIKMEGVEPNSLWSLIQYAYTGRLELKEDNIECLLSTACLLQLSQVVEACCKFLMKQLHPSNCLGIRSFADAQGCTDLHKVAHNYTMEHFMEVIRNQEFVLLPASEIAKLLASDDMNIPNEETILNALLTWVRHDLEQRRKDLSKLLAYIRLPLLAPQFLADMENNVLFRDDIECQKLIMEAMKYHLLPERRPMLQSPRTKPRKSTVGTLFAVGGMDSTKGATSIEKYDLRTNMWTPVANMNGRRLQFGVAVLDDKLYVVGGRDGLKTLNTVECYNPKTKTWSVMPPMSTHRHGLGVAVLEGPMYAVGGHDGWSYLNTVERWDPQARQWNFVATMSTPRSTVGVAVLSGKLYAVGGRDGSSCLKSVECFDPHTNKWTLCAQMSKRRGGVGVTTWNGLLYAIGGHDAPASNLTSRLSDCVERYDPKTDMWTAVASMSISRDAVGVCLLGDKLYAVGGYDGQAYLNTVEAYDPQTNEWTQVAPLCLGRAGACVVTVKL

SEQ ID NO: 188808 - protein, 349 aa, Artificial Sequence
  derived and/or modified sequence
KKHPSTVMVPQFLADMENNVLFRDDIECQKLIMEAMKYHLLPERRPMLQSPRTKPRKSTVGTLFAVGGMDSTKGATSIEKYDLRTNMWTPVANMNGRRLQFGVAVLDDKLYVVGGRDGLKTLNTVECYNPKTKTWSVMPPMSTHRHGLGVAVLEGPMYAVGGHDGWSYLNTVERWDPQARQWNFVATMSTPRSTVGVAVLSGKLYAVGGRDGSSCLKSVECFDPHTNKWTLCAQMSKRRGGVGVTTWNGLLYAIGGHDAPASNLTSRLSDCVERYDPKTDMWTAVASMSISRDAVGVCLLGDKLYAVGGYDGQAYLNTVEAYDPQTNEWTQVAPLCLGRAGACVVTVKL

SEQ ID NO: 188809 - DNA, 7728 bp, Artificial Sequence
  derived and/or modified sequence
actgcaacggggatagtgttttctgtctctgtcatttgtggtttaagaaaaagggggtggtgttctgcatttgaaaggactttaatgaatgctgtcagtgtttgtgagacctaatggtcagtatgggaaaggagagccgggaaagtggtctagctgcttcaggataggtggatgagagtttgctctgattgaacggaatgttccaccgtgtttcatctttattcattatcctttgttctttaaaatctgatatattggcataaaagtaattgtagatatatatatgaatgtgatttattttcctttacatatttttgttgtgtacagcagggcatatacttctcttgtcttggttggatgcacaaatctgtgtgcagtgctttttgcccgttgcctagacgatcacttggtttctctgaggatgtctggttctcgtaaagagtttgatgtgaaacagattttgaaaatcagatggaggtggtttggtcatcaagcatcatctcctaattctacagttgacagccagcagggagaattttggaaccgaggacagactggagcaaacggtgggagaaagtttttagatccatgtagcctacaattgcctttggcttcaattggttaccgaaggtccagccaactggattttcagaattcaccttcttggccaatggcatccacctctgaagtccctgcatttgagtttacagcagaagattgtggcggtgcacattggctggatagaccagaagtggatgatggcactagtgaagaagaaaatgaatctgattccagttcatgcaggacttccaatagtagtcagacattatcatcctgtcatactatggagccatgtacatcagatgaatttttccaagcccttaatcatgccgagcaaacatttaaaaaaatggaaaactatttgagacataaacagttgtgtgatgtaattttagtcgctggtgatcgcagaattccagctcacagattggtgctctcctctgtctcagactattttgctgccatgtttactaatgatgtcagagaggcaagacaagaagaaataaaaatggaaggtgtagaaccaaattcgttgtggtccttgatccagtatgcttatacaggccgccttgaattaaaagaagataatattgagtgcctgttatctacagcttgccttcttcagctttcacaggttgtagaagcatgctgtaagtttttaatgaaacagcttcatccatccaactgtcttggaattcgttcttttgctgatgcccaaggttgtacagatttgcataaagtggctcacaattatactatggagcatttcatggaagtaatcagaaaccaggaatttgtattattaccagccagcgaaattgcaaagctcttggctagtgatgacatgaacattcctaatgaggagacaatattgaatgcacttcttacttgggtccgtcatgatttggaacagagacggaaagatctaagtaaacttttggcttatattaggctacctcttcttgcaccacagttcctggcagacatggaaaataatgtactttttcgggatgatatagaatgtcagaaactcattatggaagcaatgaagtaccatttattaccagagagacgacccatgttacaaagtcctcggacaaaacctaggaagtcaactgttggtacattatttgcagttgggggaatggattcaacaaaaggagcaacaagcattgaaaagtatgatctccgtacaaatatgtggactccagtagcaaatatgaatgggaggaggctacagttcggtgttgcagtgctagatgacaaactgtatgtggttggaggaagagatggactgaagactttgaatactgtagagtgctacaaccccaaaacaaaaacttggagtgtgatgccacctatgtccacacatagacatggccttggtgtggctgtactggaaggtcccatgtatgccgtaggaggacatgatggctggagctatctgaacacagtggaaagatgggaccctcaggctcgccagtggaattttgttgccactatgtctacccctaggagtacagtaggtgtggcagtactaagtggaaaactttatgcagttggtggtcgtgatggaagttcttgtctcaaatcagtagaatgttttgatcctcatactaataagtggacactgtgtgcacagatgtcaaaaaggagaggtggcgtaggagtgacgacctggaatggactgctgtatgctataggggggcacgatgctcccgcatccaacttgacttccagactctcagactgtgtggaaagatatgatcccaaaacagacatgtggactgcagtagcatccatgagcatcagcagagatgcagtgggggtctgtttacttggtgataagttatatgctgttggggggtatgatggacaggcataccttaatactgtggaggcttatgatccccagacaaatgagtggacccaggttgctccactgtgcctaggaagagctggagcttgtgttgtgactgtaaaattataatttagtgccccgttttctacatgaagacaccgtcttcctttattaatttagtataattattctatcaatggatacatttttagtaaatgtgcattgtcacaatcctgggcacaaagtgcctgatgtcaaaatgaagatagtaaaacaagggaggaagcagtggatggaccaggattaattcctttcatttcttagtaaattaaaacctgcagctggtggattgtgatcacacattcccgaagtaataagtgaggacgaatgcactgctctggaacataacccagtgctaactgggggtttcatttattcagtcaagcacatcttactcacatccagatttattttcctacagtgcaaacacaccagatgaaactttaaaatgttactttttgtaagcttatcataaatgagttgcagtaatttgtttgcttgtttgtttaaccacaaccactattttaatgatatactaaagataacactatttagttttttcagaaacatctgcattatatgtgtgttggttgtggattttgtttctaaaattggcttagtccaataaataaagaaaagcattaaggacttaaagcaacaataaccaaataaaaacttgataggatctttgaagtctatttaaatattcattccattacatctagactcaccaagaactacatgttatgatgttaagttgaagttgaaacatgatgttttgcattaaatttaagatatgcaaatttatgtagagaaaataaatgttatataccctataatctttcacctaattagtatttaattatatggatttgttttatattataaaagatgttttgattttgtcttttgatattgacaaaattgtttggatatccttatgttctcaagtctgtatctgcctcccctgccttatttcttatgttttgccacagttaacccattgtgcttctttgtaatcaaacagtttgtgggagaatgggcttattgaatgtctaaaaaataagtttaaagtgtttgttaccctaagttttttacatttttaaactctaattacatatgtgaatgttattactctcagtgaattgttattgtttgcaaaaatgcactgggcagtaacattttgtgataaatcctataagatataagtcattgagatgtctaagatgctttttattttaaccccagttaataaccaccttacggaaaataatatttgctaatattgtttattgtgaactaggaatcaaagtttttgtatgcatcaatgcacttaatccttataacaaccttatgaggtagttctattccctttttatagctaaggaaattggggtacagagaagttagccccaaggttatatattgcaagtaagtggcagagcagggattcatacaaagaccttctcactcagcagtcttcactcttactattcctgccactaggtagaaaaagaaagatttcggccgggcacagtggctcacgcctataattcccagcactttgggaggctgaggtgggcggatcacgaggtcaggagatggagaccatcctggctaacacagtgaaaccccgtctctactaaaaataaaaaataaaaaaaaattagccaggcgtggtggcgggtgcctgtacgcccagctactcgggaggctgaggcgggagaatggcgtgaacccaggaggaggagcttgcagtgtgccaagatcgcaccactgcactccagcctgggtgacagagcgagactccatcaaaaaaaaataaataaaaaaaaaataaaagatttcattttatgtgaggaattattttaataaaaaaaagagggtttatgctctatagtaataaaatttaccagtaacacccaatcagaaaattttggttccttagtatttagggaagacttttgtttaaatctcttatggaattttacatgttttgatttagaaaagtagatgcaatataatatatttcaagttttatacatattagatgaattgcatggtattttaggcaacttaactataaacaaatttattcatagaagcattgttgccaacaatttagatgacctcgatgaaaaaacacaccaattgacaaaactggctcaaaaggaaataaaaaatccaaacagacctgtaacaagtaaagagattgaaccagtaatcaaaaatctcccaacaaagaaagtccaggactaaatgagtttactggcaaactatgccaaacatataaagaagaattaacactaatccttctcgaactctcccaaaaaatggaagagaaaggagcaccctgtgacattctataaggcggacattaccttaacaccaaagccagacaaagacctcacagggaagctacagaccaatatcccttatgaatatagatgcaaaaaaacttcaaaatactagcaggccaaatccagcagcttattaaaatgatcacacagcatgaccaagtgagatttatcaaagaaatgcagggatggttctacatacaaatgtcaatcgatgtaataatataccatattaatagaatgaaggggaaaaaacagcatgatcacctcaattgataagaaaaagcatttgacaaaaatccaacaccctttcatggtaaaaacactctgcaaactaggaagaaaagggaactttcttaacctgataaagacatccataaaaacccacagctaacaacataatagcaaaacattgaaaatttttcccctaatatcatgaaaattcctgatttccccactgctattcaacattatactagaaggtctagccagagcaattaggcaagaaaaagaaataaaatgaatcccaaataggaagaagtaaaactacatttgcagaaaacatggtcctatatattaaaaatcctaaagaatccacaaaatgattccggctgattttaaaaattcagcaatgttgcaggttgcaagatcaacacacaaaagtctaagaaaaacctgaggggaaattaaaacaatttcatttacaataacatgaaaaagaataaaatacttagaaataaatttgaccaagaaagtgcaagacttggacactgaaaagtacaaaacgttgctgaaagaaattaaagaagacctaaataaatggaagacatcctgtgctggcaggttggaagacttaacattgttaagatggcattactcccaaaattagtctatagatttaatacaatccccattaaaattccagtgacccttttacagaaactgaaaagctgaccctagaatttatatgggattgcaagttactgaaggtactcaagtctgttcaaaacaatcttgaacaagaataaagttgaaggactcacattttccaatttcaaaatttactgcaaagctacttcaatcaaaacagtgttgtgctggtataaaaatatataaagcaatagagtagaatggaaagtccagaaacaaattacgccaatacactatggtcaattgatttttgacaagggttccaggaccattcaatgaagaaagaacagtgtcttcaactaatagtgctaagacaagtgaatattcacatgcaaaagaatgaatttgtacctgtacttcataccatatataaaaattaattcaaaatagatcaaagacctaaatgtaagagctaaaaccataaaactttgagaagaaaatacaggaataaatcttcatgaccttggatttggcaatggtttcttagatatggcaccaaaagcacaagcaacaacagcaaaaaaaaaaaaaaaaaaaaaaaatcaaaattaaaagcttctacatatcaagggacactatgaagaaagtgaaaagacaacccacagaatgggagaaaatatttgtaaatcttacatatctggtaaggaactaatacctagaatatataaggaactccgatgctcgacaacaaaaagacaaaccaattttaaaatgggcaaaggacttaaatagacatttctctaatgaagatatacaaatggccgacaagcacatggaaagcactcaacctcatcagtcattatgcaaatcagcgccacaagaagataccacttcacacctattagaatgacgaaatagacctaggatctaaacctacaggaaaaaaaatgaataatagagaaaataaatgttagagaggatgtggagaaattgaaaaccttcattcgttgttggtgggaatgttaaatggtgtagccactgtggaaaacagtttggcagttcctcaataagttaaaaaaaagaattaccatatgacccagcaagtccactcctgggcatatactgaaaagaactgaaaacaggtgttcaagcaaaaactttcacgcaaatattcattgcagcactagtcacagtagccaaaaaagaggaaacaacccaaatggccatcagctgatgaatgaataaacaaattgtggtatctccacacggcacaatagaatattcagccataaagagaaatgagggactgatacatgctaaagcatggatgagccttgagcgcatttttgccaagtgaaagaaggcagacacaaaaggcaacgtattgcatgagtgcatttatatgaaatatccaaaataggcaaatccatggagacagaaagcagataaatggttgtaagaagctgagagaaaggagtggggagagattgctaaaaaggagtttccttctagggtgatgaaaatgttctggaactacttattggggatgattgcacaacatggtgaaggtactcaatgtcactaatggtaaatttcacatacactttaccataatttttaaaaagctttattagctacattatgttatgatacttaaatgtcataacaatagcattctgtacgcttcactaggataaaaacttcggatttatatgcatctggaagagaaatttttcactgtaatttgcaaataaatgaatttctaaaaatctaacagaaaggctcttaaatcttaatttcaacctaagaagggagtgagaaacaacgagaaccatgaggggagagttaacggggaacttccccaccgtccggtacatggcaggcattccacaaatgttttctgaaagttgaaatagacatcttttcatgaactctgtaatatttgaaattattgataactcttacacaaaaacaaatattcaataaaatgatatttaatttcactgtgaaaaaaaaaaa

SEQ ID NO: 188810 - DNA, 2274 bp, Artificial Sequence
  derived and/or modified sequence
atgaacgtgatctattttccgctgcacattttcgtggtgtactctcgagcgtatacgagtctggtgctcgtgggctgtactaacctttgcgccgtactgttcgctagatgcctggacgatcatttagttagtctccgtatgagcggtagccgcaaggaattcgatgtaaaacagattctgaaaatcagatggcgttggttcggacaccaggccagttcaccaaattctaccgtggattctcagcaaggggagttctggaacaggggacagaccggggccaacggaggacgtaaattcctagacccctgctccttgcagctgccgctggcctcgatagggtatcggaggtcttctcaactggattttcaaaacagtccttcatggccaatggcgagcacgagtgaagttccagcctttgagttcactgccgaggactgtggcggagcgcactggctggaccggcccgaggtggatgacggtacaagcgaggaggaaaacgaatccgactctagttcctgtcgaacctcaaactcctcgcagacacttagctcatgtcataccatggagccatgcacttcagatgagttcttccaagctctcaaccacgccgagcagactttcaagaagatggaaaattatttgagacataagcaactttgtgatgtaatcctcgtcgccggagacagacgcatcccagctcaccggttggtgctctcaagtgtctccgactacttcgctgccatgtttactaacgacgttcgcgaagcgagacaggaggaaattaaaatggagggcgtcgagcccaacagtttgtggtccctgattcagtatgcctacacaggccgtctcgagctgaaggaggacaatattgagtgtctgctgtccacagcctgtctgctccagctatcacaggttgtcgaggcttgttgcaagttccttatgaaacagctgcatcctagcaactgcttaggcattcggtctttcgctgacgcccagggatgcaccgacctgcacaaggttgcacacaactacacaatggagcattttatggaggtaattaggaatcaggaatttgtgctgcttccggcttccgaaattgcaaagctcctcgcctcagacgatatgaatattccaaacgaagaaacgatcttgaatgcactcctcacctgggtaagacatgacctggaacagcgtcgtaaagacctcagcaaactactggcctacatccggcttcccttactggcaccacaattcctggccgacatggagaataacgtactgttccgcgatgatatcgaatgccagaagctaattatggaggctatgaagtatcatctgctccccgagcgcagacctatgctgcaatcccctcggaccaaacccagaaagtctaccgtgggaaccctcttcgccgttggaggcatggacagcactaaaggcgccacaagtattgagaaatacgatctgaggaccaacatgtggacacccgttgcgaacatgaatgggcgtcggctgcagttcggtgtggcagtattggacgacaaactgtatgttgtaggaggccgtgatggcctgaagactttaaacacagtagagtgttataatccgaagacaaagacatggtccgtaatgcccccaatgagtactcaccgacacggtctgggagtcgccgtgctggaaggacctatgtacgcagtggggggacatgacggctggtcatacctgaataccgtcgagcgctgggacccgcaggcgagacaatggaattttgtggccacaatgagcacccctaggagcaccgtaggcgtcgccgttctctcgggaaagctgtacgccgttggaggacgggacggcagttcttgtcttaagagtgtggagtgctttgatcctcatacgaacaaatggactctgtgcgcacagatgagcaaaaggcggggcggggtcggcgtgactacatggaacggtcttttatacgcaattggggggcacgatgctcccgccagtaatttgacgtcccggttgtctgactgcgtggagaggtatgatcccaaaacagatatgtggactgctgtcgccagcatgtcgataagtcgcgatgcagtgggggtctgtctactcggagacaaactgtatgccgtgggaggctacgacggtcaggcctacctgaacactgtcgaagcttatgatccacagaccaacgaatggactcaggtctggcactcttgtttcattatcacgttgaccctgttcttgctgaagcaatttctgtggtag

SEQ ID NO: 188811 - DNA, 2268 bp, Artificial Sequence
  derived and/or modified sequence
atgaacgtgatctacttccctttgcacatctttgtagtctattcacgggcttatacttccctggtgttggtcgggtgtaccaatttatgcgcagttctgttcgcgcgctgtcttgatgaccacctagtctcgctccgtatgagcggcagccggaaggaattcgatgtcaagcaaatcctgaagattcgatggcgttggttcggtcatcaagcaagcagccccaactctacagtcgatagccagcagggagagttctggaaccgggggcagaccggggccaacggcgggcgcaagtttctcgacccctgtagcctgcagttgcctctcgccagtatcggttatcggcggagcagtcaactggatttccagaattctcctagctggcccatggcaagcaccagtgaagttcctgcattcgaatttaccgctgaggactgcggtggagcccattggctcgaccgcccagaggtggacgatggcaccagtgaggaggaaaatgaatctgactccagtagttgccgcacttcaaattcatctcagaccctttcatcatgccacactatggaaccatgtacctcagacgaattttttcaagctttgaatcacgctgaacaaaccttcaagaaaatggaaaactacctgaggcacaaacaactgtgcgacgtcattcttgtggcgggggatagacgaatccccgcgcatcgcctggtgctcagctccgtttcggactacttcgctgccatgtttaccaacgatgtccgggaggccaggcaggaggaaatcaagatggaaggggttgaaccaaacagtctgtggtctctgattcagtacgcatatacaggccggctcgagctgaaagaggataatatcgagtgcttattgtctacagcgtgccttctccagctcagccaggtcgtggaggcttgctgtaaatttttaatgaagcagctgcatcccagcaattgcctggggatcagatcttttgcagatgcccaaggatgtactgatctccacaaggtagctcacaactacacaatggagcattttatggaagtgatcaggaaccaggagttcgttcttctccctgcttctgaaatagcaaagctgctggcttcagacgacatgaacatccctaacgaagagaccattctcaacgctctgttaacttgggtgcggcacgacctggaacagaggaggaaagatttgagcaaacttttggcctacattagactgccgctcctcgctcctcagttcctcgccgatatggagaacaatgtgctgttcagggatgatatcgaatgccagaagttgattatggaggccatgaagtatcacttactgccagagcgccgcccgatgctacagagccccaggactaagccaaggaaaagcaccgtgggcaccctgtttgcggttggcgggatggactcaaccaaaggggctaccagtatagagaaatatgatctacggactaatatgtggacgcccgtcgctaacatgaacggtaggagactgcagttcggggtcgccgtgctggatgacaaactatacgtggtgggcggacgagacgggcttaagactctgaataccgtcgaatgctacaacccgaaaacaaaaacctggtcagtgatgcctccaatgagcactcatagacacgggctaggggtggcggtgctcgagggacctatgtacgcagtcggcggtcatgacggttggtcatatctgaacaccgtggagcggtgggatccacaggctaggcagtggaactttgtggctaccatgtctacacctcgatctacagtgggagtggccgtgttgtcaggcaagctctatgctgtgggagggagagatggatcgagctgtcttaagagtgtagaatgtttcgacccccatacaaacaagtggaccctgtgtgcgcagatgtcaaagcgccgtggcggcgtgggagtcacaacttggaatggactgttgtacgctattggaggccatgacgccccagctagcaatctgaccagtaggctctctgattgtgtggaaagatatgatccaaagacagatatgtggaccgccgtggcctcgatgtcaatttctcgagatgccgtgggagtctgccttctgggtgataaactgtatgctgtcggcgggtatgatgggcaggcatatctcaataccgtggaagcatatgaccctcagactaacgaatggacacaggtggctccgttgtgcctgggtcgtgccggtgcctgtgtggtaacagtcaaactgtag

SEQ ID NO: 188812 - DNA, 3288 bp, Artificial Sequence
  derived and/or modified sequence
tgtttcatctttattcattatcctttgttctttaaaatctgatatattggcataaaagtaattgtagatatatatatgaatgtgatttattttcctttacatatttttgttgtgtacagcagggcatatacttctcttgtcttggttggatgcacaaatctgtgtgcagtgctttttgcccgttgcctagacgatcacttggtttctctgaggatgtctggttctcgtaaagagtttgatgtgaaacagattttgaaaatcagatggaggtggtttggtcatcaagcatcatctcctaattctacagttgacagccagcagggagaattttggaaccgaggacagactggagcaaacggtgggagaaagtttttagatccatgtagcctacaattgcctttggcttcaattggttaccgaaggtccagccaactggattttcagaattcaccttcttggccaatggcatccacctctgaagtccctgcatttgagtttacagcagaagattgtggcggtgcacattggctggatagaccagaagtggatgatggcactagtgaagaagaaaatgaatctgattccagttcatgcaggacttccaatagtagtcagacattatcatcctgtcatactatggagccatgtacatcagatgaatttttccaagcccttaatcatgccgagcaaacatttaaaaaaatggaaaactatttgagacataaacagttgtgtgatgtaattttagtcgctggtgatcgcagaattccagctcacagattggtgctctcctctgtctcagactattttgctgccatgtttactaatgatgtcagagaggcaagacaagaagaaataaaaatggaaggtgtagaaccaaattcgttgtggtccttgatccagtatgcttatacaggccgccttgaattaaaagaagataatattgagtgcctgttatctacagcttgccttcttcagctttcacaggttgtagaagcatgctgtaagtttttaatgaaacagcttcatccatccaactgtcttggaattcgttcttttgctgatgcccaaggttgtacagatttgcataaagtggctcacaattatactatggagcatttcatggaagtaatcagaaaccaggaatttgtattattaccagccagcgaaattgcaaagctcttggctagtgatgacatgaacattcctaatgaggagacaatattgaatgcacttcttacttgggtccgtcatgatttggaacagagacggaaagatctaagtaaacttttggcttatattaggctacctcttcttgcaccacagttcctggcagacatggaaaataatgtactttttcgggatgatatagaatgtcagaaactcattatggaagcaatgaagtaccatttattaccagagagacgacccatgttacaaagtcctcggacaaaacctaggaagtcaactgttggtacattatttgcagttgggggaatggattcaacaaaaggagcaacaagcattgaaaagtatgatctccgtacaaatatgtggactccagtagcaaatatgaatgggaggaggctacagttcggtgttgcagtgctagatgacaaactgtatgtggttggaggaagagatggactgaagactttgaatactgtagagtgctacaaccccaaaacaaaaacttggagtgtgatgccacctatgtccacacatagacatggccttggtgtggctgtactggaaggtcccatgtatgccgtaggaggacatgatggctggagctatctgaacacagtggaaagatgggaccctcaggctcgccagtggaattttgttgccactatgtctacccctaggagtacagtaggtgtggcagtactaagtggaaaactttatgcagttggtggtcgtgatggaagttcttgtctcaaatcagtagaatgttttgatcctcatactaataagtggacactgtgtgcacagatgtcaaaaaggagaggtggcgtaggagtgacgacctggaatggactgctgtatgctataggggggcacgatgctcccgcatccaacttgacttccagactctcagactgtgtggaaagatatgatcccaaaacagacatgtggactgcagtagcatccatgagcatcagcagagatgcagtgggggtctgtttacttggtgataagttatatgctgttggggggtatgatggacaggcataccttaatactgtggaggcttatgatccccagacaaatgagtggacccaggtatggcattcatgtttcattattacactgactctctttttattaaaacaattcttatggtaaaacagatcccctcaatcttgtccaatactgaaatatatggcataaatatgacaatcacgttttgattagcgatgagaaaaagaggcaatgtttaattttataacataattaaaatccagaattacctttgagatgtaagttaatactcagagaaattattaattatctgctaccacttgcatgatgaagtgttctagcctgattaaagctgataggactactggagggctgcaacaatgggaggggagactggaaaataaaaacaaggatagtagtcagaaaactttgaacaacttgcccatgtgtgagcagtcggatttttaaatactcaacccattgatatctgggagcagattaaagtcctgataacctaatgaagatggcaaccctaaattacactgagtaagaaacctgatctggcagtcttactaacagaaagaatttcacccttgtgtatttctgggagggtctagcacttctaaaaatgatcttttgagatctttgcttccatcatcaccaagaacagaatcaggaatttgtgcttgtgtcacccagttcagtacttggtacataaaagacaataaatgtttaactgagccaagattttcttgtatacaaggagccatgataagtatggtcaagaaaacaaagcttctaggccaggcatggtggcttatgcctataatcccagcactttgggaggctgaggcgggcagatcacgaggtcaggagttcaagaccagcctgaccaatatggtgagaccccatctctactaaaaatacaaaaaaattagccgggcatggtggcacgtgcctgtaatcccagctactcggggggctgaggcaggagaatcgcttgaacccaggaggcagaggttgcagtgagcagagatcatgccactgcacttcagcctgggtgacagagtgagactccatctt

SEQ ID NO: 188813 - DNA, 2690 bp, Artificial Sequence
  derived and/or modified sequence
actgcaacggggatagtgttttctgtctctgtcatttgtggtttaagaaaaagggggtggtgttctgcatttgaaaggactttaatgaatgctgtcagtgtttgtgagacctaatggtcagtatgggaaaggagagccgggaaagtggtctagctgcttcaggataggtggatgagagtttgctctgattgaacggaatgttccaccgtgtttcatctttattcattatcctttgttctttaaaatctgatatattggcataaaagtaattgtagatatatatatgaatgtgatttattttcctttacatatttttgttgtgtacagcagggcatatacttctcttgtcttggttggatgcacaaatctgtgtgcagtgctttttgcccgttgcctagacgatcacttggtttctctgaggatgtctggttctcgtaaagagtttgatgtgaaacagattttgaaaatcagatggaggtggtttggtcatcaagcatcatctcctaattctacagttgacagccagcagggagaattttggaaccgaggacagactggagcaaacggtgggagaaagtttttagatccatgtagcctacaattgcctttggcttcaattggttaccgaaggtccagccaactggattttcagaattcaccttcttggccaatggcatccacctctgaagtccctgcatttgagtttacagcagaagattgtggcggtgcacattggctggatagaccagaagtggatgatggcactagtgaagaagaaaatgaatctgattccagttcatgcaggacttccaatagtagtcagacattatcatcctgtcatactatggagccatgtacatcagatgaatttttccaagcccttaatcatgccgagcaaacatttaaaaaaatggaaaactatttgagacataaacagttgtgtgatgtaattttagtcgctggtgatcgcagaattccagctcacagattggtgctctcctctgtctcagactattttgctgccatgtttactaatgatgtcagagaggcaagacaagaagaaataaaaatggaaggtgtagaaccaaattcgttgtggtccttgatccagtatgcttatacaggccgccttgaattaaaagaagataatattgagtgcctgttatctacagcttgccttcttcagctttcacaggttgtagaagcatgctgtaagtttttaatgaaacagcttcatccatccaactgtcttggaattcgttcttttgctgatgcccaaggttgtacagatttgcataaagtggctcacaattatactatggagcatttcatggaagtaatcagaaaccaggaatttgtattattaccagccagcgaaattgcaaagctcttggctagtgatgacatgaacattcctaatgaggagacaatattgaatgcacttcttacttgggtccgtcatgatttggaacagagacggaaagatctaagtaaacttttggcttatattaggctacctcttcttgcaccacagttcctggcagacatggaaaataatgtactttttcgggatgatatagaatgtcagaaactcattatggaagcaatgaagtaccatttattaccagagagacgacccatgttacaaagtcctcggacaaaacctaggaagtcaactgttggtacattatttgcagttgggggaatggattcaacaaaaggagcaacaagcattgaaaagtatgatctccgtacaaatatgtggactccagtagcaaatatgaatgggaggaggctacagttcggtgttgcagtgctagatgacaaactgtatgtggttggaggaagagatggactgaagactttgaatactgtagagtgctacaaccccaaaacaaaaacttggagtgtgatgccacctatgtccacacatagacatggccttggtgtggctgtactggaaggtcccatgtatgccgtaggaggacatgatggctggagctatctgaacacagtggaaagatgggaccctcaggctcgccagtggaattttgttgccactatgtctacccctaggagtacagtaggtgtggcagtactaagtggaaaactttatgcagttggtggtcgtgatggaagttcttgtctcaaatcagtagaatgttttgatcctcatactaataagtggacactgtgtgcacagatgtcaaaaaggagaggtggcgtaggagtgacgacctggaatggactgctgtatgctataggggggcacgatgctcccgcatccaacttgacttccagactctcagactgtgtggaaagatatgatcccaaaacagacatgtggactgcagtagcatccatgagcatcagcagagatgcagtgggggtctgtttacttggtgataagttatatgctgttggggggtatgatggacaggcataccttaatactgtggaggcttatgatccccagacaaatgagtggacccaggttgctccactgtgcctaggaagagctggagcttgtgttgtgactgtaaaattataatttagtgccccgttttctacatgaagacaccgtcttcctttattaatttagtataattattctatcaatggatacatttttagtaaatgtgcattgtcacaatcctgggcacaaagtgcctgatgtcaaaatgaagata

SEQ ID NO: 188814 - DNA, 2274 bp, Artificial Sequence
  derived and/or modified sequence
atgaatgtcatctacttccccctgcacatctttgtggtgtacagccgggcctacaccagcctggtgctggtgggctgcaccaacctgtgtgctgtgctgtttgcccgctgcctggatgaccacctggtgtccctgaggatgagcggcagcaggaaggagtttgatgtgaagcagatcctgaagatccgctggcgctggtttggccaccaggccagcagccccaacagcacagtggacagccagcagggcgagttctggaacagaggccagacaggagccaacggcggcaggaagttcctggacccctgcagcctgcagctgcccctggccagcatcggctacagaagaagcagccagctggacttccagaacagccccagctggcccatggccagcaccagcgaggtgcctgcctttgagttcaccgctgaggactgtggcggggcccactggctggacaggcctgaggtggatgatggcaccagcgaggaggagaatgaaagtgacagcagcagctgcaggaccagcaacagcagccagaccctgagcagctgccacaccatggagccctgcaccagtgatgagttcttccaggccctgaaccacgccgagcagaccttcaagaagatggagaactacctgcggcacaagcagctgtgtgatgtgatcctggtggccggggaccggcgcatcccagcccaccggctggtgctgagctctgtgtctgactactttgctgccatgttcaccaatgatgtgcgggaggcccggcaggaggagatcaagatggagggcgtggagcccaacagcctgtggagcctcatccagtatgcctacacaggccgcctggagctgaaggaggacaacattgaatgtctgctgagcacagcctgcctgctgcagctgagccaggtggtggaggcctgctgcaagttcctgatgaagcagctgcaccccagcaactgcctgggcatccgcagctttgctgatgcccagggctgcacagacctgcacaaggtggcccacaactacaccatggagcacttcatggaggtgatccggaaccaggagtttgtgctgctgcctgccagcgagatcgccaagctgctggccagtgatgacatgaacatccccaatgaggagaccatcctgaatgccctgctgacctgggtgagacatgacctggagcagaggaggaaggacctgagcaagctgctggcctacatccggctgcccctgctggccccccagttcctggccgacatggagaacaacgtgctcttcagagatgacatcgagtgccagaagctgatcatggaggccatgaagtaccacctgctgcctgagcggcggcccatgctgcagagccccaggaccaagcccaggaagagcacagtgggcaccctgtttgctgtgggcggcatggacagcaccaagggggccaccagcattgagaagtatgacctgcggaccaacatgtggacccctgtggccaacatgaatggaagaaggctgcagtttggagtggccgtgctggatgacaagctgtatgtggtgggcggcagagatggcctgaagaccctgaacacagtggagtgctacaaccccaagaccaagacctggagcgtgatgccacccatgagcacccaccgccacggcctgggcgtggccgtgctggagggccccatgtatgctgtgggcggccatgatggctggagctacctgaacacagtggagcgctgggacccccaggcccggcagtggaactttgtggccaccatgagcacccccaggagcacagtgggcgtggccgtgctgagcggcaagctgtatgctgtgggcggcagagatggcagcagctgcctgaagtctgtggagtgctttgacccccacaccaacaagtggaccctgtgtgcccagatgagcaagaggcggggcggcgtgggcgtgaccacctggaatggcctgctgtatgccatcggcggccatgatgccccagccagcaacctgaccagccggctgagtgactgtgtggagagatatgaccccaagacagacatgtggacagctgtggcctccatgagcatcagcagagatgctgtgggcgtgtgcctgctgggggacaagctgtatgctgtgggcggctatgatggccaggcctacctgaacacagtggaggcctatgacccccagaccaatgagtggacccaggtgtggcacagctgcttcatcatcaccctgaccctcttcctgctgaagcagttcctgtggtag

SEQ ID NO: 188815 - DNA, 2268 bp, Artificial Sequence
  derived and/or modified sequence
atgaatgtcatctacttccccctgcacatctttgtggtgtacagccgggcctacaccagcctggtgctggtgggctgcaccaacctgtgtgctgtgctgtttgcccgctgcctggatgaccacctggtgtccctgaggatgagcggcagcaggaaggagtttgatgtgaagcagatcctgaagatccgctggcgctggtttggccaccaggccagcagccccaacagcacagtggacagccagcagggcgagttctggaacagaggccagacaggagccaacggcggcaggaagttcctggacccctgcagcctgcagctgcccctggccagcatcggctacagaagaagcagccagctggacttccagaacagccccagctggcccatggccagcaccagcgaggtgcctgcctttgagttcaccgctgaggactgtggcggggcccactggctggacaggcctgaggtggatgatggcaccagcgaggaggagaatgaaagtgacagcagcagctgcaggaccagcaacagcagccagaccctgagcagctgccacaccatggagccctgcaccagtgatgagttcttccaggccctgaaccacgccgagcagaccttcaagaagatggagaactacctgcggcacaagcagctgtgtgatgtgatcctggtggccggggaccggcgcatcccagcccaccggctggtgctgagctctgtgtctgactactttgctgccatgttcaccaatgatgtgcgggaggcccggcaggaggagatcaagatggagggcgtggagcccaacagcctgtggagcctcatccagtatgcctacacaggccgcctggagctgaaggaggacaacattgaatgtctgctgagcacagcctgcctgctgcagctgagccaggtggtggaggcctgctgcaagttcctgatgaagcagctgcaccccagcaactgcctgggcatccgcagctttgctgatgcccagggctgcacagacctgcacaaggtggcccacaactacaccatggagcacttcatggaggtgatccggaaccaggagtttgtgctgctgcctgccagcgagatcgccaagctgctggccagtgatgacatgaacatccccaatgaggagaccatcctgaatgccctgctgacctgggtgagacatgacctggagcagaggaggaaggacctgagcaagctgctggcctacatccggctgcccctgctggccccccagttcctggccgacatggagaacaacgtgctcttcagagatgacatcgagtgccagaagctgatcatggaggccatgaagtaccacctgctgcctgagcggcggcccatgctgcagagccccaggaccaagcccaggaagagcacagtgggcaccctgtttgctgtgggcggcatggacagcaccaagggggccaccagcattgagaagtatgacctgcggaccaacatgtggacccctgtggccaacatgaatggaagaaggctgcagtttggagtggccgtgctggatgacaagctgtatgtggtgggcggcagagatggcctgaagaccctgaacacagtggagtgctacaaccccaagaccaagacctggagcgtgatgccacccatgagcacccaccgccacggcctgggcgtggccgtgctggagggccccatgtatgctgtgggcggccatgatggctggagctacctgaacacagtggagcgctgggacccccaggcccggcagtggaactttgtggccaccatgagcacccccaggagcacagtgggcgtggccgtgctgagcggcaagctgtatgctgtgggcggcagagatggcagcagctgcctgaagtctgtggagtgctttgacccccacaccaacaagtggaccctgtgtgcccagatgagcaagaggcggggcggcgtgggcgtgaccacctggaatggcctgctgtatgccatcggcggccatgatgccccagccagcaacctgaccagccggctgagtgactgtgtggagagatatgaccccaagacagacatgtggacagctgtggcctccatgagcatcagcagagatgctgtgggcgtgtgcctgctgggggacaagctgtatgctgtgggcggctatgatggccaggcctacctgaacacagtggaggcctatgacccccagaccaatgagtggacccaggtggcccccctgtgcctgggccgggccggggcctgtgtggtgacagtgaagctgtag

SEQ ID NO: 188816 - DNA, 2274 bp, Artificial Sequence
  derived and/or modified sequence
atgaacgtgatctacttccccctgcacatcttcgtggtgtacagcagggcgtacacatctttggtgttagtgggctgcaccaatttgtgcgccgttctcttcgccagatgtctggacgaccacttggtatcccttagaatgtcaggttcgcggaaagagttcgacgtgaaacagatcctgaagatacgttggcgatggtttggacaccaagcttcaagtcctaattccacagtggacagccaacagggcgaattttggaaccgcggacagacaggcgctaatggtggcaggaaatttcttgacccttgtagcctgcagctgccgctggcctccatagggtaccggagatcttctcagttagattttcagaactccccctcctggccaatggcgtccacaagcgaagttcccgcttttgaatttactgctgaagactgtggaggcgcccattggctggatagacccgaagtcgatgacggtacttcagaggaagaaaacgagtctgactcctcttcatgccgcacctccaacagcagccagaccctgtcaagctgccacactatggagccgtgtacctccgatgaatttttccaggctctcaaccacgcagagcagaccttcaaaaagatggagaactatctgagacacaaacagttatgcgatgtgatattggtcgccggcgatcggagaatccccgcacacagattagtcctgagttccgtcagtgactactttgcagccatgtttacaaacgatgtgcgggaagcccgacaggaggagattaagatggagggcgttgagccaaatagcctgtggagcttaatacagtatgcctataccgggcgcctggagctgaaggaggacaatatcgaatgcctactgtcaaccgcatgtttgctgcaactgagccaggtcgtggaggcttgttgcaagtttctcatgaaacagcttcatccctccaattgccttggcattagatctttcgccgatgcacagggttgcactgacctgcataaggtggcccataactataccatggagcactttatggaagttatccggaaccaggagttcgtgttgctgccagcctccgagatcgccaagctcctggcttctgacgacatgaacatcccaaatgaggaaacaatcctgaacgccctcctgacttgggtgagacatgacctggaacagcgccgtaaagatctctcaaaattattggcctacatccggctccctctcttggcaccacagttcttagcggacatggaaaataatgtgttattccgcgatgacatcgagtgtcagaagttgatcatggaggccatgaagtaccatcttctcccagagcgcaggccgatgctgcaaagcccaagaaccaagccccgcaaaagtactgtgggaaccttgtttgctgtcggcggcatggactcaacaaagggggccacgtccatcgagaagtatgacttgcggactaacatgtggacacctgtggctaatatgaacggaaggcgtttacagtttggcgtggccgtactcgacgataaactgtacgtggtcggaggccgagacggcctcaagaccctaaataccgtggaatgctataatcctaagaccaagacatggagcgtcatgccaccaatgtctacgcaccgccatgggctgggggtggccgttctggaaggacccatgtacgccgttggaggacatgacgggtggtcgtatctgaacacagtcgagcggtgggatccacaggcccgacagtggaattttgtggcaactatgagcactccacgctctacggtgggagtggccgtgctatccgggaagctgtacgccgtaggagggcgcgacgggagtagctgtctcaagagcgttgaatgctttgatccccacactaataaatggacactatgtgcgcaaatgtcaaaacgcagagggggggtgggggtcaccacatggaacggtctcctctacgccataggcgggcacgacgcgcctgcatctaatctaacatccagattgagtgactgcgtggaaagatacgatccaaaaaccgacatgtggactgctgtggcatcaatgtccatctcacgcgatgcagtgggggtgtgcttgctgggagacaagctctacgccgtaggcggctatgacggccaggcctatctgaatacagtcgaggcgtacgatccacagacaaatgaatggacacaggtttggcactcttgttttatcatcacgctgaccctttttctccttaaacagttcctctggtag

SEQ ID NO: 188817 - DNA, 2268 bp, Artificial Sequence
  derived and/or modified sequence
atgaacgtgatctacttccccctgcacatcttcgtggtgtacagccgcgcctacacaagcctggttttagtaggatgtactaatctgtgcgcagtcttgttcgccagatgcctggatgatcacttagtttctctgcgaatgagcggaagccgcaaggagtttgacgtgaaacagatcctgaaaataaggtggagatggtttgggcaccaggccagcagtcccaacagtacagttgacagtcagcaaggcgagttctggaacagaggtcagactggggccaatgggggccgcaagtttctcgatccctgcagcctgcagctgcctttggcatccattggctataggcgctcctctcagctcgatttccagaatagtccctcatggcctatggcttcgacatctgaagtacccgctttcgagtttactgcagaggattgcggcggagcacattggctagatcggcccgaggtcgacgacggaacatcagaagaggaaaatgagtccgacagcagttcctgcaggacatctaactccagccagaccttgagttcatgccacacaatggagccttgtactagcgacgagttctttcaggccctcaatcacgctgaacagacgtttaaaaagatggagaattacctgagacacaaacagctgtgtgacgtgattcttgtcgccggcgatcgacggataccagcccaccgcctcgtgttaagctctgtgtctgactactttgctgcaatgtttacgaacgacgtgagggaagcccgccaggaggagataaagatggagggagtagaacccaatagtctgtggagcctgattcagtacgcctatacaggaaggctcgagctaaaggaagataacattgagtgcctgttgtccacagcctgtctgttgcagctgagccaggtggttgaggcctgctgcaaattcctaatgaagcaactgcacccctccaactgcctgggcatcaggtcctttgctgacgcacaaggctgcactgacctgcacaaggtggcccataattacacaatggagcattttatggaggtcatccgaaatcaggagttcgtattgcttccggcatccgagatagctaaactactcgcttccgatgatatgaatatccctaatgaggagacaatcctgaatgcacttttaacttgggtgagacacgacctcgaacagaggagaaaggacctgtccaaacttctggcatatattcgcttgcctttgttagctccacagttcttggccgacatggaaaataatgttctcttccgtgacgatattgagtgtcaaaaactcatcatggaagcaatgaagtaccacctgcttcctgaacggcggccgatgctccagagcccaaggaccaagcctcgcaagagtactgtgggcactttgtttgccgttggtggaatggatagcactaagggagccaccagtatcgagaagtatgatctccggacaaatatgtggaccccagtcgccaatatgaacggaagacggctccaatttggagtggccgtgctcgacgataagctgtacgtggtgggtggccgtgacggcctcaaaactctcaatacagtggagtgctataatcctaaaacaaagacatggagtgtgatgccccccatgtcaacacacaggcacggtttgggagtcgctgtcttggaaggacccatgtatgctgtgggggggcatgacggctggtcgtacctcaacacagtggagcgctgggaccctcaggcacgccaatggaacttcgtggccaccatgagcacacctcggtccaccgtgggagtggccgtactgagcggaaaactatacgcagtcggcggccgcgacggctcaagttgcctcaaaagtgtcgagtgttttgatccccacaccaacaaatggaccctgtgtgcacagatgtccaaacggcgcggtggggtgggagtcaccacctggaatgggttgctatacgcgatcggaggccatgacgcccctgcatctaatctgacctcccgcctaagtgactgtgttgagcgatatgatcccaagaccgatatgtggaccgccgtagcatctatgtccatttctcgcgacgcagtcggtgtatgtcttttgggcgataaattatatgccgttggtgggtacgatgggcaggcgtacctcaataccgtggaggcctacgatcctcagaccaatgagtggacccaagtcgcgccactgtgcctgggcagagctggagcctgtgtggtcaccgtgaaattgtag

SEQ ID NO: 188818 - DNA, 2274 bp, Artificial Sequence
  derived and/or modified sequence
atgaacgtgatctatttccctcttcacatcttcgttgtttactctcgggcttacacctctcttgtcctggttggatgtacaaacctgtgcgcagtcctattcgctagatgtctcgacgatcacctagtaagtctaaggatgagcgggtctcgtaaggaattcgatgtgaaacagatactgaaaatccggtggaggtggtttggacaccaagcgagcagcccaaatagcactgtggatagtcagcagggagagttttggaatcggggacagaccggtgcaaacgggggtcggaaattcctggatccatgttcactgcagctgcccctagcatcaattggatacagaagatctagccaattggatttccagaattcccctagctggcctatggctagtacgtccgaggttcctgcgttcgaattcacagcagaggattgcggcggtgcccactggcttgacaggcccgaggtggacgacggaaccagtgaagaggagaacgagtccgactcctccagttgtagaacttctaactcctcccaaaccctcagtagttgccacaccatggaaccctgcacctctgatgagttctttcaggcgttgaaccacgctgaacagactttcaaaaagatggaaaactaccttcgccacaagcagttgtgtgacgtgatcctggtagccggtgatcggagaatccccgctcataggttagttctcagcagcgtctcagattacttcgctgcaatgtttaccaatgacgtccgcgaggcacgccaagaggagatcaagatggagggagtggagcccaacagcctctggagcctcatccagtatgcctataccggtaggctggaactcaaggaggataatatcgagtgcctcctttctactgcgtgtctgctccagctttcacaggttgttgaggcctgttgtaaattcctgatgaagcagctgcacccttccaattgtttaggcattcgtagcttcgctgacgcccagggatgcaccgaccttcacaaggtggcccacaactacactatggaacactttatggaggttatccggaaccaggagtttgtcctgctccccgcaagtgagatcgccaaactgttagcctctgatgatatgaacataccaaacgaggagaccatcctaaatgcattgctgacttgggtacgacacgatttggaacaacgaagaaaagatttgagcaagctcctagcttacattcgcttacccttactggcaccccagttcctcgcagacatggagaataacgtgctgtttagggacgacatagaatgccagaagcttataatggaggcgatgaaatatcatttgctccccgagcggcgaccaatgctgcaatctcctagaactaagcccaggaagtcgactgttggcactctgtttgccgtcggcggaatggatagcaccaagggagcaacatccatagaaaaatatgatttacgaaccaacatgtggaccccagttgctaatatgaacggtcggagactgcaatttggagtggcagtcctcgatgacaagttatatgtggttggcggacgggacggtctgaaaactctcaatactgtcgagtgctataatccaaaaactaagacatggagcgtaatgcccccaatgtcaactcatcgccacgggctcggtgtcgccgtcctcgagggccctatgtatgccgttggtggccacgatgggtggagctatctgaacacggtcgagagatgggacccccaggcccgtcaatggaattttgtcgcaaccatgtcaactcctcggtctaccgtgggagtcgccgtgttatctgggaagctgtacgcagtggggggaagggatggctctagctgtttaaagtccgttgagtgtttcgacccccacacgaacaaatggaccctgtgtgctcagatgtcaaagcgcagaggaggggtgggcgttaccacgtggaacgggctcctgtatgccatcggtggacatgacgcacccgcttcgaatcttacctcacggctgtctgattgcgtggagcggtatgaccctaagaccgacatgtggacagctgtcgctagtatgagcatttcccgggatgccgtgggggtctgcctgctcggagacaaattgtatgcagtgggcggatacgatggccaggcttacctgaatacagtggaggcctacgatccacagaccaatgaatggactcaggtctggcatagctgtttcattatcaccctgaccctgttcctgctcaagcagttcctatggtag

SEQ ID NO: 188819 - DNA, 2268 bp, Artificial Sequence
  derived and/or modified sequence
atgaatgttatctatttcccattgcatatctttgttgtatattccagagcgtacacatcgttagttctcgtgggatgtactaatttatgcgctgtattatttgccagatgccttgatgaccacctcgtgtcattaagaatgtctggtagcagaaaggagtttgacgttaaacagatcctgaagattcgctggcggtggttcggccaccaggccagctcacctaatagcactgttgatagccaacaaggggagttctggaatcggggacaaacgggggcaaacggcggtcggaaattccttgacccttgctctctgcaactgccgctggcttcaataggttaccggcgttcaagtcaacttgacttccagaactcgccctcctggccaatggcatccaccagcgaagtgcctgcattcgagtttaccgctgaggattgcggtggggcacactggctggatagaccagaagtggacgatggaactagcgaggaggagaacgaaagtgactcatctagctgcaggacttcaaatagctcccagactcttagcagttgtcacacgatggaaccttgcactagtgacgagttctttcaggcactgaatcacgctgaacaaacattcaagaagatggagaattatctccggcataagcagctgtgtgatgttatcctggtggccggagacagaaggattccggctcacaggttggtactgagctccgttagcgactactttgcagccatgttcaccaatgatgtgcgggaagctcgccaggaggagattaaaatggagggcgttgaaccaaattcattatggtctctgattcagtatgcctacactgggagactggagttgaaggaggacaatattgaatgcctgctctccactgcatgtcttcttcaattatcccaggtggtggaagcttgctgcaaatttttgatgaaacagctccatcctagcaactgtctgggaatcagatccttcgcagatgcgcaggggtgtacggacttgcataaggtcgcacataactacaccatggaacacttcatggaggtcatcaggaaccaagaatttgtcttgcttcctgcctcagagatcgccaaacttctcgccagtgacgacatgaacattcccaacgaggagacgattctcaacgctcttctcacctgggtgaggcatgatctcgaacagcgacgtaaggatctctcaaagttgctggcatatataagactgcctctgttggcccctcagttcttagccgatatggagaataatgttctcttcagggacgatattgagtgtcagaaacttatcatggaggccatgaagtatcatctcctaccagaacgcagacccatgctgcagagccctagaactaagcctaggaagtccacagttgggacactttttgccgtggggggaatggactccactaaaggagccaccagtattgagaagtacgacctccggacaaacatgtggacccctgtcgccaacatgaatggtaggcggctgcagttcggcgtcgccgtccttgacgacaagctgtacgtcgtgggtgggcgagatggactgaagactctgaatacggtggagtgttataacccaaaaacgaagacgtggtcagtcatgccccctatgtccacacacagacacggcttaggtgtggccgtgttggagggcccaatgtacgctgtcggcggtcacgacggatggtcctacctgaataccgtggaaaggtgggacccccaggcgagacaatggaacttcgtcgccaccatgtctactcctagaagcaccgtgggcgtggcggtcctgagtggcaaactgtatgccgttggcggacgggacggttcctcatgtctcaaatcggtagagtgctttgatcctcataccaataaatggaccttgtgtgcacagatgtctaagaggagaggaggcgtcggagtgacaacatggaatggcttgctctacgcaatcgggggacacgatgcgcctgcctccaacctgacgagccgattgtctgattgcgtggagagatacgacccaaaaacggacatgtggaccgctgtcgccagtatgtcaatttctcgtgatgctgtgggagtctgcctcctgggggacaagctttacgctgtgggaggatatgacgggcaggcataccttaatactgtggaggcatacgacccacagacaaacgagtggacccaagtggcacccctgtgccttggtcgggcaggagcatgtgtcgtaactgtaaagttatag

SEQ ID NO: 188820 - DNA, 2274 bp, Artificial Sequence
  derived and/or modified sequence
atgaacgtgatctacttccccctgcacatcttcgtggtgtacagcagagcctacaccagcctggtgctggtgggctgcaccaacctgtgcgccgtgctgttcgccagatgcctggacgaccacctggtgagcctgagaatgagcggcagcagaaaggagttcgacgtgaagcagatcctgaagatcagatggagatggttcggccaccaggccagcagccccaacagcaccgtggacagccagcagggcgagttctggaacagaggccagaccggcgccaacggcggcagaaagttcctggacccctgcagcctgcagctgcccctggccagcatcggctacagaagaagcagccagctggacttccagaacagccccagctggcccatggccagcaccagcgaggtgcccgccttcgagttcaccgccgaggactgcggcggcgcccactggctggacagacccgaggtggacgacggcaccagcgaggaggagaacgagagcgacagcagcagctgcagaaccagcaacagcagccagaccctgagcagctgccacaccatggagccctgcaccagcgacgagttcttccaggccctgaaccacgccgagcagaccttcaagaagatggagaactacctgagacacaagcagctgtgcgacgtgatcctggtggccggcgacagaagaatccccgcccacagactggtgctgagcagcgtgagcgactacttcgccgccatgttcaccaacgacgtgagagaggccagacaggaggagatcaagatggagggcgtggagcccaacagcctgtggagcctgatccagtacgcctacaccggcagactggagctgaaggaggacaacatcgagtgcctgctgagcaccgcctgcctgctgcagctgagccaggtggtggaggcctgctgcaagttcctgatgaagcagctgcaccccagcaactgcctgggcatcagaagcttcgccgacgcccagggctgcaccgacctgcacaaggtggcccacaactacaccatggagcacttcatggaggtgatcagaaaccaggagttcgtgctgctgcccgccagcgagatcgccaagctgctggccagcgacgacatgaacatccccaacgaggagaccatcctgaacgccctgctgacctgggtgagacacgacctggagcagagaagaaaggacctgagcaagctgctggcctacatcagactgcccctgctggccccccagttcctggccgacatggagaacaacgtgctgttcagagacgacatcgagtgccagaagctgatcatggaggccatgaagtaccacctgctgcccgagagaagacccatgctgcagagccccagaaccaagcccagaaagagcaccgtgggcaccctgttcgccgtgggcggcatggacagcaccaagggcgccaccagcatcgagaagtacgacctgagaaccaacatgtggacccccgtggccaacatgaacggcagaagactgcagttcggcgtggccgtgctggacgacaagctgtacgtggtgggcggcagagacggcctgaagaccctgaacaccgtggagtgctacaaccccaagaccaagacctggagcgtgatgccccccatgagcacccacagacacggcctgggcgtggccgtgctggagggccccatgtacgccgtgggcggccacgacggctggagctacctgaacaccgtggagagatgggacccccaggccagacagtggaacttcgtggccaccatgagcacccccagaagcaccgtgggcgtggccgtgctgagcggcaagctgtacgccgtgggcggcagagacggcagcagctgcctgaagagcgtggagtgcttcgacccccacaccaacaagtggaccctgtgcgcccagatgagcaagagaagaggcggcgtgggcgtgaccacctggaacggcctgctgtacgccatcggcggccacgacgcccccgccagcaacctgaccagcagactgagcgactgcgtggagagatacgaccccaagaccgacatgtggaccgccgtggccagcatgagcatcagcagagacgccgtgggcgtgtgcctgctgggcgacaagctgtacgccgtgggcggctacgacggccaggcctacctgaacaccgtggaggcctacgacccccagaccaacgagtggacccaggtgtggcacagctgcttcatcatcaccctgaccctgttcctgctgaagcagttcctgtggtag

SEQ ID NO: 188821 - DNA, 2268 bp, Artificial Sequence
  derived and/or modified sequence
atgaacgtgatctacttccccctgcacatcttcgtggtgtacagcagagcctacaccagcctggtgctggtgggctgcaccaacctgtgcgccgtgctgttcgccagatgcctggacgaccacctggtgagcctgagaatgagcggcagcagaaaggagttcgacgtgaagcagatcctgaagatcagatggagatggttcggccaccaggccagcagccccaacagcaccgtggacagccagcagggcgagttctggaacagaggccagaccggcgccaacggcggcagaaagttcctggacccctgcagcctgcagctgcccctggccagcatcggctacagaagaagcagccagctggacttccagaacagccccagctggcccatggccagcaccagcgaggtgcccgccttcgagttcaccgccgaggactgcggcggcgcccactggctggacagacccgaggtggacgacggcaccagcgaggaggagaacgagagcgacagcagcagctgcagaaccagcaacagcagccagaccctgagcagctgccacaccatggagccctgcaccagcgacgagttcttccaggccctgaaccacgccgagcagaccttcaagaagatggagaactacctgagacacaagcagctgtgcgacgtgatcctggtggccggcgacagaagaatccccgcccacagactggtgctgagcagcgtgagcgactacttcgccgccatgttcaccaacgacgtgagagaggccagacaggaggagatcaagatggagggcgtggagcccaacagcctgtggagcctgatccagtacgcctacaccggcagactggagctgaaggaggacaacatcgagtgcctgctgagcaccgcctgcctgctgcagctgagccaggtggtggaggcctgctgcaagttcctgatgaagcagctgcaccccagcaactgcctgggcatcagaagcttcgccgacgcccagggctgcaccgacctgcacaaggtggcccacaactacaccatggagcacttcatggaggtgatcagaaaccaggagttcgtgctgctgcccgccagcgagatcgccaagctgctggccagcgacgacatgaacatccccaacgaggagaccatcctgaacgccctgctgacctgggtgagacacgacctggagcagagaagaaaggacctgagcaagctgctggcctacatcagactgcccctgctggccccccagttcctggccgacatggagaacaacgtgctgttcagagacgacatcgagtgccagaagctgatcatggaggccatgaagtaccacctgctgcccgagagaagacccatgctgcagagccccagaaccaagcccagaaagagcaccgtgggcaccctgttcgccgtgggcggcatggacagcaccaagggcgccaccagcatcgagaagtacgacctgagaaccaacatgtggacccccgtggccaacatgaacggcagaagactgcagttcggcgtggccgtgctggacgacaagctgtacgtggtgggcggcagagacggcctgaagaccctgaacaccgtggagtgctacaaccccaagaccaagacctggagcgtgatgccccccatgagcacccacagacacggcctgggcgtggccgtgctggagggccccatgtacgccgtgggcggccacgacggctggagctacctgaacaccgtggagagatgggacccccaggccagacagtggaacttcgtggccaccatgagcacccccagaagcaccgtgggcgtggccgtgctgagcggcaagctgtacgccgtgggcggcagagacggcagcagctgcctgaagagcgtggagtgcttcgacccccacaccaacaagtggaccctgtgcgcccagatgagcaagagaagaggcggcgtgggcgtgaccacctggaacggcctgctgtacgccatcggcggccacgacgcccccgccagcaacctgaccagcagactgagcgactgcgtggagagatacgaccccaagaccgacatgtggaccgccgtggccagcatgagcatcagcagagacgccgtgggcgtgtgcctgctgggcgacaagctgtacgccgtgggcggctacgacggccaggcctacctgaacaccgtggaggcctacgacccccagaccaacgagtggacccaggtggcccccctgtgcctgggcagagccggcgcctgcgtggtgaccgtgaagctgtag

SEQ ID NO: 188822 - protein, 182 aa, Artificial Sequence
  derived and/or modified sequence
MAEFPSKVSTRTSSPAQGAEASVSALRPDLGFVRSRLGALMLLQLVLGLLVWALIADTPYHLYPAYGWVMFVAVFLWLVTIVLFNLYLFQLHMKLYMVPWPLVLMIFNISATVLYITAFIACSAAVDLTSLRGTRPYNQRAAASFFACLVMIAYGVSAFFSYQAWRGVGSNAATSQMAGGYA

SEQ ID NO: 188823 - DNA, 549 bp, Artificial Sequence
  derived and/or modified sequence
atggctgaattcccatcaaaggtgtccacacggacaagttctccggcccagggcgccgaggcgtcagtgtcagcactcagaccagatttgggtttcgtaaggtctcgattgggcgctctgatgctgctgcaactggtgctggggcttcttgtctgggctttaatcgcagacaccccttaccacctctaccccgcatatggatgggttatgtttgtggcggtgttcctgtggcttgtaaccatagtgctgttcaacctgtatctctttcagctgcatatgaaactgtatatggtaccctggcccctggtgcttatgatcttcaacatcagtgccaccgttttgtacattaccgcctttattgcatgttccgccgccgtggacctgacctcactccgaggcactaggccatacaatcagcgggccgccgcttctttttttgcatgtctggtgatgattgcctacggcgtttctgccttcttttcctaccaggcttggcgcggagtgggatctaacgccgccacatcgcaaatggctggcggctatgcctag

SEQ ID NO: 188824 - DNA, 549 bp, Artificial Sequence
  derived and/or modified sequence
atggccgagttccccagcaaggtgtccaccaggaccagcagccctgcccagggcgctgaggcctctgtgtctgccctgcggccagacctgggctttgtgcgcagccggctgggcgccctgatgctgctgcagctggtgctgggcctgctggtgtgggccctgattgctgacaccccctaccacctgtacccagcctacggctgggtgatgtttgtggccgtgttcctgtggctggtgaccatcgtgctcttcaacctgtacctgttccagctgcacatgaagctgtacatggtgccctggcccctggtgctgatgatcttcaacatcagcgccaccgtgctgtacatcacagccttcatcgcctgcagcgctgctgtggacctgaccagcctgcggggcacccggccctacaaccagagagctgctgccagcttctttgcctgcctggtgatgattgcctacggcgtgtctgccttcttctcctaccaggcctggaggggcgtgggcagcaatgctgccaccagccagatggccggcggctacgcctag

SEQ ID NO: 188825 - DNA, 549 bp, Artificial Sequence
  derived and/or modified sequence
atggccgagttccccagcaaggtgagcacccggaccagcagccccgctcaaggagccgaggccagcgtcagcgccctcaggcccgacctcggattcgtgcggtcaagactcggcgctctgatgctgctccagctggtcctgggcctcctggtgtgggcgctgatcgccgacacaccgtaccacctgtaccctgcctacggatgggttatgttcgtggccgtcttcctgtggctggtgaccattgtactttttaacctctacttgttccagctgcacatgaaactgtacatggtgccctggcccttggtgcttatgatttttaacatatctgccaccgttctgtacattacagcctttattgcatgcagcgcggcggtcgaccttaccagtcttcgcgggacgcgaccttataaccagcgtgctgctgcctccttctttgcatgtctggtgatgatcgcgtatggggtgtctgctttcttcagctatcaagcgtggagaggagtaggaagcaatgctgctaccagtcaaatggccggcggatatgcctag

SEQ ID NO: 188826 - DNA, 549 bp, Artificial Sequence
  derived and/or modified sequence
atggctgagttcccttctaaagtgtcaacccgtacgtcaagcccagcacagggggcagaggcctccgttagcgccctaagacctgaccttggttttgttagatcacggttaggcgcactaatgctgctccagctggtgcttggacttctggtctgggcccttatagcggataccccgtatcacctgtacccagcttatggatgggtgatgtttgttgcggtatttctgtggctggtgacaatcgtgttattcaatttatacctctttcagctgcatatgaagctgtacatggtcccatggcccctggttctgatgatctttaatatctcggctacagtgctctatatcaccgcattcatcgcttgcagcgctgccgtggacttgacaagcctgaggggaacgcgcccttacaaccagcgggctgcagcatccttttttgcatgtctggtgatgatagcctatggcgtaagtgcttttttcagctaccaggcctggagaggcgttggtagcaatgccgctacgtcccagatggctggtgggtatgcttag

SEQ ID NO: 188827 - DNA, 1512 bp, Artificial Sequence
  derived and/or modified sequence
caggctcccagccccgacgcctcctgcagcgcctggagccacacagggatccggagcctgggggaaaagcggcgcgggagccggcacccaccgctggaggggcggcgacggcggccgtagcgacctcgggaggcaagcggagccgccatggccgagttcccgtcgaaagttagcacgcggaccagcagtcctgcgcagggcgccgaagcctcggtgtcggcgctgcgcccggacctgggcttcgtgcgctcccgcctcggggcgctcatgctgctgcagctggtgctggggctgctggtgtgggcgctgattgcggacaccccgtaccacctgtatccggcctatggctgggtgatgttcgtcgctgtcttcctctggctggtgacaatcgtcctcttcaacctctacctgtttcagctgcacatgaagttgtacatggttccctggccactggtgttaatgatctttaacatcagcgccaccgttctctacatcaccgccttcatcgcctgctctgcggcagttgacctgacatccctgaggggcacccggccttataaccagcgcgcggctgcctcgttctttgcgtgtttggtgatgatcgcctatggagtgagtgccttcttcagctaccaggcctggcgaggagtaggcagcaatgcggccaccagtcagatggctggcggctatgcctaaaccacctgtgccacggccccctctggggctgaagccgccgctgggtcacagagcagggtcaccctgcaagcctgaagctggggagccctgcgtggagtcagcccaacagggactgcatttgctcctctctgcccgtcagacataagctctcacagcgctaaggaagcaggcccaggctggcaggcatctcggcttgcaggaggccaactgctgagacctcttctccatcccccttattcagtggaagatgacgggggatctgaggctgtgtctctgccttgtctttagaggacttcagcgtccaagactggggcccacccttctcaccagcactaaatgcactaacaaggactccagacctgcagccccagacccgccgtagtataagcctaacaagcaacacgtagcaccttagtctttgttccaggagagctgagcaagctggtgaaaccactctccttcctttaaacaccgtttcaaccaacctctccctggagccaacctgtaaaaagtgggttgattgctgacagcatggtcttccctccctgcatttcagacataccagttactgaaagcaaatcagttttaagtgatttctcagtgctgaaaagcctgtccaggtttccttccctttcccaagcctctctctgtaatactccctttgggcgaagctaacatcggtgcctccccgaccttgctgactaggcacatgggacgcaaaggagggagggaagcaaggccttgcctggcgagttgtcatgtggttggtggtgactgttttattttttttaataaaaataaagatgagagaaatta

SEQ ID NO: 188828 - DNA, 549 bp, Artificial Sequence
  derived and/or modified sequence
atggccgagttccccagcaaggtgagcaccagaaccagcagccccgcccagggcgccgaggccagcgtgagcgccctgagacccgacctgggcttcgtgagaagcagactgggcgccctgatgctgctgcagctggtgctgggcctgctggtgtgggccctgatcgccgacaccccctaccacctgtaccccgcctacggctgggtgatgttcgtggccgtgttcctgtggctggtgaccatcgtgctgttcaacctgtacctgttccagctgcacatgaagctgtacatggtgccctggcccctggtgctgatgatcttcaacatcagcgccaccgtgctgtacatcaccgccttcatcgcctgcagcgccgccgtggacctgaccagcctgagaggcaccagaccctacaaccagagagccgccgccagcttcttcgcctgcctggtgatgatcgcctacggcgtgagcgccttcttcagctaccaggcctggagaggcgtgggcagcaacgccgccaccagccagatggccggcggctacgcctag

SEQ ID NO: 188829 - protein, 247 aa, Artificial Sequence
  derived and/or modified sequence
MSGKDRIEIFPSRMAQTIMKARLKGAQTGRNLLKKKSDALTLRFRQILKKIIETKMLMGEVMREAAFSLAEAKFTAGDFSTTVIQNVNKAQVKIRAKKDNVAGVTLPVFEHYHEGTDSYELTGLARGGEQLAKLKRNYAKAVELLVELASLQTSFVTLDEAIKITNRRVNAIEHVIIPRIERTLAYIITELDEREREEFYRLKKIQEKKKILKEKSEKDLEQRRAAGEVLEPANLLAEEKDEDLLFE

SEQ ID NO: 188830 - protein, 72 aa, Artificial Sequence
  derived and/or modified sequence
MSGKDRIEIFPSRMAQTIMKARLKGAQTGRNLLKKKSDALTLRFRQILKKIIETKMLMGEVMREAAFSLAEA

SEQ ID NO: 188831 - DNA, 744 bp, Artificial Sequence
  derived and/or modified sequence
atgagcggcaaggacagaatcgagatcttccccagcagaatggcccagaccatcatgaaggccagactgaagggcgcccagaccggcagaaacctgctgaagaagaagagcgacgccctgaccctgagattcagacagatcctgaagaagatcatcgagaccaagatgctgatgggcgaggtgatgagagaggccgccttcagcctggccgaggccaagttcaccgccggcgacttcagcaccaccgtgatccagaacgtgaacaaggcccaggtgaagatcagagccaagaaggacaacgtggccggcgtgaccctgcccgtgttcgagcactaccacgagggcaccgacagctacgagctgaccggcctggccagaggcggcgagcagctggccaagctgaagagaaactacgccaaggccgtggagctgctggtggagctggccagcctgcagaccagcttcgtgaccctggacgaggccatcaagatcaccaacagaagagtgaacgccatcgagcacgtgatcatccccagaatcgagagaaccctggcctacatcatcaccgagctggacgagagagagagagaggagttctacagactgaagaagatccaggagaagaagaagatcctgaaggagaagagcgagaaggacctggagcagagaagagccgccggcgaggtgctggagcccgccaacctgctggccgaggagaaggacgaggacctgctgttcgagtag

SEQ ID NO: 188832 - DNA, 219 bp, Artificial Sequence
  derived and/or modified sequence
atgagcggcaaggacagaatcgagatcttccccagcagaatggcccagaccatcatgaaggccagactgaagggcgcccagaccggcagaaacctgctgaagaagaagagcgacgccctgaccctgagattcagacagatcctgaagaagatcatcgagaccaagatgctgatgggcgaggtgatgagagaggccgccttcagcctggccgaggcctag

SEQ ID NO: 188833 - DNA, 744 bp, Artificial Sequence
  derived and/or modified sequence
atgtcgggcaaagaccgcattgaaatctttccatctagaatggcacaaaccatcatgaaagctcgccttaagggggcccaaacgggacgcaatctactgaaaaagaagtctgatgctcttactcttcggtttagacagattctgaagaagatcatcgaaacaaaaatgctcatgggcgaagtcatgagagaagctgctttctctctggccgaagccaaattcactgcgggcgactttagcactaccgtcattcagaacgtgaataaggctcaggtcaaaatacgcgcaaagaaggataacgtggcgggggttactctgccggtgtttgagcactaccacgagggaacagactcctacgaactgaccggtctggctcggggcggggaacaactcgccaaattgaaacgaaattacgcaaaagccgtcgagctcttagtggaacttgcaagtctgcagaccagttttgtgaccctcgatgaagctatcaaaatcactaaccggagagtcaatgctatcgagcacgtcattattccacgaatcgagcgtaccttagcatatattatcacagagttagacgagagggagcgcgaagagttctacagactgaagaaaatccaggagaaaaaaaagatcctcaaagaaaaatcagaaaaagatctggaacagcgacgagccgccggcgaggtcctggaacctgccaatcttcttgccgaagaaaaggacgaggacttgttattcgagtag

SEQ ID NO: 188834 - DNA, 219 bp, Artificial Sequence
  derived and/or modified sequence
atgagcggtaaggatcgtattgagatcttccctagcaggatggcccagactatcatgaaggcccgactgaaaggagcccaaaccgggcggaacctgctaaaaaagaagagtgacgctctgaccctgaggttcaggcagatcctcaagaagatcattgaaactaaaatgctaatgggcgaggtaatgagggaggcagccttttccctcgcggaggcctag

SEQ ID NO: 188835 - DNA, 744 bp, Artificial Sequence
  derived and/or modified sequence
atgtctgggaaggacagaattgagatcttccccagcaggatggcccagaccatcatgaaggcccggctgaagggggcccagacaggcaggaacctgctgaagaagaagagtgatgccctgaccctgcgcttccggcagatcctgaagaagatcatcgagaccaagatgctgatgggagaggtgatgagggaggccgccttcagcctggccgaggccaagttcaccgctggggacttcagcaccaccgtcatccagaatgtgaacaaggcccaggtgaagatccgggccaagaaggacaacgtggccggcgtgaccctgcctgtgtttgagcactaccacgagggcacagacagctatgagctgaccggcctggcccggggcggggagcagctggccaagctgaagaggaactatgccaaggctgtggagctgctggtggagctggccagcctgcagaccagctttgtgaccctggatgaggccatcaagatcaccaacagaagagtgaatgccatcgagcacgtgatcatcccccgcatcgagaggaccctggcctacatcatcacagagctggatgagcgggagcgggaggagttctaccgcctgaagaagatccaggagaagaagaagatcctgaaggagaagtctgagaaggacctggagcagaggagagctgctggggaggtgctggagcccgccaacctgctggccgaggagaaggatgaggacctgctgtttgaatag

SEQ ID NO: 188836 - DNA, 219 bp, Artificial Sequence
  derived and/or modified sequence
atgtctgggaaggacagaattgagatcttccccagcaggatggcccagaccatcatgaaggcccggctgaagggggcccagacaggcaggaacctgctgaagaagaagagtgatgccctgaccctgcgcttccggcagatcctgaagaagatcatcgagaccaagatgctgatgggagaggtgatgagggaggccgccttcagcctggccgaggcctag

SEQ ID NO: 188837 - DNA, 744 bp, Artificial Sequence
  derived and/or modified sequence
atgagcggcaaggaccggatcgagatcttccccagccggatggcccagacaatcatgaaagcacgactcaagggcgcacagaccggtaggaatctgttgaaaaaaaagagcgacgctctgacgttgcgttttcgccagattctgaaaaaaatcattgagaccaagatgctgatgggggaggtgatgcgggaagccgcctttagcttggccgaggctaagtttacagcaggcgacttctctacaacagtcattcaaaacgtaaataaagctcaggtgaagatcagagctaaaaaggacaacgttgccggggtaacgctccctgtgtttgaacactatcacgaggggaccgactcctatgagcttactgggcttgctaggggtggagagcagttggctaagctgaagagaaactacgctaaggctgtcgaactactggtcgagctggcctccctgcagactagttttgttactctagatgaggccatcaagattaccaatcgacgcgttaacgctatagagcacgtcatcatcccgaggatcgagcgtaccttggcctatatcatcaccgagctggacgagagagagcgggaggagttctatagactcaaaaagatccaagaaaaaaaaaagatactgaaggaaaagtctgaaaaggacctggaacagcggagggccgctggagaggtactggagccagcaaacctgttagctgaagaaaaggacgaggacctcctgttcgaatag

SEQ ID NO: 188838 - DNA, 219 bp, Artificial Sequence
  derived and/or modified sequence
atgagcggcaaggaccggatcgagatcttccccagccggatggcccagacaatcatgaaggctcgactgaaaggtgctcaaactgggaggaacctcctgaaaaagaagtccgatgccctgacacttagattccggcagatcctcaagaagattatagagaccaagatgcttatgggcgaagtgatgagggaggcagcctttagcctcgccgaagcgtag

SEQ ID NO: 188839 - DNA, 744 bp, Artificial Sequence
  derived and/or modified sequence
atgagtggtaaagacaggattgaaatattcccttcgcgcatggctcagaccattatgaaagcccgattgaaaggcgcacaaacaggacggaatttactgaagaagaagagtgatgccctgacactcagatttagacagatactcaagaagataattgagaccaaaatgctcatgggggaagtaatgcgggaagctgctttttccttagcagaggctaagttcactgctggcgacttttcaaccaccgtgatacagaatgttaacaaagcgcaggtgaagattcgagccaagaaagacaacgtggccggagtcacactgcctgtcttcgaacattaccatgaagggactgacagttatgagttaacagggctggccaggggtggcgagcagctggccaagttgaaacggaattacgccaaagctgtcgagctcctagttgagctggcctctctccagacaagcttcgtcaccttggacgaggcaattaaaataaccaatcgcagagtaaacgctatagagcacgtcatcatcccacggatcgaacgaacattggcctacataattaccgagctcgatgagcgcgaaagggaggaattttaccggctgaagaaaatccaagagaaaaagaagatattgaaggaaaaaagcgagaaggaccttgaacagagacgggcagctggcgaggtgctggagcccgcaaatctactggccgaggaaaaggatgaggacctattgtttgaatag

SEQ ID NO: 188840 - DNA, 219 bp, Artificial Sequence
  derived and/or modified sequence
atgagcggaaaagacagaattgaaatctttccctctaggatggcccaaacgatcatgaaagcacggctgaaaggggcacagacaggtaggaacttacttaaaaaaaagagtgacgccctcactctgaggtttcggcagattcttaagaagattatcgagaccaaaatgctgatgggagaggtgatgcgtgaggccgcattttctctagcggaagcatag

SEQ ID NO: 188841 - DNA, 1845 bp, Artificial Sequence
  derived and/or modified sequence
gagaacaaggacgaatgtagatcatggaaggacctgaaaagtactgtttctcgctatcttagctttagctaagtaaccttcaaggcgcgagaaagacataggactccgattccttgcctctgaagaatgaatcctctttcaaagtttcagctaaccatgagatggcgctgtgaccaaagacgaaaggtggagaaagacaaggcgtgcacgcttcgctcctagtctttggcctggcgcgtgccgcgtattgcgcagccgcagggaagctggatggggaggggttgggaggcgaaccggaattgaggggtggttccgcggtgcgcgcgcctcgacatccgggcaacgcctctgttctgtcctcccccttcgtcgcctgtgacaaccggaagcggaagtgaaaatgggtgtccctgctgcctcttagcaacaagaggggtcaagtgacacaaccagctgactcccgtagaggaagacactgtggaggccagttctggagctattgcagcctcggttgcccggccggggacccgagccgaaaagttatcgtcagaatgtcgggcaaagaccgaattgaaatctttccctcgcgaatggcacagaccatcatgaaggctcgtttaaagggagcacagacaggtcgaaacctcctgaagaaaaaatctgatgccttaactcttcgatttcgacagatcctaaagaagataatagagactaaaatgttgatgggcgaagtgatgagagaagctgccttttcactagctgaagccaagttcacagcaggtgacttcagcactacagttatccaaaatgtcaataaagcgcaagtgaagattcgagcgaagaaagataatgtagcaggtgttactttgccagtatttgaacattaccatgaaggaactgacagttatgaactgactggtttagccagaggtggggaacagttggctaaattaaagaggaattatgccaaagcagtggaactactggtggaactagcttctctgcagacttcttttgttactttggatgaagctattaagataaccaacaggcgtgtaaatgccattgaacatgtcatcattccccggattgaacgtactcttgcttatatcatcacagagctggatgagagagagcgagaagagttctataggttaaagaaaatacaagagaagaaaaagattctaaaggaaaaatctgagaaggacttggagcaaaggagagcagctggagaggtgttggagcctgctaatcttctggctgaagagaaggacgaggatcttctatttgaataatctttcctgttctggttctttgagaaaccctaacactggcttcattttaattcacagtgtgtaggtttgatttgtgtggctatttattttttggcctaagaatttcactggttgtaaaatttacctagatgtctatttatgggattacttttgcagaatcataatttagcaaccatttatcatggatgaaagagatctgtaaaacctgcccaggaacttacagaatttactttgcagaagcgttatcatactccatttacatctgtgttacacgtgatctgcttaccaagcatattaggaaatacctcttaggaagcattagcggtctcaggccaattactgtggagcagctttcattcctacccacttgcaaaccttggcgctgttgtctgagattgctgcagccattcttgttaccatggtacttctcaaactttgtgaaaacctgcacttttccttgcatgacaggttcctgtcttgtctgtcatgggagccattctgccaatttaaatgcgactgtggtataaacagtaaaatgatttaaaagtaa

SEQ ID NO: 188842 - DNA, 1750 bp, Artificial Sequence
  derived and/or modified sequence
tcccgtagaggaagacactgtggaggccagttctggagctattgcagcctcggttgcccggccggggacccgagccgaaaagttatcgtcagaatgtcgggcaaagaccgaattgaaatctttccctcgcgaatggcacagaccatcatgaaggctcgtttaaagggagcacagacaggtcgaaacctcctgaagaaaaaatctgatgccttaactcttcgatttcgacagatcctaaagaagataatagagactaaaatgttgatgggcgaagtgatgagagaagctgccttttcactagctgaagccaagttcacagcaggtgacttcagcactacagttatccaaaatgtcaataaagcgcaagtgaagattcgagcgaagaaagataatgtagcaggtgttactttgccagtatttgaacattaccatgaaggaactgacagttatgaactgactggtttagccagaggtggggaacagttggctaaattaaagaggaattatgccaaagcagtggaactactggtggaactagcttctctgcagacttcttttgttactttggatgaagctattaagataaccaacaggcgtgtaaatgccattgaacatgtcatcattccccggattgaacgtactcttgcttatatcatcacagagctggatgagagagagcgagaagagttctataggttaaagaaaatacaagagaagaaaaagattctaaaggaaaaatctgagaaggacttggagcaaaggagagcagctggagaggtgttggagcctgctaatcttctggctgaagagaaggacgaggatcttctatttgaataatctttcctgttctggttctttgagaaaccctaacactggcttcattttaattcacagtgtcctgctgaactgtaaattctaccatctccactttgcagatgaggaaattgagactttgacaagtcaaagagcacagctggaatgcaagtcaaatatgtacaaggatatccacaacactgttcgcagctacaagctgaggtacaaggtgcctcaaaagcttgagagaagcagaaatagaatagaatcctgacctgtgaaaacaatgactctgcaataaggtgcagagttggctggatcactataatatcctagggccaggcgcagtggctcacgcctgtaatcccagcactttgggaggccgaggtgggtggatcacgaggtcaggagatcaagaccatcctggctaacacggtgaaaccccatctctactaaaagtacaaaaaattagctgggtatggtggcgggcacctgtagccccagctactccgaaggctgaggcaggagaatggcgtgaacccaggaggcagagcttgcagtgagctgagatcgtgccactgcactccagcctgggcaacagtgcaagactccatctcaaaaaaaaaaaagcactataatatctaagaaatttggtttgtgtttattagtaaatatgctagatcatcaaagatttaatctagaccttaaaatttgaggtttccgtaggctttattattatatgatacctaatgtttaactgatattttaagccatgtaaacaaagaatacttctgaatgtttcactaaatttcttgagtttttttttttaacttaacctcactaggcctcaatattcagaatgtgaaacaggggagttggattggtgattgctgatatttttttccagctgtaaaataaaggcaatgggtccatttaa

SEQ ID NO: 188843 - DNA, 582 bp, Artificial Sequence
  derived and/or modified sequence
agagtctgggtcctccgagaacaaggacgaatgtagatcatggaaggacctgaaaagtactgtttctcgctatcttagctttagctaagtaaccttcaaggcgcgagaaagacataggactccgattccttgcctctgaagaatgaatcctctttcaaagtttcagctaaccatgagatggcgctgtgaccaaagacgaaagcggaagtgaaaatgggtgtccctgctgcctcttagcaacaagaggggtcaagtgacacaaccagctgactcccgtagaggaagacactgtggaggccagttctggagctattgcagcctcggttgcccggccggggacccgagccgaaaagttatcgtcagaatgtcgggcaaagaccgaattgaaatctttccctcgcgaatggcacagaccatcatgaaggctcgtttaaagggagcacagacaggtcgaaacctcctgaagaaaaaatctgatgccttaactcttcgatttcgacagatcctaaagaagataatagagactaaaatgttgatgggcgaagtgatgagagaagctgccttttcactagctgaagccaa

SEQ ID NO: 188844 - DNA, 744 bp, Artificial Sequence
  derived and/or modified sequence
atgagtggaaaggaccgaattgagattttccccagtaggatggcccagactattatgaaggcccgactgaagggagcccagaccggcagaaatctactgaagaaaaaatctgatgccctaacactgcggttccgtcagatccttaagaaaatcattgaaaccaagatgttgatgggagaagtaatgcgcgaggctgccttcagcctggccgaggctaaattcacggcaggcgatttttctacgaccgtgattcagaatgtgaataaggcacaagtgaagatccgcgcgaagaaggataacgtcgctggggtcacactgcctgtatttgaacactaccacgagggcaccgacagttatgagcttacaggactggctagggggggtgagcagttggccaagcttaagcggaattatgccaaggctgttgaactgcttgtggagctagcatcactccaaacttctttcgtcaccctggatgaagcaatcaaaatcactaacaggcgggtcaacgccattgagcacgtgatcatcccccgtatagagcgaaccctcgcttatatcatcactgaattagacgaacgggagcgcgaggagttttatcgactcaagaagatccaggagaaaaaaaaaattctcaaagagaagtcagagaaggacctggagcagagacgggcagccggggaagttctggagcccgccaatcttctcgctgaggaaaaggacgaggatcttctgttcgaatag

SEQ ID NO: 188845 - DNA, 744 bp, Artificial Sequence
  derived and/or modified sequence
atgagcggcaaggaccggatcgagatcttccccagccggatggcccagacaattatgaaggcgcgcctcaagggggcccagacaggccgaaaccttcttaaaaaaaaatccgacgcactcaccctgcgctttcggcaaattcttaagaagatcatcgaaaccaaaatgctcatgggggaagtcatgcgagaggcggcgttcagcttagccgaggcaaagtttacggccggcgacttttcgactacagttatccaaaacgtgaacaaggcgcaagtgaaaatccgcgctaaaaaggacaacgtggctggagtcactttgcctgtcttcgagcattatcacgagggtaccgactcatatgagctgaccggcctggctagagggggcgaacagctcgcgaaattaaagcgaaactacgccaaggcggtcgaactgcttgtagagctggcgtcccttcaaacatctttcgtgactctcgacgaggcaatcaaaatcaccaacagacgcgtgaacgccatcgagcacgtcataatcccgcggattgagcgcacattggcttatataatcaccgaattagacgaaagagagcgtgaggaattttaccgactgaagaagatccaggagaagaagaagatactgaaagaaaagtccgagaaggatttggagcagcgaagggccgccggcgaagttctggaaccagccaacctcttagccgaagagaaggatgaggacctgctatttgagtag

SEQ ID NO: 188846 - DNA, 744 bp, Artificial Sequence
  derived and/or modified sequence
atgtccggcaaggatcgcattgagatatttccatcacggatggcccagaccattatgaaggctaggctgaaaggcgcacagacaggaagaaaccttctgaagaaaaaatcagacgcactgacactccggttccgccaaatcctgaaaaaaatcatcgagactaagatgttgatgggcgaggtaatgagggaggctgcattcagcttagcggaggctaaatttacagccggtgatttctccactaccgtcatccaaaatgtgaacaaggctcaggtcaaaattcgcgcaaagaaggacaacgtcgccggtgtgacgttgccagtgttcgaacattaccacgaaggcaccgattcatatgaactaaccggactggccagaggaggcgagcaactcgccaagctcaaacgcaattatgcaaaggctgtcgagttgctggttgagctggcaagtctgcaaacttcgttcgtgacacttgacgaagccataaagatcacgaatcgtcgtgtgaacgcgattgagcacgtcatcatacctcgaatcgagaggaccttggcctatataattactgaactggacgaacgagagcgtgaagaattctatcgcctcaagaaaattcaggagaaaaagaagattctaaaggagaaaagtgaaaaggacctggagcaaagacgggctgctggcgaggtgcttgaacccgcaaatctgctggcagaggaaaaagacgaggatctgttgtttgagtag

SEQ ID NO: 188847 - protein, 288 aa, Artificial Sequence
  derived and/or modified sequence
MAAAAYVDHFAAECLVSMSSRAVVHGPREGPESRPEGAAVAATPTLPRVEERRDGKDSASLFVVARILADLNQQAPAPAPAERREGAAARKARTPCRLPPPAPEPTSPGAEGAAAAPPSPAWSEPEPEAGLEPEREPGPAGSGEPGLRQRVRRGRSRADLESPQRKHKCHYAGCEKVYGKSSHLKAHLRTHTGERPFACSWQDCNKKFARSDELARHYRTHTGEKKFSCPICEKRFMRSDHLTKHARRHANFHPGMLQRRGGGSRTGSLSDYSRSDASSPTISPASSP

SEQ ID NO: 188848 - DNA, 6817 bp, Artificial Sequence
  derived and/or modified sequence
gcgcggcgaagctgcggccgcgacttggcgaggtggtccctaacgttgccgctcggcatccttagaaccggccgcccctgacgccgcgcggggaccccagtcgcccgcgcgccccatgcgctcactcttcggtgcccggccgggccggcgcctcgcagacgcggagccgcgcgggtgacggcacaggcggctgcgcgcccagcccagcccagcccagcccgaggagagggcgcgccgcgcccccgccccccgcccgctctcccgaggccgtgggtgcggatgcgcggctgacgactcgcagcaagagcaccgccgccggccccagcccgcagcatggcagccgccgcctatgtggaccacttcgccgccgagtgcctcgtgtccatgtcgagccgcgcggtcgtgcacgggccgcgggaggggccggagtcccggcccgagggcgcggccgtggccgccacccccacgctgccccgcgtcgaggagcgccgcgacggtaaggacagcgcctcgctcttcgtggtggcgcggatcctagcggacctcaaccagcaagcgccggcgcccgccccggcggagcgcagggagggcgccgcggcccggaaggcgaggaccccctgccgcctgccgccgcccgcccccgagcccacctcccccggcgccgaaggcgcggcggccgcgccccccagcccggcgtggagcgagccggagcccgaggcggggctggagcccgagcgggagccggggcccgcggggagcggcgagcccggcctcagacaaagggtccggcggggccgaagtcgcgccgacctcgagtccccgcagaggaagcacaagtgccactacgcgggctgcgagaaagtttacgggaaatcttcgcacctcaaggcgcacctgagaactcacacaggtgagaggcccttcgcctgcagctggcaggactgcaacaagaagttcgcgcgctccgacgagctggcgcggcactaccgcacacacacgggcgagaagaagttcagctgccccatctgcgagaagcgcttcatgcgcagcgaccacctgaccaagcacgcgcgccgccacgccaacttccacccgggaatgctgcagcggcgcggcgggggctcgcggaccggctccctcagcgactacagccgctccgacgccagcagccccaccatcagcccggccagctcgccctgagcccgccacagccatgagcagccgctcccaccccctcgtgagtccctggcctttccttttgtaataagaaagaagagagagaacttgatgcaaagtccacgaaaaaacaatttttttcacctcaggtgtcaaagtaaatttgttaaaaaaacaaaaaaaacacaaaaatttcaaaaaacaccacccaccaaattgcacaatagatacacccacaaagttgagattcagcgttgttgaaccccctttctcagggatggacacgtttcacgaggtcagtgaggacaccccttcctgccgccttactctgtacatagatttgcactctggagttttctgttaggttcgggaacacgctggggacagagcaggccagccagtctggtggagctcagcgtctggctggctggccagcctgtgggtctgttgggagcagatgtgctcactgacgtttgtgcctccagggcagattcctaagcagctggcctgacctcttcctgcccagcccccaacccagtctctggcctctgcccaacgagcctggctgggcttgcaacgcagctgattctgagacaggcccctgcagagggatgccttaaagctgtccctggctggaggagcactccaccttggggatagtggagggggccttcagccctctgcaccctgcctgcctcacaccccgccttcaggagccctctcctacggcgctagggagcactggaagcagagatgccagccctggctgagcgtagcactgcaccgtccgacctccgaggcaggggccggggtcacacctgccaggactccgcttctccgtgtcccagcagaaggcatgcaggaccctgtcactactatacctgggcctctgatggggaattctggtcttctaaaaagatgttagaaattcctggtggcacatccagttccgagtttgcccgcatgggcacttttgttggaaacagtgggcaggtcatggggcctcctcatcagagggtctgtgtgagcggctgtgcatgtggcagcgcaccatgcttcacagagaccattctgtagcaagagaccggaacattgtgacttggaccttttcaggagtggcgcggatgttacaggaaatgctgtcggagagcgcgcattctatttcctccgcagggaatgccagatagaaagttgcgggcaacacttttctcagacccaccatgtccccaactcagacttagcaaacctccagcctctccgtttcccctggactcctcctcccttttcctcctgcttctccttgtcctgcctggaggctccaggccacacccagctggtggggctgctccagtgccccatcaccggccttctcctggcaggagaggaggagcagagagctgggtcctgggctgggattcgagccctgggcgggggtcagtcaagccgtggtccagcaaactcctctgcagatggctggagtgttgacccaggcttgtggcccaggtatcaccttcccttcctcctgagagttgaggcctgtaaatacaagggcccaggacagagtgtgtgcgtgcgtgtgggtgtgtgcgcgcgtgagcacacacgcgtgtgttggggggggtggggggattggggtggactcagggtatcttgccagagatacctgttttgatgagtacctattttgatgcaaaggaacggccctgggacctcagagggccacagatgggcttcctgggcctagcgtgccttggttgtggccatcctgcttctactcagccctgccatgctatggggtgcagcacaaacccaggacccaggcctagccactgcccacagctgatggtcactgttttggctggctccagagtggacaggtacgctctgtccacagcagctgctcaggcacagtatgccgtcaggtgcccgcttcttaccactgtgtgtcagctgggattggccgacagcgtggtggtgacttctaggtagaccgatggaccctaaattgggcagtggcattgtttctgctgtggtgggaactggcagggagagggtcacctccactctggttggatgcggagctggtccctctggctgccatgctgtgttggggctctctgacctccctgcttgcattgggtctgggagagagagtggaatatttggtagggaccttgacagaagagagccctgggtgcttgtggtgcaaagatcttcatgcccagttccaaagtgaggtccctcccaaagttgttttcgtgtgaggcagagaaagccacactctgaatacattttatgtctcaggaattcacattccaggttcaggaattttattccaaagtcctttggtgcactcaccgtccaccgttccccaaggcagggagagggagtggcccgtccctgggaggctggcaaagtgctctccagggaggggtcagacgtccttgtgatctgcccagggtgtcacggaaggagattttctagctccacatctgtctgcacataggaaggaaaagataggactctaaacctagtcatcttggaataaaaagaagagctggtttgttttagagcagggcggggggtgggggagggaagcgggtgttggctgtttccaaagagagcacttaatttaatttttcctttaaatgacccagggctgttccgtctgatagatggaagggtaacattgccttaaaacagaaatatgcaggcgttggctatttttggcataagagcgtgtcttcattcccaaagtggttctcgtttaatggcagggtgcggtccttaggccccggcctggactgggaaatgggggtagggcaccaggagagaaatcctcctgggtactcctggccagaccctcctgaatcatctgcggcttaaactcatctcgcttgaagggcagggagaaacccatgaatctcaggcacggttcacaggggtcctcaagggcaggtttccatttcatcatgaagtgagggactcctgtggaagagggtggtgggccttggaacgctgcctccactgaggcgggcacacaaggcggaccctcctgaaacagcctccattttcttcaaacatgcagaatgttttcccagactgcgtctatttcagggtcttccatttttgtggtttatggccatgcttgccagttttggtggggttgaggaacccataggactcatagaaataatagtgaaaactcaaacccttattttgggacttcagttctcgtggtccataggggcagagatgtcaaagtgaaggttgcctgagtgaagggagagttcccctataaaaggcctaaaattgatctggggctcagccatcaaggggctggtgttgctcctgtcccagacaaggaagcccctctttacatcagccatattaggggaacggttgtcagctccccaaatgcctactggatcctacagccatacaggaaaacagacggacacagccctttccttaaagagccctggggtcctgtcctgcaggatgctgcataggaatgggcagagatgtcctggatgggaacatggtcctggaggtgccctacctgcatcctgctgcacccccacccacgacactcgagtgcaagatcgcctcactcctaaccctgactttattcccaggccccacaccgaggcaggtgcaggattcgccatggtgcagcctccgggtacaaacatctgaggcactggcgatcccagtccttgcagcaccctgaacacagctcagaccagtgaggggtgattcagaggtggggatgggcagagagggctggccactctgcctcaggacttgacctcaagtgttctgtctccccacccggtgtgtccagaagaccagcctctttcttgccagaagcaggtgctaagatggactgcacagggtcccggcactccctcgggacccattcaggatctcagctgggcaggggtgccacccaacaggaagatgtgatctgagcaatagtgtggccttgtttctccgcttctggttgtggctgtgtgtacagggctacctattttgacttctgacaggtgtcactgattttctttcccccatttaaaaaaggtcatttagtcaaagacacagtgctagaggtttaaagggtgtaatgtgttggtcacatcacaaccagtaagaaacgcttggtaggttatccacatcttttgctgactgtttccatatacaattctggtcaccatattttccaaagctaaaatctgaggcgtgggctgatggtttttgaaatcaggattaccccaggaagaaccaggtcctattactaattttcctgattctgaggctctgaaggcttgtctgagacacattccggagacctttgtaccagaacttggatgcatagtccaccttactactgatacacgcctgagcaccctttagggcgaggcgccgcctcctgcctgctgtcctgtccctcagcatcagaagagttgaattcagcaggagacgggagcccggtgtccatgagggaagaggggtcgcgcttggtttctactgacccccatgaagatttcagacttgcagtgcggccacctggccctgccctgcctctctctttctcatacagctttaaaactttactacttttatttaaaaatgaactggatgggagagaagtagcgtcccctaccctacaagtcacacattccggggaggggggtggggggtggaggcaggaagtcatgggggtgggggtgggagcacgggaacagctttcttaaggcctcagggtcctgttttccctggcctcttctagagggcccgtggacaggtcgcagtgcgtgcttatttggaaaccaggtgtgtgagccgaatgcctgccaggccatgcactcagcagaggagcccttgtacctggctgccctgagaggagcaagaggccacctcccatgtggctctagacaccacgtgggctcattagccccagcgtctgtgccggctccaggtgcctgcctctgggtgtgtgagtgggagactttgctccctggcctcatcctagagaggcccctggtgcctagtgctgaggcctctggggctggaaagcctcagcagaaaggaggcactactgagcaactatgcattgtcattgtcgggtttggggctttcggtggttccttggtgactgggaattgcttgtgtgcatgtgttgggtgcatgcttccgggtctcagctgccccaggcccgcacaggcaaccccttcccatccaaagccattggtggagcttctctggaatcatttgccaaaagcccaaggcagaatccaagggtccaagaccatttccatggagctcatgtttttcttttctgtaggaacttttttttaaccagcacccaccataattccgaaggccacgtttcatctttcctggatcactacagtgaagtattacagttgtacagttcccagtctggccttggcttgctcggataaaactttgtatgtattttgtatggcatagattctatattgtaatgatgtcctatgcaaaaagaaaaattaacgaaattgtaaattttattgttttaacgtgtatgcatgtttagtgacgtttacattttgaaataaaatttatgattcattattttaaaaaaaaaaaaaaaaaa

SEQ ID NO: 188849 - DNA, 867 bp, Artificial Sequence
  derived and/or modified sequence
atggcagcagctgcttacgtggaccactttgccgctgagtgcctcgtgtctatgagcagcagagccgtagtgcatggaccgagggaaggtcctgagtctagacctgaaggagccgcagtagcggccacgccaactcttccacgagtggaagaacgaagggacggtaaggacagcgcatccctgtttgtcgttgccaggattctggctgatctaaatcagcaggccccagcccctgctccggccgagcgtcgagagggagccgcagctcggaaggcccggaccccctgccgcctccctccccccgcgccagaaccgaccagcccaggagccgaaggcgcagctgcagcccccccaagccccgcttggagcgaacctgagccagaggctggtctcgagcctgagagagagcctggccctgccggctcgggcgagccaggcttaagacagagggtgaggcggggcagaagcagagctgacctggaatctccccagcgcaaacacaagtgtcattacgctgggtgcgagaaggtctatgggaagagttctcacctgaaagcgcatctgaggactcacacgggagagcggcccttcgcttgctcctggcaggactgtaacaaaaagtttgctcgcagcgacgaacttgcccgccattatcggacacataccggggagaagaagttcagctgccctatatgcgaaaagcgattcatgaggtccgatcatctgactaaacacgcaaggcgccatgccaattttcaccccgggatgctgcagaggcggggggggggaagccgcacagggtctctttctgactactctaggtcagacgcgtcgagcccaaccatctctcccgcttcctcaccttag

SEQ ID NO: 188850 - DNA, 6825 bp, Artificial Sequence
  derived and/or modified sequence
cggcagctgtcccgcctgccacaatgcgcggcgaagctgcggccgcgacttggcgaggtggtccctaacgttgccgctcggcatccttagaaccggccgcccctgacgccgcgcggggaccccagtcgcccgcgcgccccatgcgctcactcttcggtgcccggccgggccggcgcctcgcagacgcggagccgcgcgggtgacggcacaggcggctgcgcgcccagcccagcccagcccagcccgaggagagggcgcgccgcgcccccgccccccgcccgctctcccgaggccgtgggtgcggatgcgcggctgacgactcgcagcaagagcaccgccgccggccccagcccgcagcatggcagccgccgcctatgtggaccacttcgccgccgagtgcctcgtgtccatgtcgagccgcgcggtcgtgcacgggccgcgggaggggccggagtcccggcccgagggcgcggccgtggccgccacccccacgctgccccgcgtcgaggagcgccgcgacggtaaggacagcgcctcgctcttcgtggtggcgcggatcctagcggacctcaaccagcaagcgccggcgcccgccccggcggagcgcagggagggcgccgcggcccggaaggcgaggaccccctgccgcctgccgccgcccgcccccgagcccacctcccccggcgccgaaggcgcggcggccgcgccccccagcccggcgtggagcgagccggagcccgaggcggggctggagcccgagcgggagccggggcccgcggggagcggcgagcccggcctcagacaaagggtccggcggggccgaagtcgcgccgacctcgagtccccgcagaggaagcacaagtgccactacgcgggctgcgagaaagtttacgggaaatcttcgcacctcaaggcgcacctgagaactcacacaggtgagaggcccttcgcctgcagctggcaggactgcaacaagaagttcgcgcgctccgacgagctggcgcggcactaccgcacacacacgggcgagaagaagttcagctgccccatctgcgagaagcgcttcatgcgcagcgaccacctgaccaagcacgcgcgccgccacgccaacttccacccgggaatgctgcagcggcgcggcgggggctcgcggaccggctccctcagcgactacagccgctccgacgccagcagccccaccatcagcccggccagctcgccctgagcccgccacagccatgagcagccgctcccaccccctcgtgagtccctggcctttccttttgtaataagaaagaagagagagaacttgatgcaaagtccacgaaaaaacaatttttttcacctcaggtgtcaaagtaaatttgttaaaaaaacaaaaaaaacacaaaaatttcaaaaaacaccacccaccaaattgcacaatagatacacccacaaagttgagattcagcgttgttgaaccccctttctcagggatggacacgtttcacgaggtcagtgaggacaccccttcctgccgccttactctgtacatagatttgcactctggagttttctgttaggttcgggaacacgctggggacagagcaggccagccagtctggtggagctcagcgtctggctggctggccagcctgtgggtctgttgggagcagatgtgctcactgacgtttgtgcctccagggcagattcctaagcagctggcctgacctcttcctgcccagcccccaacccagtctctggcctctgcccaacgagcctggctgggcttgcaacgcagctgattctgagacaggcccctgcagagggatgccttaaagctgtccctggctggaggagcactccaccttggggatagtggagggggccttcagccctctgcaccctgcctgcctcacaccccgccttcaggagccctctcctacggcgctagggagcactggaagcagagatgccagccctggctgagcgtagcactgcaccgtccgacctccgaggcaggggccggggtcacacctgccaggactccgcttctccgtgtcccagcagaaggcatgcaggaccctgtcactactatacctgggcctctgatggggaattctggtcttctaaaaagatgttagaaattcctggtggcacatccagttccgagtttgcccgcacgggcacttttgttggaaacagtgggcaggtcatggggcctcctcatcagagggtctgtgtgagcggctgtgcatgtggcagcgcaccatgcttcacagagaccattctgtagcaagagaccggaacattgtgacttggaccttttcaggagtggcgcggatgttacaggaaatgctgtcggagagcgcgcattctatttcctccgcagggaatgccagatagaaagttgcgggcaacacttttctcagacccaccatgtccccaactcagacttagcaaacctccagcctctccgtttcccctggactcctcctcccttttcctcctgcttctccttgtcctgcctggaggctccaggccacacccagctggtggggctgctccagtgccccatcaccggccttctcctggcaggagaggaggagcagagagctgggtcctgggctgggattcgagccctgggcgggggtcagtcaagccgtggtccagcaaactcctctgcagatggctggagtgttgacccaggcttgtggcccaggtatcaccttcccttcctcctgagagttgaggcctgtaaatacaagggcccaggacagagtgtgtgcgtgcgtgtgggtgtgtgcgcgcgtgagcacacacgcgtgtgttggggggggtggggggattggggtggactcagggtatcttgccagagatacctgttttgatgagtacctattttgatgcaaaggaacggccctgggacctcagagggccacagatgggcttcctgggcctagcgtgccttggttgtggccatcctgcttctactcagccctgccatgctatggggtgcagcacaaacccaggacccaggcctagccactgcccacagctgatggtcactgttttggctggctccagagtggacaggtacgctctgtccacagcagctgctcaggcacagtatgccgtcaggtgcccgcttcttaccactgtgtgtcagctgggattggccgacagcgtggtggtgacttctaggtagaccgatggaccctaaattgggcagtggcattgtttctgctgtggtgggaactggcagggagagggtcacctccactctggttggatgcggagctggtccctctggctgccatgctgtgttggggctctctgacctccctgcttgcattgggtctgggagagagagtggaatatttggtagggaccttgacagaagagagccctgggtgcttgtggtgcaaagatcttcatgcccagttccaaagtgaggtccctcccaaagttgttttcgtgtgaggcagagaaagccacactctgaatacattttatgtctcaggaattcacattccaggttcaggaattttattccaaagtcctttggtgcactcaccgtccaccgttccccaaggcagggagagggagtggcccgtccctgggaggctggcaaagtgctctccagggaggggtcagacgtccttgtgatctgcccagggtgtcacggaaggagattttctagctccacatctgtctgcacataggaaggaaaagataggactctaaacctagtcatcttggaataaaaagaagagctggtttgttttagagcagggcggggggtgggggagggaagcgggtgttggctgtttccaaagagagcacttaatttaatttttcctttaaatgacccagggctgttccgtctgatagatggaagggtaacattgccttaaaacagaaatatgcaggcgttggctatttttggcataagagcgtgtcttcattcccaaagtggttctcgtttaatggcagggtgcggtccttaggccccggcctggactgggaaatgggggtagggcaccaggagagaaatcctcctgggtactcctggccagaccctcctgaatcatctgcggcttaaactcatctcgcttgaagggcagggagaaacccatgaatctcaggcacggttcacaggggtcctcaagggcaggtttccatttcatcatgaagtgagggactcctgtggaagagggtggtgggccttggaacgctgcctccactgaggcgggcacacaaggcggaccctcctgaaacagcctccattttcttcaaacatgcagaatgttttcccagactgcgtctatttcagggtcttccatttttgtggtttatggccatgcttgccagttttggtggggttgaggaacccataggactcatagaaataatagtgaaaactcaaacccttattttgggacttcagttctcgtggtccataggggcagagatgtcaaagtgaaggttgcctgagtgaagggagagttcccctataaaaggcctaaaattgatctggggctcagccatcaaggggctggtgttgctcctgtcccagacaaggaagcccctctttacatcagccatattaggggaacggttgtcagctccccaaatgcctactggatcctacagccatacaggaaaacagacggacacagccctttccttaaagagccctggggtcctgtcctgcaggatgctgcataggaatgggcagagatgtcctggatgggaacatggtcctggaggtgccctacctgcatcctgctgcacccccacccacgacactcgagtgcaagatcgcctcactcctaaccctgactttattcccaggccccacaccgaggcaggtgcaggattcgccatggtgcagcctccgggtacaaacatctgaggcactggcgatcccagtccttgcagcaccctgaacacagctcagaccagtgaggggtgattcagaggtggggatgggcagagagggctggccactctgcctcaggacttgacctcaagtgttctgtctccccacccggtgtgtccagaagaccagcctctttcttgccagaagcaggtgctaagatggactgcacagggtcccggcactccctcgggacccattcaggatctcagctgggcaggggtgccacccaacaggaagatgtgatctgagcaatagtgtggccttgtttctccgcttctggttgtggctgtgtgtacagggctacctattttgacttctgacaggtgtcactgattttctttcccccatttaaaaaaggtcatttagtcaaagacacagtgctagaggtttaaagggtgtaatgtgttggtcacatcacaaccagtaagaaacgcttggtaggttatccacatcttttgctgactgtttccatatacaattctggtcaccatattttccaaagctaaaatctgaggcgtgggctgatggtttttgaaatcaggattaccccaggaagaaccaggtcctattactaattttcctgattctgaggctctgaaggcttgtctgagacacattccggagacctttgtaccagaacttggatgcatagtccaccttactactgatacacgcctgagcaccctttagggcgaggcgccgcctcctgcctgctgtcctgtccctcagcatcagaagagttgaattcagcaggagacgggagcccggtgtccatgagggaagaggggtcgcgcttggtttctactgacccccatgaagatttcagacttgcagtgcggccacctggccctgccctgcctctctctttctcatacagctttaaaactttactacttttatttaaaaatgaactggatgggagagaagtagcgtcccctaccctacaagtcacacattccggggaggggggtggggggtggaggcaggaagtcatgggggtgggggtgggagcacgggaacagctttcttaaggcctcagggtcctgttttccctggcctcttctagagggcccgtggacaggtcgcagtgcgtgcttatttggaaaccaggtgtgtgagccgaatgcctgccaggccatgcactcagcagaggagcccttgtacctggctgccctgagaggagcaagaggccacctcccatgtggctctagacaccacgtgggctcattagccccagcgtctgtgccggctccaggtgcctgcctctgggtgtgtgagtgggagactttgctccctggcctcatcctagagaggcccctggtgcctagtgctgaggcctctggggctggaaagcctcagcagaaaggaggcactactgagcaactatgcattgtcattgtcgggtttggggctttcggtggttccttggtgactgggaattgcttgtgtgcatgtgttgggtgcatgcttccgggtctcagctgccccaggcccgcacaggcaaccccttcccatccaaagccattggtggagcttctctggaatcatttgccaaaagcccaaggcagaatccaagggtccaagaccatttccatggagctcatgtttttcttttctgtaggaacttttttttaaccagcacccaccataattccgaaggccacgtttcatctttcctggatcactacagtgaagtattacagttgtacagttcccagtctggccttggcttgctcggataaaactttgtatgtattttgtatggcatagattctatattgtaatgatgtcctatgcaaaaagaaaaattaacgaaattgtaaattttattgttttaacgtgtatgcatgtttagtgacgtttacattttgaaataaaatttatgattcattatttta

SEQ ID NO: 188851 - DNA, 867 bp, Artificial Sequence
  derived and/or modified sequence
atggctgctgctgcctacgtggaccactttgctgctgaatgtctggtgtccatgagcagcagagctgtggtgcacggcccccgggagggccctgagagcaggcctgagggcgctgctgtggccgccacccccaccctgccccgggtggaggagaggagagatggcaaggacagcgccagcctgtttgtggtggcccgcatcctggccgacctgaaccagcaggccccagccccagccccagctgagcggcgggagggcgccgccgccaggaaggcccggaccccctgccgcctgcccccaccagcccctgagcccaccagccctggagctgagggcgctgctgctgccccacccagccctgcctggagcgagcctgagcctgaggccggcctggagcctgagcgggagcccggccctgctggcagcggggagcccggcctgcggcagagggtgcggcggggccgcagcagagctgacctggagagcccccagaggaagcacaagtgccactacgccggctgtgagaaggtgtatggcaagagcagccacctgaaggcccacctgcggacccacactggagagcggccctttgcctgctcctggcaggactgcaacaagaagtttgcccggagtgatgagctggcccggcactaccgcacccacactggagagaagaagttcagctgccccatctgtgagaagcgcttcatgagaagtgaccacctgaccaagcacgccaggagacatgccaacttccaccctggcatgctgcagaggagaggaggcggcagcaggacaggcagcctgagtgactacagcagaagtgatgccagcagccccaccatcagccctgccagcagcccctag

SEQ ID NO: 188852 - DNA, 867 bp, Artificial Sequence
  derived and/or modified sequence
atggccgccgccgcctacgtggaccacttcgccgccgagtgcctggtcagcatgtcctccagagcagtggtacacgggccaagggaagggcccgaaagccggcccgaaggcgccgcagtggcagccacgcctacgctcccgagggtcgaagagagacgggacggtaaggacagcgcgagcctctttgtggtcgctcgaatactcgctgatcttaaccaacaagcaccagcccctgctcccgcagagcgacgcgagggcgccgccgctaggaaggcccgcactccctgtagacttcctccccctgctcctgagccaacctccccaggtgctgaaggcgcagcagctgcaccgccttctcccgcctggtcagaacctgagcccgaagccggcctggagcccgaaagggagccgggccctgcgggatccggcgaaccgggactcaggcagagagtgcggcgcggcaggagcagggccgacctcgaaagcccccagcggaaacataagtgtcactatgcagggtgtgagaaagtgtatgggaaatcgtctcacttgaaagctcatctgaggacccacaccggggaaaggccgtttgcctgctcctggcaggactgcaataaaaaattcgcgcggtctgatgagctagctcgccactatcggacccacacaggggagaagaagttcagctgccctatctgtgagaagcgcttcatgcgctccgatcacttgaccaaacatgcacggcggcatgcgaatttccacccaggcatgcttcaaaggcggggcgggggttcgcgcaccggctctctgtcagattacagcagatcagacgctagtagcccaactatcagccccgccagcagcccttag

SEQ ID NO: 188853 - DNA, 867 bp, Artificial Sequence
  derived and/or modified sequence
atggcggctgccgcatatgttgaccacttcgccgctgagtgcctggtctcgatgtcctcacgcgcagtagtccacggtcctcgggaaggaccggagtcaaggcctgagggcgcagcagtcgctgccactccgacacttcccagagtggaggaacggcgagatggcaaagatagcgctagcctgtttgtcgtcgcaagaatcttagccgacctcaatcagcaagccccagcccctgctcctgccgaacgacgggagggagctgccgcacgcaaagcccgaacaccttgtaggcttccaccgccagctccagaaccaacgtccccgggtgccgagggagctgcggctgcaccaccatccccggcatggagtgagcctgagccagaggccggactggagcctgaaagggagcctggtccagctggctcaggtgagcctgggctgcgacagcgcgtcaggcggggacgctctagagcggatctcgaatcccctcagcgaaagcataaatgtcattatgctggatgtgagaaagtctacggcaagtcatcccatctgaaagctcacctgcggacccacacaggagaacgcccttttgcatgcagctggcaggactgtaataagaaattcgctcgcagtgacgagttagcccgacattacagaactcacactggggaaaagaagttttcctgtcctatctgcgagaaacgatttatgcgttcagaccaccttaccaagcatgccagacggcatgcgaactttcaccctgggatgctgcaaagacgcggaggcggatcccggaccggaagtcttagtgattacagccggagcgatgcctcgagccccacaatatcgcctgcctcgagcccctag

SEQ ID NO: 188854 - DNA, 867 bp, Artificial Sequence
  derived and/or modified sequence
atggccgccgccgcctacgtggaccacttcgccgccgagtgcctggtgagcatgagcagcagagccgtggtgcacggccccagagagggccccgagagcagacccgagggcgccgccgtggccgccacccccaccctgcccagagtggaggagagaagagacggcaaggacagcgccagcctgttcgtggtggccagaatcctggccgacctgaaccagcaggcccccgcccccgcccccgccgagagaagagagggcgccgccgccagaaaggccagaaccccctgcagactgcccccccccgcccccgagcccaccagccccggcgccgagggcgccgccgccgccccccccagccccgcctggagcgagcccgagcccgaggccggcctggagcccgagagagagcccggccccgccggcagcggcgagcccggcctgagacagagagtgagaagaggcagaagcagagccgacctggagagcccccagagaaagcacaagtgccactacgccggctgcgagaaggtgtacggcaagagcagccacctgaaggcccacctgagaacccacaccggcgagagacccttcgcctgcagctggcaggactgcaacaagaagttcgccagaagcgacgagctggccagacactacagaacccacaccggcgagaagaagttcagctgccccatctgcgagaagagattcatgagaagcgaccacctgaccaagcacgccagaagacacgccaacttccaccccggcatgctgcagagaagaggcggcggcagcagaaccggcagcctgagcgactacagcagaagcgacgccagcagccccaccatcagccccgccagcagcccctag

SEQ ID NO: 188855 - protein, 475 aa, Artificial Sequence
  derived and/or modified sequence
MPGISARGLSHEGRKQLAVNLTRVLALYRSILDAYIIEFFTDNLWDTLPCSWQEALDGLKPPQLATMLLGMPGEGEVVRYRSVWPLTLLALKSTACALAFTRMPGFQTPSEFLENPSQSSRLTAPFRKHVRPKKQHEIRRLGELVKKLSDFTGCTQVVDVGSGQGHLSRFMALGLGLMVKSIEGDQRLVERAQRLDQELLQALEKEEKRNPQVVQTSPRHSPHHVVRWVDPTALCEELLLPLENPCQGRARLLLTGLHACGDLSVALLRHFSCCPEVVALASVGCCYMKLSDPGGYPLSQWVAGLPGYELPYRLREGACHALEEYAERLQKAGPGLRTHCYRAALETVIRRARPELRRPGVQGIPRVHELKIEEYVQRGLQRVGLDPQLPLNLAALQAHVAQENRVVAFFSLALLLAPLVETLILLDRLLYLQEQGFHAELLPIFSPELSPRNLVLVATKMPLGQALSVLETEDS

SEQ ID NO: 188856 - DNA, 1428 bp, Artificial Sequence
  derived and/or modified sequence
atgcccggcatcagcgccagaggcctgagccacgagggcagaaagcagctggccgtgaacctgaccagagtgctggccctgtacagaagcatcctggacgcctacatcatcgagttcttcaccgacaacctgtgggacaccctgccctgcagctggcaggaggccctggacggcctgaagcccccccagctggccaccatgctgctgggcatgcccggcgagggcgaggtggtgagatacagaagcgtgtggcccctgaccctgctggccctgaagagcaccgcctgcgccctggccttcaccagaatgcccggcttccagacccccagcgagttcctggagaaccccagccagagcagcagactgaccgcccccttcagaaagcacgtgagacccaagaagcagcacgagatcagaagactgggcgagctggtgaagaagctgagcgacttcaccggctgcacccaggtggtggacgtgggcagcggccagggccacctgagcagattcatggccctgggcctgggcctgatggtgaagagcatcgagggcgaccagagactggtggagagagcccagagactggaccaggagctgctgcaggccctggagaaggaggagaagagaaacccccaggtggtgcagaccagccccagacacagcccccaccacgtggtgagatgggtggaccccaccgccctgtgcgaggagctgctgctgcccctggagaacccctgccagggcagagccagactgctgctgaccggcctgcacgcctgcggcgacctgagcgtggccctgctgagacacttcagctgctgccccgaggtggtggccctggccagcgtgggctgctgctacatgaagctgagcgaccccggcggctaccccctgagccagtgggtggccggcctgcccggctacgagctgccctacagactgagagagggcgcctgccacgccctggaggagtacgccgagagactgcagaaggccggccccggcctgagaacccactgctacagagccgccctggagaccgtgatcagaagagccagacccgagctgagaagacccggcgtgcagggcatccccagagtgcacgagctgaagatcgaggagtacgtgcagagaggcctgcagagagtgggcctggacccccagctgcccctgaacctggccgccctgcaggcccacgtggcccaggagaacagagtggtggccttcttcagcctggccctgctgctggcccccctggtggagaccctgatcctgctggacagactgctgtacctgcaggagcagggcttccacgccgagctgctgcccatcttcagccccgagctgagccccagaaacctggtgctggtggccaccaagatgcccctgggccaggccctgagcgtgctggagaccgaggacagctag

SEQ ID NO: 188857 - DNA, 1428 bp, Artificial Sequence
  derived and/or modified sequence
atgcccgggatcagcgccaggggcctttcgcacgaagggcgtaagcagctggctgttaatttgacaagggtactggccctgtacaggtctatcctcgacgcttacattatcgaattcttcactgataatctgtgggatacgctgccatgttcctggcaggaggcccttgatggactgaaacctcctcaactggcgacaatgttgctgggaatgccaggtgaaggcgaagtggtgaggtacaggtctgtgtggcctctcaccctgctcgcattgaaatctaccgcttgcgctctagcatttaccaggatgcccggattccagacccctagtgaattccttgaaaatccctcccaatcctctagactcactgctcccttcaggaaacatgtgagaccaaagaagcagcacgaaattaggcgcctgggcgaactggtaaaaaaactgagcgattttactggctgcacccaggtcgtggacgtcggaagcggccagggccatctgtcccggtttatggccctgggtctaggactgatggttaagtccattgaaggggatcagcggctagttgagagggcacagagactggaccaggagcttctgcaagcgctggaaaaagaggagaagcgcaatccccaggtggttcagacatccccacgacattcaccccatcacgtggtgagatgggtggatcctaccgctctatgcgaggaactgctgttaccccttgaaaatccctgtcaaggtcgcgcccggctgctgctcaccggactgcacgcatgcggcgacctctctgtggcgctgctgagacatttcagttgctgcccagaagtggtagccctggctagtgtcgggtgctgttacatgaaactgagtgaccctggaggatatccactgtcgcaatgggtggcaggtctgcccgggtatgagctgccttacagactgagggaaggcgcttgccatgcgctggaggaatatgcagagagactgcagaaggcaggccctggcctgagaacccattgctaccgcgcagccctggaaaccgttatcaggcgtgctcggcccgagctgagacgacccggtgttcaaggtatcccccgtgtgcacgaacttaagatcgaagaatatgtccagaggggattgcagcgggtcggactcgaccctcagttgccactcaatctcgcagctcttcaagcccacgtggctcaggagaatagggtcgttgccttcttcagcctcgcccttttgttagcccccctggtggagacactgattcttctggataggctgctctatctccaggaacaaggctttcacgccgaattactccccattttctctcctgagctttcaccacgcaatcttgtcctcgtggcgacgaaaatgcccctcggacaggccttaagcgtactcgaaacagaagattcatag

SEQ ID NO: 188858 - DNA, 1428 bp, Artificial Sequence
  derived and/or modified sequence
atgcctggcatcagcgcccggggcctgagccatgagggcaggaagcagctggccgtgaacctgaccagggtgctggccctgtaccgcagcatcctggatgcctacatcatcgagttcttcacagacaacctgtgggacaccctgccctgctcctggcaggaggccctggatggcctgaagccaccccagctggccaccatgctgctgggcatgcctggagagggggaggtggtgcgctacagatctgtgtggcccctgaccctgctggccctgaagagcacagcctgtgccctggccttcaccaggatgcctggcttccagacccccagcgagttcctggagaaccccagccagagcagccggctgacagcccccttcaggaagcacgtgcggcccaagaagcagcacgagatccggcggctgggggagctggtgaagaagctgagtgacttcaccggctgcacccaggtggtggatgtgggcagcggccagggccacctgagccgcttcatggccctgggcctgggcctgatggtgaagagcattgaaggagaccagaggctggtggagcgggcccagaggctggaccaggagctgctgcaggccctggagaaggaggagaagaggaacccccaggtggtgcagaccagccccaggcacagcccccaccacgtggtgcgctgggtggaccccacagccctgtgtgaggagctgctgctgcccctggagaacccctgccagggccgggcccggctgctgctgaccggcctgcacgcctgtggggacctgtctgtggccctgctgcggcacttcagctgctgcccagaggtggtggccctggcctctgtgggctgctgctacatgaagctgagtgaccccggcggctaccccctgagccagtgggtggccggcctgcccggctatgagctgccctaccgcctgcgggagggcgcctgccacgccctggaggagtatgcagagcggctgcagaaggccggccctggcctgcggacccactgctacagagctgccctggagaccgtcatccggcgggcccggcctgagctgcggcggcctggggtgcagggcatcccccgggtgcatgagctgaagattgaggagtatgtgcagaggggcctgcagagggtgggcctggacccccagctgcccctgaacctggccgccctgcaggcccacgtggcccaggagaacagagtggtggccttcttcagcctggccctgctgctggcccccctggtggagaccctcatcctgctggaccggctgctgtacctgcaggagcagggcttccacgccgagctgctgcccatcttcagccctgagctgagccccaggaacctggtgctggtggccaccaagatgcccctgggccaggccctgtctgtgctggagacagaggacagctag

SEQ ID NO: 188859 - DNA, 1428 bp, Artificial Sequence
  derived and/or modified sequence
atgcccggcatcagcgcccggggcctgagccacgagggccggaagcaactggctgtaaacctgacacgcgtgctcgcgctgtacagaagtatcctggacgcttacatcatcgagttttttactgacaacctctgggatacactgccatgtagctggcaggaggcccttgacggactgaagcctcctcagctggccactatgctgcttgggatgcctggcgagggcgaagtggtacgctataggtcagtctggcctcttactcttctcgctctgaagtccacggcctgcgctttagccttcacccgcatgcccggtttccagacaccctcggagtttctcgagaatcctagccagagtagtcgactcacagctccatttcggaagcacgttcggccaaagaagcagcacgaaattagaagactcggcgaattggttaaaaagctctcagatttcacaggatgtacacaagtggtcgacgttggatcaggtcagggccatttatcacgattcatggctctgggtctagggctcatggtgaaaagtatcgaaggcgaccagcggctggtagaacgagcacagagactcgaccaagaactcttgcaggcactggagaaggaagaaaagagaaatccacaggtggtccagaccagtcccaggcattctcctcatcacgtggtgcgatgggtagaccccaccgccctgtgtgaggagctcctgctgccgctggagaacccatgtcagggaagggccagactgctgctcacagggttgcacgcttgtggcgatttatcagtagccctcctgcgtcatttcagctgctgcccagaagtagtggcgctggcttcggtgggatgttgttacatgaaactgagtgatccgggcggctaccctctgtctcaatgggtcgccggtctacctggctatgaactcccctatcggctgcgtgagggagcttgtcacgcccttgaagagtatgcagagcgccttcagaaagccggccccgggctccgtacccattgctatcgggcggcgttagagacagttataaggagagctcgccccgaattaaggcgcccaggcgtacagggcatcccccgagtgcacgaactgaagattgaggaatacgtgcagcggggcctacagcgggtcggcctggatcctcagctgcccctgaatctggcggccctacaggcccacgttgcgcaagaaaacagggtcgtcgccttcttcagtctcgcactcttactcgcccctctggtcgaaacactgatactcctcgatcgcctgctttatctgcaggaacaaggattccatgctgagctgctaccgatcttcagtccagagctcagcccccggaatctggtgctggtggctactaagatgccactcggacaggccctatcggtactcgaaaccgaggattcatag

SEQ ID NO: 188860 - DNA, 1428 bp, Artificial Sequence
  derived and/or modified sequence
atgcccggtatctcagctcgcggtctgtcacatgaagggcgaaaacaactggccgtaaatcttactagggtgctggccctttaccgatctattctagacgcctatataattgagttcttcactgataatctctgggacaccctgccctgctcttggcaagaggctctagacggtctgaagccaccacaactggcgacaatgctgttgggtatgcctggcgaaggagaagtcgttcgctaccgatctgtttggcctctcactctgttggcactgaaaagcacagcttgcgccctggccttcacaagaatgccaggattccagactccgtcggagttcctggagaatccttcacagtctagtcgcctcacagccccattccggaagcatgtgagaccaaaaaaacagcatgaaataagacgattgggagagctcgtgaagaaactctccgattttacaggatgcacacaggtggtcgatgtggggagtggccaggggcatctctcaaggttcatggcccttggacttgggttaatggtcaaatctatcgagggggaccagcgccttgtcgagcgcgcacagcgtctggaccaggaactattgcaggccctggagaaggaagagaaacgcaaccctcaggtagttcaaacctccccacggcacagtccccatcatgtggtgcggtgggtcgaccccaccgcgttgtgcgaagaactactcttgcctttagagaacccgtgccagggacgggcacggcttcttctcactggtctgcacgcctgcggtgatctttcagtcgccctcctccgccacttttcctgttgtcccgaggtggtcgctcttgcctctgttggctgttgctatatgaagctgagtgatcccggagggtatcctttgtctcagtgggttgctggattgcctggttatgagctgccttaccgtctgcgagaaggggcatgccacgccctggaggagtacgccgagcggctgcagaaggccggacctgggctccggacacactgttatcgagcggcactcgagacggttatcagacgtgctagaccagagcttcgacgcccaggggtccagggaatcccgagggttcacgagctgaagattgaggaatacgtgcagcggggactacagcgtgttggcttggatccacagctgccactaaacctggcggctctgcaggcccacgttgctcaggagaaccgcgttgtagccttttttagtctagccttgctacttgcgcctcttgtagagacactaattctgttggacagactgctgtacttgcaagaacaggggtttcatgcggagttgttaccaattttttcacccgagctttctccaaggaatctcgttcttgtggctacaaagatgccactgggccaagccctgtctgttctggagacagaagacagctag

SEQ ID NO: 188861 - DNA, 2254 bp, Artificial Sequence
  derived and/or modified sequence
cgccgacgaagcccgggaaggcaggcgcgcgggttagaacgcgccagaggtcggcgcgcgcacacccgcaccgccccgaccccaggtagtgaggccagtgattccgagtgtgtgaggagcggcagtggcggcggaggagggggcggcgtgggtgggggcgggggcgggatgcgctccccggcccctctagccccgtggtggtacaacgcgaaggtgtgggaaggccgcgataaaccggaactgcagcccgccggacacctccggcttcacttccgtaagaggagaggagtgtacggcaaggggcgggaactggaacttggcccgcctcgttgtgagctgagctcagcggcacgcttttgtggcgtcactgcactgttaccccgccctacgtgtctctgacgctgacaccttctcactgtgaaacgtcgcgacctgtgacgtctggggggcgcctcaaatcttccactccagcatcggatcccggaaaggcagcgtcggagactggacccaaaactcttcctgttctgcctgcagagttgagccccgtccgggtcctggacccgcgtagtactgaccctggatccctgttcactgcgttctcgctccccgcgctccctgctggaccccgggatgccgggcatctccgcccgaggcctctctcatgaggggaggaagcagctagctgttaacctcacccgtgtcctggcactctaccgttccatcttggatgcctacatcatcgaatttttcacagacaacctatgggacacactcccttgctcatggcaggaagcattggatggactgaaaccaccacagctggccacaatgctgctggggatgcctggggaaggggaggtcgtcaggtacaggtcagtgtggccactcaccctgctggccctgaagtccacggcgtgtgccctggcctttacccggatgcctggctttcagaccccctcagaattcctggagaaccccagccagagctcccgactaacagctccattccggaaacatgtcaggcccaagaagcagcatgagatccggaggctgggagagttggtgaagaagctgagtgatttcacaggctgcacccaggttgtagacgtgggctcaggccagggccatctctcccgcttcatggctcttggcctggggttgatggtgaagagcatcgaaggggatcagagactggtggagagagcccagcgcctggaccaggagcttctgcaggctctggagaaagaggagaagaggaacccgcaggtggtccaaaccagccctcgtcactccccacaccacgtggttaggtgggtagaccccacagccctgtgtgaggagcttctgcttccactggagaacccgtgtcagggcagggcccgcttgctgctcacaggcctccacgcctgtggggatctgagtgttgccttgctgagacacttctcctgctgtcctgaggtggtggccctggcctcagtgggctgctgctacatgaagctgagtgaccctggcggctacccactgagtcagtgggtggctgggctgcctggctatgaactgccctaccggcttcgggagggggcctgccatgccctggaggaatatgctgagcggctacagaaagctggccctggccttcgaactcactgctaccgtgcagcactggagacagtcatccgacgggcccggcccgagctccgtcggccaggcgtgcagggtatccccagggtccacgagctcaagattgaagaatatgtgcagcgggggctacagcgagtggggctagatccccagctgccactgaatctggctgcccttcaggcccacgtggcccaggagaaccgtgtggtggccttcttcagcctggctctactgcttgccccactggtggagacgcttattctactggaccggctgctgtaccttcaggaacagggtttccatgctgagctcctgcccatcttcagtcctgaactctctcccagaaacctggttctggtggccaccaagatgcccctgggtcaggctctttctgttctggagactgaagacagctgatgcagcctgaggaaacatctcagaccccatcatctgaaagtgcccagagagcacagtggcagagtacatctcatccagagaaacagcatcctgcatcctccagagtcctggttccttcagtttcatcccctttctctccttccatggattatgtaatacattgtaaagttttaattaattaaaaattggatatctg

SEQ ID NO: 188862 - protein, 241 aa, Artificial Sequence
  derived and/or modified sequence
MNGTLTAVESFLTIHSGPEGLSIHDGTWKSAIYGFGDQSNLRKLRNVSNLKPVPLIGPKLKRRWPISYCRELKGYSIPFMGSDVSVVRRTQRYLYENLEESPVQYAAYVTVGGITSVIKLMFAGLFFLFFVRFGIGRQLLIKIDAASFTLTFFGQGYSQGTGTDKNKPNIKICTQVKGPEAGYVATPIAMVQAAMTLLSDASHLPKAGGVFTPGAAFSKTKLIDRLNKHGIEFSVISSSEV

SEQ ID NO: 188863 - protein, 429 aa, Artificial Sequence
  derived and/or modified sequence
MATEQRPFHLVVFGASGFTGQFVTEEVAREQVDPERSSRLPWAVAGRSREKLQRVLEKAALKLGRPTLSSEVGIIICDIANPASLDEMAKQATVVLNCVGPYRFYGEPVIKACIENGASCIDISGEPQFLELMQLKYHEKAADKGVYIIGSSGFDSIPADLGVIYTRNKMNGTLTAVESFLTIHSGPEGLSIHDGTWKSAIYGFGDQSNLRKLRNVSNLKPVPLIGPKLKRRWPISYCRELKGYSIPFMGSDVSVVRRTQRYLYENLEESPVQYAAYVTVGGITSVIKLMFAGLFFLFFVRFGIGRQLLIKFPWFFSFGYFSKQGPTQKQIDAASFTLTFFGQGYSQGTGTDKNKPNIKICTQVKGPEAGYVATPIAMVQAAMTLLSDASHLPKAGGVFTPGAAFSKTKLIDRLNKHGIEFSVISSSEV

SEQ ID NO: 188864 - DNA, 726 bp, Artificial Sequence
  derived and/or modified sequence
atgaacggcaccctgaccgccgtggagagcttcctgaccatccacagcggccccgagggcctgagcatccacgacggcacctggaagagcgccatctacggcttcggcgaccagagcaacctgagaaagctgagaaacgtgagcaacctgaagcccgtgcccctgatcggccccaagctgaagagaagatggcccatcagctactgcagagagctgaagggctacagcatccccttcatgggcagcgacgtgagcgtggtgagaagaacccagagatacctgtacgagaacctggaggagagccccgtgcagtacgccgcctacgtgaccgtgggcggcatcaccagcgtgatcaagctgatgttcgccggcctgttcttcctgttcttcgtgagattcggcatcggcagacagctgctgatcaagatcgacgccgccagcttcaccctgaccttcttcggccagggctacagccagggcaccggcaccgacaagaacaagcccaacatcaagatctgcacccaggtgaagggccccgaggccggctacgtggccacccccatcgccatggtgcaggccgccatgaccctgctgagcgacgccagccacctgcccaaggccggcggcgtgttcacccccggcgccgccttcagcaagaccaagctgatcgacagactgaacaagcacggcatcgagttcagcgtgatcagcagcagcgaggtgtag

SEQ ID NO: 188865 - DNA, 1290 bp, Artificial Sequence
  derived and/or modified sequence
atggccaccgagcagagacccttccacctggtggtgttcggcgccagcggcttcaccggccagttcgtgaccgaggaggtggccagagagcaggtggaccccgagagaagcagcagactgccctgggccgtggccggcagaagcagagagaagctgcagagagtgctggagaaggccgccctgaagctgggcagacccaccctgagcagcgaggtgggcatcatcatctgcgacatcgccaaccccgccagcctggacgagatggccaagcaggccaccgtggtgctgaactgcgtgggcccctacagattctacggcgagcccgtgatcaaggcctgcatcgagaacggcgccagctgcatcgacatcagcggcgagccccagttcctggagctgatgcagctgaagtaccacgagaaggccgccgacaagggcgtgtacatcatcggcagcagcggcttcgacagcatccccgccgacctgggcgtgatctacaccagaaacaagatgaacggcaccctgaccgccgtggagagcttcctgaccatccacagcggccccgagggcctgagcatccacgacggcacctggaagagcgccatctacggcttcggcgaccagagcaacctgagaaagctgagaaacgtgagcaacctgaagcccgtgcccctgatcggccccaagctgaagagaagatggcccatcagctactgcagagagctgaagggctacagcatccccttcatgggcagcgacgtgagcgtggtgagaagaacccagagatacctgtacgagaacctggaggagagccccgtgcagtacgccgcctacgtgaccgtgggcggcatcaccagcgtgatcaagctgatgttcgccggcctgttcttcctgttcttcgtgagattcggcatcggcagacagctgctgatcaagttcccctggttcttcagcttcggctacttcagcaagcagggccccacccagaagcagatcgacgccgccagcttcaccctgaccttcttcggccagggctacagccagggcaccggcaccgacaagaacaagcccaacatcaagatctgcacccaggtgaagggccccgaggccggctacgtggccacccccatcgccatggtgcaggccgccatgaccctgctgagcgacgccagccacctgcccaaggccggcggcgtgttcacccccggcgccgccttcagcaagaccaagctgatcgacagactgaacaagcacggcatcgagttcagcgtgatcagcagcagcgaggtgtag

SEQ ID NO: 188866 - DNA, 726 bp, Artificial Sequence
  derived and/or modified sequence
atgaatggcactttaacagcagtggagagctttctcaccattcactctggtccagagggactatcgatccacgatgggacctggaaatcggcaatctatggcttcggtgaccagtctaacctgcggaaactgcggaacgttagcaatctaaaaccagtcccgctcataggccctaagctgaaaagaagatggcctatcagctattgcagagagttgaagggctactccatcccctttatgggctctgatgtctccgtagtgcggcgcactcagaggtacttgtatgaaaacctggaggagtcccccgttcagtatgcagcttatgtcactgtggggggtattacatcggtgattaaactcatgttcgccgggctgtttttcctattctttgtccggttcggcattgggcggcagctattgattaagatcgatgccgcctcctttacactgactttttttggtcagggatactcccaggggactggcacggacaagaacaaacccaatattaagatttgtacccaagtgaaagggcctgaagccggctacgtcgccactcctattgcgatggttcaggccgccatgacgctgctgagcgatgcaagccatctccctaaagccgggggcgtattcaccccaggcgccgccttttccaagacaaaactgattgatagactaaataaacacggtatcgagttttccgtgattagcagtagtgaagtctag

SEQ ID NO: 188867 - DNA, 1290 bp, Artificial Sequence
  derived and/or modified sequence
atggcaaccgagcaacggcctttccatctcgtggtgtttggcgcctcgggcttcacgggccagttcgtcactgaggaggtggcccgcgagcaggtggatcctgaacgttctagccgcttgccttgggctgtggccggacgatcccgggagaagcttcaaagagtgctggagaaggccgcactgaaacttggtcggccaaccctttccagcgaggtgggcattatcatttgtgatatcgccaatccagcgtcattggacgaaatggcaaaacaggctaccgtggtgcttaactgtgtgggtccttatagattctacggcgaacctgtcatcaaggcatgcatcgagaacggggcatcgtgcatcgacatctcaggggaaccgcagttccttgaacttatgcaacttaaataccacgaaaaggccgctgataaaggagtgtacattatcggtagcagtggatttgactctattccagctgacctaggggtgatatataccagaaacaagatgaatggaaccttaacagcggtcgagtcttttcttaccatacactccggcccagaagggttaagcattcacgacggcacctggaagtcagccatatacgggttcggggaccagagcaacttgagaaaactgagaaacgtgagcaatctcaagccagtgccactgattggacctaagctaaagaggagatggccgatttcctattgtcgggagctcaaaggatatagcattccttttatggggagtgacgtcagtgtggtccgacggacacagaggtacttgtacgaaaatctggaggagagtccagttcagtatgccgcctacgtgaccgtgggtggcataacaagcgttatcaagcttatgttcgcagggttatttttcctattctttgtgagattcggtattggcagacagctcctcattaagtttccctggtttttctcctttgggtacttttctaaacaagggcctacacagaagcagattgacgctgccagtttcacattgacctttttcgggcagggctactcgcaaggaaccggcacagataaaaataaaccaaacatcaagatttgcacccaggtcaagggccctgaagcaggctatgtcgctacccccatcgcgatggttcaagccgccatgacactgctatcagacgcttcacacctgcctaaggcaggcggtgtgttcactccaggcgccgcgtttagtaaaaccaagctcattgatagacttaacaaacacgggattgagttttcggtcatctcatcgtccgaggtttag

SEQ ID NO: 188868 - DNA, 726 bp, Artificial Sequence
  derived and/or modified sequence
atgaatggcaccctgacagctgtggagagcttcctgaccatccacagcggccctgagggcctgagcatccatgatggcacctggaagagcgccatctacggctttggagaccagagcaacctgaggaagctgagaaatgtgagcaacctgaagcctgtgcccctcatcggccccaagctgaagaggcgctggcccatctcctactgccgggagctgaagggctacagcatccccttcatgggcagtgatgtgtctgtggtgcggaggacccagcgctacctgtatgagaacctggaggagagccctgtgcagtatgctgcctacgtgacagtgggcggcatcaccagcgtcatcaagctgatgtttgctggcctcttcttcctgttctttgtgcgctttggaattggccggcagctgctgatcaagattgatgctgccagcttcaccctgaccttcttcggccagggctacagccagggcactggaacagacaagaacaagcccaacatcaagatctgcacccaggtgaagggccctgaggccggctacgtggccacccccatcgccatggtgcaggccgccatgaccctgctgagtgatgccagccacctgcccaaggccggcggcgtcttcaccccaggagctgccttcagcaagaccaagctgattgaccggctgaacaagcatggaattgagttcagcgtcatcagcagcagcgaggtgtag

SEQ ID NO: 188869 - DNA, 1290 bp, Artificial Sequence
  derived and/or modified sequence
atggccacagagcagaggcccttccacctggtggtgtttggagccagcggcttcaccggccagtttgtgacagaggaggtggcccgggagcaggtggaccctgagaggagcagccggctgccctgggccgtggccggccgcagccgggagaagctgcagagggtgctggagaaggccgccctgaagctgggccggcccaccctgagcagcgaggtgggcatcatcatctgtgacatcgccaacccagccagcctggatgagatggccaagcaggccaccgtggtgctgaactgtgtgggcccctaccgcttctatggagagcccgtcatcaaggcctgcattgaaaatggagccagctgcatcgacatcagcggggagccccagttcctggagctgatgcagctgaagtaccacgagaaggctgctgacaagggcgtgtacatcatcggcagcagcggctttgacagcatcccagctgacctgggcgtcatctacaccaggaacaagatgaatggcaccctgacagctgtggagagcttcctgaccatccacagcggccctgagggcctgagcatccatgatggcacctggaagagcgccatctacggctttggagaccagagcaacctgaggaagctgagaaatgtgagcaacctgaagcctgtgcccctgattggccccaagctgaagaggcgctggcccatctcctactgccgggagctgaagggctacagcatccccttcatgggcagtgatgtgtctgtggtgcggaggacccagcgctacctgtatgagaacctggaggagagccctgtgcagtatgctgcctacgtgacagtgggcggcatcaccagcgtcatcaagctgatgtttgctggcctcttcttcctgttctttgtgcgcttcggcatcggccggcagctgctgatcaagttcccctggttcttctcctttggctacttcagcaagcagggccccacccagaagcagattgatgctgccagcttcaccctgaccttcttcggccagggctacagccagggcactggaacagacaagaacaagcccaacatcaagatctgcacccaggtgaagggccctgaggccggctacgtggccacccccatcgccatggtgcaggccgccatgaccctgctgagtgatgccagccacctgcccaaggccggcggcgtcttcaccccaggagctgccttcagcaagaccaagctgattgaccggctgaacaagcatggaattgagttcagcgtcatcagcagcagcgaggtgtag

SEQ ID NO: 188870 - DNA, 726 bp, Artificial Sequence
  derived and/or modified sequence
atgaacggcaccctgaccgccgtggagagcttcctgaccatccacagcggccctgaaggactttccatccacgatgggacttggaagtcagcaatatatgggtttggtgaccaaagcaaccttagaaaactcaggaatgtgagcaatctgaagcccgtcccgctcatcgggcctaaactcaaaaggcgctggcctatctcttactgcagggaactgaaaggctactcaattccattcatgggctccgatgtgagtgtggtgcggcgaacccaaagatatctctatgaaaacctagaggaatccccagttcaatatgccgcttatgtgacagtcggcggaatcactagcgtaattaagttgatgtttgcggggctattctttctcttctttgtgcgcttcggaattggacgtcagttgctgattaagatagatgcagctagcttcaccctaactttttttggccagggctattcacagggcaccggcacagataagaataaaccaaatattaaaatctgcacacaggtgaaaggacccgaggccggatatgtagccactcccattgctatggttcaggccgctatgacattgctttccgatgcctcgcatcttcctaaagctggaggcgtctttactccaggcgctgcattctctaaaaccaaattaatcgacaggctgaataagcatggaattgaatttagtgtgattagctcctctgaagtttag

SEQ ID NO: 188871 - DNA, 1290 bp, Artificial Sequence
  derived and/or modified sequence
atggccaccgagcagcggcccttccacctggtggtgttcggcgccagtggcttcaccggtcagtttgtcactgaggaagtggcacgggaacaggttgatcccgagcgttcatccaggctgccgtgggctgtggctgggcggagcagggaaaagctccagcgggtgctggaaaaggccgctttaaagctgggccgacctacactctctagcgaggtcggtatcatcatttgtgatatcgcgaatccagcatctcttgatgaaatggcaaagcaggctaccgtagtcctgaattgtgtgggaccgtatagattctacggcgaacccgtgatcaaggcttgtatagaaaacggggcctcctgcattgacatttccggggagccacagttcctggagctcatgcaactgaagtaccatgagaaggccgccgacaaaggcgtgtacatcatcggatcctccgggttcgactctattccagccgacctaggggtcatatatacacgcaacaagatgaacggcactctgaccgccgtggagtctttccttaccattcactccggaccagagggactgtccatccatgacggaacatggaagagcgccatttatgggttcggcgaccagtccaatctcaggaagctccgcaacgtctctaacttaaaacccgtgccactgatcgggccaaaattgaagcgcagatggcccatcagctattgcagggaactgaagggctactccattcctttcatgggatctgacgttagtgtcgtgaggagaacccagcgatatttgtacgagaatctcgaggagtctcccgttcagtacgccgcatacgtgaccgtagggggaattaccagtgtgataaaactgatgtttgccggccttttcttcctgtttttcgtgcgcttcggcataggcaggcagctcctgattaagtttccatggtttttttcctttgggtacttttcaaagcaaggccctacacagaaacagatagatgctgctagctttacactcacattttttggccagggctattctcaaggcaccgggaccgataaaaacaaaccgaatatcaaaatttgtacccaggtgaaaggacctgaagctgggtatgttgcaacacccattgcgatggtacaggctgccatgacgctcctatccgatgcctctcacctgcccaaggctggtggggtattcaccccaggggccgccttttctaaaactaagctgattgataggctcaataagcacggcatcgaattctctgtaatatcctcatccgaggtttag

SEQ ID NO: 188872 - DNA, 726 bp, Artificial Sequence
  derived and/or modified sequence
atgaatggtacacttaccgctgttgagtcattcctcacaatccactcagggcctgagggcctctcaatacatgacggaacttggaaaagtgccatatacggattcggggatcagagtaatctgcggaagctgaggaatgtttcgaacctgaagcctgttcccttaattgggccaaagctgaagagacgatggcccatctcatattgtagagagctgaaaggatatagtatccctttcatgggaagcgacgtgagcgtggttcggcgaacacagaggtacctttatgaaaacctggaagagtcacctgttcaatacgctgcctatgtgacggtaggagggattacttccgtgatcaagctcatgttcgccggattattctttctgtttttcgtcaggtttggtatcggaagacagctgctgatcaagattgacgccgctagcttcactctgaccttctttgggcagggatacagccagggcactgggaccgacaaaaacaaacccaatatcaaaatctgcacacaggtgaaagggccagaggccggatatgtggcgactccaatcgcaatggtacaggccgctatgacattactgtcggacgcttcccaccttcccaaggctggtggggtgttcactcctggggcagccttttcaaagaccaagctaatagacagactgaacaaacatggtatcgaattttctgtgattagctcatccgaagtgtag

SEQ ID NO: 188873 - DNA, 1290 bp, Artificial Sequence
  derived and/or modified sequence
atggcaacagaacagcggcctttccatctggtggtgtttggtgcatctggatttacaggacaattcgtgactgaggaggttgccagagagcaggtggatcccgaaaggtcatcgcggttaccctgggccgttgcaggtaggtcgcgcgagaaattacagcgggttctggagaaagcagcacttaaactcggaagacccaccctgagcagtgaggtagggattattatctgcgacattgccaatcccgcaagtctcgatgagatggccaaacaggctactgtcgtgctcaactgtgttgggccatacaggttttatggtgagccagtcatcaaagcctgtatcgagaatggcgcttcttgtatcgatatatcaggagaaccacagttccttgaactaatgcagctgaaataccacgagaaggcggcagacaagggggtatacatcatcggcagtagtggatttgactctattccagccgatctgggggtcatatatacccgcaacaaaatgaatggcacactgactgcagtggagagttttctaacaatacactcaggaccagaggggctcagcattcatgatggcacatggaaaagcgcaatttacggattcggtgaccagtccaacctccgtaaactacgaaatgttagcaacttaaagcctgtgcctttgatcggcccaaaactcaagagacgctggcccatttcctactgtagggaactgaaaggatactccattccatttatggggtctgatgtttccgtcgtccggaggactcagcggtatctgtatgagaatctggaagaatcccctgtgcagtatgcagcctacgtcaccgtgggcggtatcacttctgtaataaagttgatgtttgctgggctgttttttttattctttgtcaggttcggaatcggacggcagctcctaattaaatttccttggttcttttccttcggttactttagcaaacagggccctacccagaaacagatcgatgccgcatccttcaccctgacattctttggacaaggttattcccaggggacaggcacggataagaacaaaccaaatattaagatctgtacccaggtaaagggtcccgaggcagggtacgtcgcgactcccatcgcaatggtgcaggccgctatgacattactgtcagacgcgagtcacctgcctaaagctggtggggtgtttacccccggagccgctttctctaagacaaaactcatcgaccgcctgaacaaacacggaattgagttttcagttatctcgagttccgaagtgtag

SEQ ID NO: 188874 - DNA, 2415 bp, Artificial Sequence
  derived and/or modified sequence
tgcgctgcccggggcggccagagccctgcagaacaaaccgccgcacggaattaggggccgccgtccgcgcctgccaggcttggaagcggactcgcccccagggccaccgccctaggaaacctcccgtcggaagcctcccaagcaagccgctcacccgcggctcccgcgcgaggcggcgtgggcgtgggcgcggccctggcgcggcggcgcgcgcggggtgaagggagcccggcgcgctggctgcggcgacggcggccgttgctgcgccgggtactggggtcgctgcctgaggcgcaggcgccgtggactccacccgccccggggcctgggctcgctgtggactcgtcatggcgaccgagcagaggcctttccacctggtggtgttcggcgcgtctggcttcaccggccagttcgtgaccgaggaggtggcccgggagcaggtggacccggagcggagctcccgcctgccctgggccgtggcgggccgctcccgggagaagctgcagcgggtgctggagaaggcggccctgaagctgggaagaccaacactgtcatctgaagttggaatcatcatctgtgatattgctaatccagcctcgcttgatgaaatggctaaacaggcaacagttgtcctcaattgcgtaggaccatatcggttttatggagaacctgtaataaaagcatgtattgaaaatggagccagttgtatcgacatcagtggagaacctcagtttctggaactaatgcaactgaagtatcatgagaaagctgcagacaaaggggtttatatcattggaagcagcggctttgactccattccagcagatctgggagtaatatataccagaaataaaatgaatggtactttgactgctgtggaaagtttcctgactatacattcaggacctgaggggttgagcattcatgatggtacctggaagtcagcaatttatggttttggagatcagagtaatttgagaaaactaagaaatgtatcaaatctgaaacctgtcccgctcattggtccaaaattgaagagaaggtggccaatttcttattgtcgggaactcaaaggttattccattccttttatgggatctgatgtgtctgttgtaaggaggactcaacgttacttgtatgaaaatttagaggaatcaccagttcagtatgctgcgtatgtaactgtgggaggcatcacctctgttattaagctgatgtttgcaggacttttctttttgttctttgtgaggtttggaattggaaggcaacttctcataaaaattgatgctgcctcattcacgctgacattctttggtcaaggatacagccaaggcactggtacagataagaacaaaccaaatatcaaaatttgtactcaggtgaaaggaccagaggctggctatgtggctacccccatagctatggttcaggcagccatgactcttctaagtgatgcttctcatctgcctaaggcgggcggggtcttcacacctggagcagctttttccaaaacaaagttgattgacagactcaacaaacacggtattgagtttagtgttattagcagctctgaagtctaaacactggaagaattaactgaagtcataacgtgcgtgaattaacagcttctctatttgatatttgaaattcttctgtaagcctgtctgagtgtatgtggaaacgattgtcaaatctaaaatatctatatattaaaaagtaggaaattgtcctagcttaccctaaatttcaaatctgagttgattttgtgattttattgcttataacagagaactcatatttgacatatttttttcattgatgtgttcctggtagattttcacgaatgagctggcaggtctaatgggggaggcggcgtcccagtctgtgttgcagcagcattctcatcgggggtgcgcacaccatcgttactgtcgggcagtaactgccgcttgccttgccgcagtaggagggaaatctcaccttccttccacatactgtcttgagcctttgctaaattaaactgcactttttgctatttttgcctagtttttcgccaatctacactgattttggactgttacctaagttgaaaaataaaaggttgtcaatcgaatggtggtttaatgtttggacctgccgatgtatttgtatagtggtagaaacatgctgcttaagtggcctaacctgtttcttgccaataagtaggcttatcattttatctttacgtaattctatatctgtgactaggtttttaaggatacagcttataagttgctatcaattttcactacctaagcagaatttttctctaatttactttttgtattttaactaggttttacatggaagccctaaaataaggcaaaagactttttcttttgtaataagcatataataaacacgtatatacatagc

SEQ ID NO: 188875 - DNA, 2503 bp, Artificial Sequence
  derived and/or modified sequence
cgcctccagcttccagcagggctagaagatgcgctgcccggggcggccagagccctgcagaacaaaccgccgcacggaattaggggccgccgtccgcgcctgccaggcttggaagcggactcgcccccagggccaccgccctaggaaacctcccgtcggaagcctcccaagcaagccgctcacccgcggctcccgcgcgaggcggcgtgggcgtgggcgcggccctggcgcggcggcgcgcgcggggtgaagggagcccggcgcgctggctgcggcgacggcggccgttgctgcgccgggtactggggtcgctgcctgaggcgcaggcgccgtggactccacccgccccggggcctgggctcgctgtggactcgtcatggcgaccgagcagaggcctttccacctggtggtgttcggcgcgtctggcttcaccggccagttcgtgaccgaggaggtggcccgggagcaggtggacccggagcggagctcccgcctgccctgggccgtggcgggccgctcccgggagaagctgcagcgggtgctggagaaggcggccctgaagctgggaagaccaacactgtcatctgaagttggaatcatcatctgtgatattgctaatccagcctcgcttgatgaaatggctaaacaggcaacagttgtcctcaattgcgtaggaccatatcggttttatggagaacctgtaataaaagcatgtattgaaaatggagccagttgtatcgacatcagtggagaacctcagtttctggaactaatgcaactgaagtatcatgagaaagctgcagacaaaggggtttatatcattggaagcagcggctttgactccattccagcagatctgggagtaatatataccagaaataaaatgaatggtactttgactgctgtggaaagtttcctgactatacattcaggacctgaggggttgagcattcatgatggtacctggaagtcagcaatttatggttttggagatcagagtaatttgagaaaactaagaaatgtatcaaatctgaaacctgtcccgctcattggtccaaaattgaagagaaggtggccaatttcttattgtcgggaactcaaaggttattccattccttttatgggatctgatgtgtctgttgtaaggaggactcaacgttacttgtatgaaaatttagaggaatcaccagttcagtatgctgcgtatgtaactgtgggaggcatcacctctgttattaagctgatgtttgcaggacttttctttttgttctttgtgaggtttggaattggaaggcaacttctcataaaattcccatggttcttctcctttggctatttttcaaaacaaggcccaacacaaaaacagattgatgctgcctcattcacgctgacattctttggtcaaggatacagccaaggcactggtacagataagaacaaaccaaatatcaaaatttgtactcaggtgaaaggaccagaggctggctatgtggctacccccatagctatggttcaggcagccatgactcttctaagtgatgcttctcatctgcctaaggcgggcggggtcttcacacctggagcagctttttccaaaacaaagttgattgacagactcaacaaacacggtattgagtttagtgttattagcagctctgaagtctaaacactggaagaattaactgaagtcataacgtgcgtgaattaacagcttctctatttgatatttgaaattcttctgtaagcctgtctgagtgtatgtggaaacgattgtcaaatctaaaatatctatatattaaaaagtaggaaattgtcctagcttaccctaaatttcaaatctgagttgattttgtgattttattgcttataacagagaactcatatttgacatatttttttcattgatgtgttcctggtagattttcacgaatgagctggcaggtctaatgggggaggcggcgtcccagtctgtgttgcagcagcattctcatcgggggtgcgcacaccatcgttactgtcgggcagtaactgccgcttgccttgccgcagtaggagggaaatctcaccttccttccacatactgtcttgagcctttgctaaattaaactgcactttttgctatttttgcctagtttttcgccaatctacactgattttggactgttacctaagttgaaaaataaaaggttgtcaatcgaatggtggtttaatgtttggacctgccgatgtatttgtatagtggtagaaacatgctgcttaagtggcctaacctgtttcttgccaataagtaggcttatcattttatctttacgtaattctatatctgtgactaggtttttaaggatacagcttataagttgctatcaattttcactacctaagcagaatttttctctaatttactttttgtattttaactaggttttacatggaagccctaaaataaggcaaaagactttttcttttgtaataagcatataataaacacgtatatacatagcaa

SEQ ID NO: 188876 - protein, 436 aa, Artificial Sequence
  derived and/or modified sequence
MNLASQSGEAGAGQLLFANFNQDNTSLAVGSKSGYKFFSLSSVDKLEQIYECTDTEDVCIVERLFSSSLVAIVSLKAPRKLKVCHFKKGTEICNYSYSNTILAVKLNRQRLIVCLEESLYIHNIRDMKVLHTIRETPPNPAGLCALSINNDNCYLAYPGSATIGEVQVFDTINLRAANMIPAHDSPLAALAFDASGTKLATASEKGTVIRVFSIPEGQKLFEFRRGVKRCVSICSLAFSMDGMFLSASSNTETVHIFKLETVKEKPPEEPTTWTGYFGKVLMASTSYLPSQVTEMFNQGRAFATVRLPFCGHKNICSLATIQKIPRLLVGAADGYLYMYNLDPQEGGECALMKQHRLDGSLETTNEILDSASHDCPLVTQTYGAAAGKGTYVPSSPTRLAYTDDLGAVGGACLEDEASALRLDEDSEHPPMILRTD

SEQ ID NO: 188877 - DNA, 1311 bp, Artificial Sequence
  derived and/or modified sequence
atgaacctggccagccagagcggcgaggccggcgccggccagctgctgttcgccaacttcaaccaggacaacaccagcctggccgtgggcagcaagagcggctacaagttcttcagcctgagcagcgtggacaagctggagcagatctacgagtgcaccgacaccgaggacgtgtgcatcgtggagagactgttcagcagcagcctggtggccatcgtgagcctgaaggcccccagaaagctgaaggtgtgccacttcaagaagggcaccgagatctgcaactacagctacagcaacaccatcctggccgtgaagctgaacagacagagactgatcgtgtgcctggaggagagcctgtacatccacaacatcagagacatgaaggtgctgcacaccatcagagagaccccccccaaccccgccggcctgtgcgccctgagcatcaacaacgacaactgctacctggcctaccccggcagcgccaccatcggcgaggtgcaggtgttcgacaccatcaacctgagagccgccaacatgatccccgcccacgacagccccctggccgccctggccttcgacgccagcggcaccaagctggccaccgccagcgagaagggcaccgtgatcagagtgttcagcatccccgagggccagaagctgttcgagttcagaagaggcgtgaagagatgcgtgagcatctgcagcctggccttcagcatggacggcatgttcctgagcgccagcagcaacaccgagaccgtgcacatcttcaagctggagaccgtgaaggagaagccccccgaggagcccaccacctggaccggctacttcggcaaggtgctgatggccagcaccagctacctgcccagccaggtgaccgagatgttcaaccagggcagagccttcgccaccgtgagactgcccttctgcggccacaagaacatctgcagcctggccaccatccagaagatccccagactgctggtgggcgccgccgacggctacctgtacatgtacaacctggacccccaggagggcggcgagtgcgccctgatgaagcagcacagactggacggcagcctggagaccaccaacgagatcctggacagcgccagccacgactgccccctggtgacccagacctacggcgccgccgccggcaagggcacctacgtgcccagcagccccaccagactggcctacaccgacgacctgggcgccgtgggcggcgcctgcctggaggacgaggccagcgccctgagactggacgaggacagcgagcacccccccatgatcctgagaaccgactag

SEQ ID NO: 188878 - DNA, 1311 bp, Artificial Sequence
  derived and/or modified sequence
atgaacctggcaagccagagtggggaggccggagccggacagctcctattcgccaatttcaatcaggacaatacctcactggctgtgggtagcaagtcaggttataagttcttcagtttatcttccgttgataagctggagcagatttatgagtgcaccgataccgaagatgtctgtattgttgagcgcctgttctcaagctctctggtggccatcgtgagcctaaaggctccccgcaagctgaaggtatgccacttcaagaagggcactgagatctgcaactattcctacagtaatacaattctggccgtgaaattaaatcgccagagactgatcgtttgtcttgaggaaagcctatatattcataacatccgcgatatgaaagttttgcatacaatccgggaaaccccacccaaccccgcgggcctttgcgcgctctcaatcaataatgacaactgttacctggcgtatcctggtagcgccaccattggcgaggtgcaggttttcgacacaatcaaccttcgcgcagccaatatgataccggcacacgattcccccctcgctgcacttgcctttgacgcctcgggtaccaagttagccactgcatccgagaaaggcacagtgatccgcgtgtttagcatacccgagggccaaaagttgtttgagttcaggcggggtgtaaagagatgtgtatcgatttgcagcctggctttttctatggatggaatgtttctttcagcaagctccaacaccgagaccgtgcatatattcaaactggaaacagtcaaagagaaacccccagaagagcctacaacctggaccggatatttcggaaaagtgcttatggccagcacctcatatctgccttctcaagttaccgagatgtttaatcaaggacgcgcatttgctaccgtaagactccctttctgtggtcacaaaaacatctgcagcttggctaccatccagaagatccctagactgctcgtgggcgcggccgacggatacctgtacatgtataatctggacccccaggaaggcggggagtgcgccttaatgaagcaacacagactcgatggtagtctagaaacaactaacgagatactcgactcggcttctcacgattgccctctcgttactcagacgtatggcgccgctgccggcaagggcacctacgttccatcctcacccacaagactcgcttatacagacgatctgggcgcggtgggcggggcttgtctggaggatgaggcatccgccctgcgtctggacgaggatagcgaacaccctccgatgatcctgcgcaccgattag

SEQ ID NO: 188879 - DNA, 1311 bp, Artificial Sequence
  derived and/or modified sequence
atgaacctggccagccagagcggggaggccggggccggccagctgctgtttgccaacttcaaccaggacaacaccagcctggccgtgggcagcaagagcggctacaagttcttcagcctgagctctgtggacaagctggagcagatctatgaatgtacagacacagaagatgtgtgcatcgtggagcggctcttcagcagcagcctggtggccatcgtgtccctgaaggcccccaggaagctgaaggtgtgccacttcaagaagggcacagagatctgcaactacagctacagcaacaccatcctggccgtgaagctgaaccggcagaggctcatcgtgtgcctggaggagagcctgtacatccacaacatccgggacatgaaggtgctgcacaccatccgggagaccccacccaacccagctggcctgtgtgccctgagcatcaacaatgacaactgctacctggcctacccaggcagcgccaccatcggggaggtgcaggtgtttgacaccatcaacctgcgggccgccaacatgatcccagcccatgacagccccctggccgccctggcctttgatgccagcggcaccaagctggccacagccagcgagaagggcaccgtcatccgggtcttcagcatccctgagggccagaagctgtttgagttccggcggggcgtgaagagatgtgtgtccatctgcagcctggccttctccatggatggcatgttcctgagcgccagcagcaacacagaaacagtgcacatcttcaagctggagaccgtgaaggagaagcccccagaggagcccaccacctggacaggctactttgggaaggtgctgatggccagcaccagctacctgcccagccaggtgacagagatgttcaaccagggccgggcctttgccaccgtgcggctgcccttctgtggccacaagaacatctgcagcctggccaccatccagaagatcccccggctgctggtgggcgctgctgatggctacctgtacatgtacaacctggacccccaggagggcggggagtgtgccctgatgaagcagcaccggctggatggcagcctggagaccaccaatgagatcctggacagcgccagccatgactgccccctggtgacccagacctacggggctgctgctgggaagggcacctacgtgcccagcagccccacccggctggcctacacagatgacctgggcgctgtgggcggggcctgcctggaggatgaggccagcgccctgcggctggatgaggacagcgagcacccccccatgatcctgaggacagactag

SEQ ID NO: 188880 - DNA, 1311 bp, Artificial Sequence
  derived and/or modified sequence
atgaacctggccagccagagcggcgaggccggcgccggccagctgctttttgctaactttaaccaagataacacgtcactggctgtcggctctaagagtggctataaattcttctccctttcttctgtggataagcttgagcagatctacgagtgtactgacaccgaggacgtctgtatcgttgagcgcctgtttagctcatccctggtggctatcgtttcgctcaaggctcctcggaagcttaaggtgtgccacttcaagaagggcactgagatatgtaattacagttattctaataccatcctggctgtcaaacttaatcgtcagaggctgattgtgtgcttagaagaatctctctacatacataatattcgggacatgaaggtgctccacacaattagagagacccctcctaatcctgctggtctttgtgccttgtccatcaacaacgataattgctacttggcttatcctggatcggctacaatcggagaagtgcaggtgtttgacaccattaacctgcgggccgccaacatgattcctgctcatgactccccactcgctgcgttggctttcgacgcgtctggcaccaaactggctacagccagcgaaaaagggactgtaatacgcgtgttctccatcccggaaggccaaaaacttttcgaattccggaggggagttaagcggtgcgtcagcatctgctccctggcattttcgatggacggaatgttccttagcgcatcctcgaataccgagaccgtacacatctttaagttggagaccgtcaaagagaagcccccagaggaacccacgacgtggaccgggtacttcggcaaggtactgatggcaagcacatcctatctcccaagccaggtcacagagatgtttaatcagggcagggctttcgcgaccgtgcgcctgccattctgtgggcacaaaaacatttgctccttggcgaccattcagaagattcctcgactgctggtcggggccgccgatgggtacttatatatgtacaatcttgacccgcaggaagggggagaatgcgcactcatgaaacagcaccgtctagacggaagcctcgagacaaccaatgagattctggatagtgcctcacacgattgccctctggttacccaaacttacggcgctgccgcagggaaggggacttacgtgccaagttcaccaacaaggttagcctacaccgatgacctgggagctgttgggggtgcatgccttgaagacgaggcaagcgctttgagactggatgaggactcggaacaccctcccatgatccttcggactgactag

SEQ ID NO: 188881 - DNA, 1311 bp, Artificial Sequence
  derived and/or modified sequence
atgaatcttgcgtctcagtcaggtgaggctggcgcaggccagttactgtttgccaactttaaccaggataacacaagcctagccgtaggttcaaagtcaggatacaagttctttagcctaagctcagtggataagcttgaacagatttacgagtgcacggacacagaagatgtgtgcattgtcgaacggctgttctcgagcagtttagtggcaatcgtttctctcaaggccccaagaaaactgaaggtgtgccacttcaagaaaggtactgagatttgcaattactcttattcaaacactatcctcgccgtgaaactgaatcgccagaggctgattgtgtgcctggaggagtccctttatatccataacattagggatatgaaagtactgcataccattcgcgaaaccccccctaacccggcaggcctgtgtgcattgtcaattaacaatgacaactgctatctggcctatcccggatctgccacaattggagaagtgcaggtgttcgacaccatcaacctgagagctgccaacatgattccagctcatgactctccgctggctgccctggccttcgacgcctctggcactaagctcgcgaccgctagcgagaaaggcaccgtgatccgggttttttcgatacctgaaggccagaagctgttcgagttccggagaggtgtgaagcgctgtgtgagcatttgctccttagcgttctcaatggacggtatgtttttgtctgccagctcaaacaccgagaccgtccacatctttaaactggagaccgtcaaggaaaaaccccctgaggaacctaccacctggacagggtacttcggaaaggttctgatggcatccactagctacctcccatcacaggttacggaaatgttcaatcaaggcagagcattcgccacagtgcgtttgcctttctgcggccataaaaatatctgttcacttgccacaattcagaaaataccccgtctgctggtgggagctgccgatggctacctctatatgtacaatctggaccctcaggagggcggtgaatgtgccctgatgaagcagcataggttggatggctctcttgaaaccactaatgagatcttagattctgccagccatgattgccctctggtgactcagacatatggcgcagccgcaggtaaagggacctacgtcccctcatccccgactagacttgcttacactgatgacctgggcgctgtcgggggtgcttgtctggaggatgaggcctccgccctcagactggacgaggattcggaacatccccctatgattctgcgaactgactag

SEQ ID NO: 188882 - DNA, 2112 bp, Artificial Sequence
  derived and/or modified sequence
tcgaggccgtgcgtcgcgggggcggggccgcgcaggcgtaccgggtgccccggctctggagcataaacaagagcggggacgggatgaggcggcggttgatcccagggtggcgagtggcggcgaccgaggcggcgagcggggcccggcgccgaccctgagtgcagcctgacccgccctcgcgcgcgcgccctccccggccgggcccactcgccgcgcgcccagccatgaacctggcgagccagagcggggaggccggcgccggccagctgctcttcgccaacttcaaccaggacaacacgtccctagctgttggtagtaagtccggttataaatttttctccctttcttctgtggataagctggaacagatctatgaatgcaccgatacggaagatgtgtgcattgtagagagattgttctccagcagcctagtggccatcgtcagccttaaagcaccaaggaagctaaaggtttgccactttaagaagggaactgagatctgcaactacagctactccaacacgattctggctgtgaagctcaacaggcagaggctgatagtatgcctggaggagtccctgtacatccacaacattcgggacatgaaggtgctgcatacgatcagggagacgcctccaaaccctgcaggcctgtgtgcgctgtcaatcaacaacgacaactgctacttggcgtacccagggagcgcgaccatcggagaggtgcaggtcttcgataccattaatttgagagctgcaaacatgattccggctcacgacagtcctttagcggcactggcctttgacgcaagtggaactaaacttgccacggcttcggagaaggggaccgtgattagggtattttccattccagaaggacaaaaactctttgagtttcggagaggagtaaagaggtgcgtgagcatctgctccctggccttcagcatggacggcatgttcctctccgcctccagcaacactgagaccgtgcacatcttcaaactcgagactgtgaaagaaaaacccccagaggagcccaccacctggaccgggtacttcgggaaagtgctcatggcctccaccagctacctgccttcccaagtgacagaaatgttcaaccagggcagagccttcgccacggtccgcctgccattctgcggccacaaaaacatctgctcgctagccacaattcagaagatcccgcggttgttggtgggtgccgccgacgggtacctgtacatgtacaacctggacccccaggagggcggcgagtgtgccctgatgaagcagcaccggctggacggcagtctggaaacgaccaatgagatcttggactctgcctctcacgactgccccttagtcactcagacatacggcgcagctgcaggaaaaggtacttacgtgccttcatccccaacgagacttgcctacacagacgacctgggtgctgtgggtggcgcctgcctggaggacgaggccagcgccctgcgcctggatgaggacagcgagcacccgcccatgattcttcggactgactgaacttgacctgtgacctctgacccggggagcagagaacactggcttcacagaggactttgtgcattgctgctatgaactttgacctgagtcgggggagaggatggcagagactttattaaaaaaaaaaaaagattgtagtggtagtctaactccataacgctgaggaaatacatcattttcacttcagtggcttttaaatcctgcttatgaattttagctttttgtttgtttgttttctctttttgccaaaattaactgtttggtgaagcccgcaaaacctcctcgctttgcatgcatgaacgtgccaagccagcataggggagctagaagccactttccagccacctgccgttgggttttttcatatctgtacataatgccgagtgcgtaaggaaaccgtggcgtcgcgcacagtgggtctgcttgtcaaggccagttctgcagtgacaggcccaggggctgcccaccaggtgtgctgggcagacttcagctgggacagaagtccgatctccctagggccccacctggaccattttccctccgttttattttgttaattaaattctttccaaattgg

SEQ ID NO: 188883 - protein, 349 aa, Artificial Sequence
  derived and/or modified sequence
MAAEEEEVDSADTGERSGWLTGWLPTWCPTSISHLKEAEEKMLKCVPCTYKKEPVRISNGNKIWTLKFSHNISNKTPLVLLHGFGGGLGLWALNFGDLCTNRPVYAFDLLGFGRSSRPRFDSDAEEVENQFVESIEEWRCALGLDKMILLGHNLGGFLAAAYSLKYPSRVNHLILVEPWGFPERPDLADQDRPIPVWIRALGAALTPFNPLAGLRIAGPFGLSLVQRLRPDFKRKYSSMFEDDTVTEYIYHCNVQTPSGETAFKNMTIPYGWAKRPMLQRIGKMHPDIPVSVIFGARSCIDGNSGTSIQSLRPHSYVKTIAILGAGHYVYADQPEEFNQKVKEICDTVD

SEQ ID NO: 188884 - DNA, 1050 bp, Artificial Sequence
  derived and/or modified sequence
atggcagctgaagaagaagaggttgacagtgcagacacaggagaacgcagcggatggctgacaggttggttgcctacatggtgtccgacatctataagccacctgaaagaggcggaagaaaaaatgttgaagtgtgtcccatgtacttacaagaaggagcccgtgcgaatctcgaatggaaataagatatggactctaaagttcagccacaacatcagtaacaagacccctctggttctcctccacggattcgggggtgggttgggcctatgggcactgaattttggggacttgtgtactaatagaccagtttatgccttcgatctgcttggcttcggccgcagcagccgacccagattcgactcagacgctgaggaagtggaaaaccagtttgtagagagcattgaagagtggagatgcgccctgggtttggataagatgatattgctaggccacaatctcgggggtttcctagcagcggcctactccttaaaatatcccagtcgcgtcaaccatctgatcttggtcgagccatggggcttcccagagcgcccagatctggccgaccaggaccgcccaattcccgtgtggattagggcattaggagccgcacttacccccttcaacccacttgccggcctgagaatcgctggaccttttgggttgagcctggttcagcgcctgcgccctgacttcaagcggaagtattctagcatgtttgaagacgatacagtgaccgaatacatctaccactgcaacgtgcagactccatccggcgagaccgccttcaagaacatgaccattccttacggctgggccaaacgccctatgctgcagcgcatcggtaagatgcaccccgacattcccgttagcgtgatattcggagcacgcagttgtatagatggcaactctggtacatctattcagtcacttcgcccacactcgtacgtcaaaaccatcgctatcctaggtgccgggcattacgtctacgcggaccagccagaagaattcaatcagaaggtcaaagagatctgtgataccgtggactag

SEQ ID NO: 188885 - DNA, 1050 bp, Artificial Sequence
  derived and/or modified sequence
atggctgctgaggaggaggaggtggacagcgctgacacaggagagaggagcggctggctgaccggctggctgcccacctggtgccccaccagcatcagccacctgaaggaggccgaggagaagatgctgaagtgtgtgccctgcacctacaagaaggagcctgtgcgcatcagcaatggaaacaagatctggaccctgaagttcagccacaacatcagcaacaagacccccctggtgctgctgcacggctttggaggcggcctgggcctgtgggccctgaactttggagacctgtgcaccaacagacctgtgtatgcctttgacctgctgggcttcggccgcagcagccggcccaggtttgacagtgatgctgaggaggtggagaaccagtttgtggagagcattgaggagtggaggtgtgccctgggcctggacaagatgatcctgctgggccacaacctgggcggcttcctggccgccgcctacagcctgaagtaccccagccgggtgaaccacctgatcctggtggagccctggggcttccctgagaggccagacctggccgaccaggaccggcccatccctgtgtggatccgggccctgggcgccgccctgacccccttcaaccccctggccggcctgagaattgctggccccttcggcctgagcctggtgcagaggctgcggccagacttcaagaggaagtacagctccatgtttgaagatgacacagtgacagagtacatctaccactgcaatgtgcagacccccagcggggagacagccttcaagaacatgaccatcccctacggctgggccaagaggcccatgctgcagagaattggcaagatgcacccagacatccctgtgtctgtcatctttggagcccggagctgcattgatggcaacagcggcaccagcatccagagcctgcggccccacagctatgtgaagaccatcgccatcctgggcgccggccactacgtgtatgctgaccagcctgaggagttcaaccagaaggtgaaggagatctgtgacacagtggactag

SEQ ID NO: 188886 - DNA, 1050 bp, Artificial Sequence
  derived and/or modified sequence
atggccgccgaggaggaggaggtggacagcgccgacaccggcgagaggtcagggtggctgaccggttggctgcccacatggtgtcctacttcaatttcacacctgaaggaagccgaagaaaagatgcttaaatgtgtgccatgtacatataagaaggagccggtgcgaatctccaatggcaataaaatatggactctgaagttttcccacaatattagcaacaagacgcccctggtgcttctccatggcttcggaggcggcctggggctttgggccctgaactttggagatctttgcaccaacagacccgtttacgcattcgatttgctaggctttggacgaagcagcagacccaggttcgactctgatgcagaggaagtggaaaaccaatttgtcgaaagcatagaagagtggcgatgtgcgctgggactggataaaatgatcctgctcgggcacaacctgggagggtttctggccgcagcttattcactaaagtatccctctcgagtgaaccatctgattcttgtcgaaccttggggtttcccagagaggcctgatctcgccgatcaagatagacctatcccagtatggattcgggcgctgggtgctgctctcacaccctttaatccattagccggactccgcatcgcgggccctttcgggttgagcttagtacagcgcctgagacccgatttcaagagaaaatatagctctatgttcgaggacgacaccgttaccgagtatatctaccattgcaacgttcagactcctagcggtgaaaccgcctttaagaatatgacaataccctacggctgggccaagagaccaatgttgcagcgtatcggaaagatgcatccagatatccctgtgtccgtaattttcggagcacggtcatgtatcgatggaaattctggtacgtcaatccagtcactgcggccacacagttacgtcaaaactatcgcgattctcggggcaggccattacgtatacgctgaccaacctgaggagttcaaccagaaggttaaagagatctgcgataccgtggattag

SEQ ID NO: 188887 - DNA, 1050 bp, Artificial Sequence
  derived and/or modified sequence
atggcagcagaagaagaggaggtggatagtgcggacacaggggaaagatctggctggctgactggctggctgcctacatggtgtcctaccagtatttctcatctgaaggaagcggaggaaaaaatgctgaagtgcgtcccttgtacttacaagaaggagcctgtccggattagtaacggcaacaagatttggactctgaaattcagccacaacatctccaataaaaccccgctggttctcctgcatggcttcggcggtggacttggcctgtgggctctaaatttcggagatttatgtacaaaccgcccagtctatgcctttgacctcttaggttttggcaggagctccaggccacggtttgattccgatgcggaagaggtggagaaccaattcgtggagtccatcgaagagtggcgttgtgcccttggcttagacaagatgattttgctaggccataatctggggggtttcctcgctgcagcgtactctctaaaatacccttccagagtgaaccacctgatacttgttgaaccatggggattccccgaacgtccagacctggctgaccaggatcgacccatccccgtgtggatccgggctctgggggcagccttgacaccttttaacccactggctggtttgaggatcgcgggaccttttggtttgtcgttggtgcagagactgcggccagattttaagaggaagtatagcagcatgtttgaagacgatacagtgacagagtatatctatcactgtaatgtgcagacgccatcaggagaaaccgcattcaaaaacatgacgatcccttacgggtgggcgaagcgccctatgctccagcggatcggcaaaatgcaccccgacataccggtaagtgtgatcttcggtgcacgttcctgtatcgatggaaattctgggactagcatacagtcacttaggccgcacagttatgtgaagacaattgccatcctgggcgctggacattacgtctacgccgaccagcccgaggaattcaatcaaaaggtaaaggagatttgtgataccgtggactag

SEQ ID NO: 188888 - DNA, 1690 bp, Artificial Sequence
  derived and/or modified sequence
agtgcgcggaagacgcatgcgctggcggcctgcgccgccttaagtgccgcgccagcccggggcggcccagtcggcctgtcagccggcttcgagataagtcccggcgcttgcgcggcggcggctatggcggcggaggaggaggaggtggactctgccgacaccggagagaggtcaggatggctaactggttggctccccacatggtgccctacgtctatatcacaccttaaagaagctgaagagaagatgttaaaatgtgtgccttgcacatacaaaaaagaacctgttcgtatatctaatggaaataaaatatggacactgaagttctctcataatatttcaaataagactccacttgtccttctccatggttttggaggaggtcttgggctctgggcactgaattttggagatctttgcaccaacagacctgtctatgcttttgacctattgggttttggacgaagtagtagacccaggtttgacagtgatgcagaagaagtggagaatcagtttgtggaatccattgaagagtggagatgtgccctaggattggacaaaatgatcttgcttgggcacaacctaggtggattcttggctgctgcttactcgctgaagtacccatcaagggttaatcatctcattttagtggagccttggggtttccctgaacgaccagaccttgctgatcaagacagaccaattccagtttggatcagagccttgggagcagcattgactccctttaaccctttagctggcctaaggattgcaggaccctttggtttaagtctagtgcagcgtttaaggcctgatttcaaacgaaagtattcttcaatgttcgaagacgatactgtgacagaatacatctaccactgtaatgtgcagactccaagtggtgagacagctttcaagaatatgactattccttatggatgggcaaaaaggccaatgctccagcgaattggtaaaatgcaccctgacattccagtttcagtgatctttggcgcccgatcctgcatagatggcaattctggcaccagcatccagtccttacgaccacattcatatgtgaagacaatagctattcttggggcaggacattatgtatatgcagatcaaccagaagaattcaaccagaaagtaaaggagatctgcgacactgtggactgaacacactgaagctctgatgggaaaacctggtgactgatatagttgttcagcaataattcatagtctgtgatgaagagtagtgaatacaacacacaaccaggcagccttcttgactatactttgcacatgttttctttaggaattcactcacacatttaaaccagttagtgccttctagaagaatggctttcctttctcctacacaaaattgaaatatacaagtctctaaatataatacctttaaataaaaggttatttgtccctctgatgtactgaaaaactgtaatttttcagctgaaaattttttaatctaactttgctagttatttttatattgcaatctatattaccaatttaggaagtgatttctgagtctcttacactgtaaaggtgcactttattttctttgtcttccccatcatgtatttattgtgtcttgataactgatattaatctaaattcaatgtgtttttatgtaaaaatttgtcagttgtttagaatatttcactttgttttt

SEQ ID NO: 188889 - DNA, 1050 bp, Artificial Sequence
  derived and/or modified sequence
atggccgccgaggaggaggaggtggacagcgccgacaccggcgagagaagcggctggctgaccggctggctgcccacctggtgccccaccagcatcagccacctgaaggaggccgaggagaagatgctgaagtgcgtgccctgcacctacaagaaggagcccgtgagaatcagcaacggcaacaagatctggaccctgaagttcagccacaacatcagcaacaagacccccctggtgctgctgcacggcttcggcggcggcctgggcctgtgggccctgaacttcggcgacctgtgcaccaacagacccgtgtacgccttcgacctgctgggcttcggcagaagcagcagacccagattcgacagcgacgccgaggaggtggagaaccagttcgtggagagcatcgaggagtggagatgcgccctgggcctggacaagatgatcctgctgggccacaacctgggcggcttcctggccgccgcctacagcctgaagtaccccagcagagtgaaccacctgatcctggtggagccctggggcttccccgagagacccgacctggccgaccaggacagacccatccccgtgtggatcagagccctgggcgccgccctgacccccttcaaccccctggccggcctgagaatcgccggccccttcggcctgagcctggtgcagagactgagacccgacttcaagagaaagtacagcagcatgttcgaggacgacaccgtgaccgagtacatctaccactgcaacgtgcagacccccagcggcgagaccgccttcaagaacatgaccatcccctacggctgggccaagagacccatgctgcagagaatcggcaagatgcaccccgacatccccgtgagcgtgatcttcggcgccagaagctgcatcgacggcaacagcggcaccagcatccagagcctgagaccccacagctacgtgaagaccatcgccatcctgggcgccggccactacgtgtacgccgaccagcccgaggagttcaaccagaaggtgaaggagatctgcgacaccgtggactag

SEQ ID NO: 188890 - protein, 327 aa, Artificial Sequence
  derived and/or modified sequence
MALVHKLLRGTYFLRKFSKPTSALYPFLGIRFAEYSSSLQKPVASPGKASSQRKTEGDLQGDHQKEVALDITSSEEKPDVSFDKAIRDEAIYHFRLLKDEIVDHWRGPEGHPLHEVLLEQAKVVWQFRGKEDLDKWTVTSDKTIGGRSEVFLKMGKNNQSALLYGTLSSEAPQDGESTRSGYCAMISRIPRGAFERKMSYDWSQFNTLYLRVRGDGRPWMVNIKEDTDFFQRTNQMYSYFMFTRGGPYWQEVKIPFSKFFFSNRGRIRDVQHELPLDKISSIGFTLADKVDGPFFLEIDFIGVFTDPAHTEEFAYENSPELNPRLFK

SEQ ID NO: 188891 - protein, 209 aa, Artificial Sequence
  derived and/or modified sequence
MALVHKLLRGTYFLRKFSKPTSALYPFLGIRFAEYSSSLQKPVASPGKASSQRKTEGDLQGDHQKEVALDITSSEEKPDVSFDKAIRDEAIYHFRLLKDEIVDHWRGPEGHPLHEVLLEQAKVVWQFRGKEDLDKWTVTSDKTIGGRSEVFLKMGKNNQSALLYGTLSSEAPQDGESTRSGYCAMISRIPRGAFERKMSYDWSQFNTLY

SEQ ID NO: 188892 - DNA, 984 bp, Artificial Sequence
  derived and/or modified sequence
atggccctagtgcacaagcttctgcgcggcacctatttcctgcgtaagtttagtaagcccaccagcgctctgtaccctttcctagggattagatttgcagaatactcatctagtctccagaagcccgtagcttcacctggcaaagcctcttctcagaggaagacagagggagacctgcagggggatcaccagaaggaggttgccctggacatcacttcatcagaggagaaacccgacgtgagcttcgacaaggccatccgtgacgaagcaatttaccatttccgtctgcttaaggacgagatcgtggaccattggcgtggccccgagggccatcccctgcatgaggttttgctggagcaagctaaggtagtctggcagtttaggggaaaagaggatctggataaatggacagttacttctgacaaaaccatcggcggccgctctgaggtttttttaaagatgggcaagaacaaccagtccgcgctcctgtacggtactctgtcatctgaagccccacaggatggagagtcaaccagaagcggctactgcgctatgataagccggattcctaggggagcctttgaacgaaaaatgtcctatgattggagccagtttaacacactctatctgagggtacggggagacggacgtccatggatggtaaatattaaggaagataccgacttcttccaacggaccaaccagatgtattcttattttatgtttacccggggcgggccctactggcaggaagtgaagatccccttctctaaatttttctttagcaacagaggaagaatcagagacgtccagcacgaactcccgctggataaaatttcttcaatcggttttacactcgccgacaaagtggatggaccgttctttctggagatcgactttatcggggtgtttaccgaccctgcacatacggaagagttcgcctatgaaaattctccagagctgaacccacgcttatttaagtag

SEQ ID NO: 188893 - DNA, 984 bp, Artificial Sequence
  derived and/or modified sequence
atggccctggtgcacaagctgctgcggggcacctacttcctgaggaagttcagcaagcccaccagcgccctgtaccccttcctgggcatccgctttgctgagtacagcagcagcctgcagaagcctgtggccagccctgggaaggccagcagccagaggaagacagaaggagacctgcagggcgaccaccagaaggaggtggccctggacatcaccagcagcgaggagaagccagatgtgtcctttgacaaggccatcagagatgaggccatctaccacttccggctgctgaaggatgaaattgtggaccactggaggggccctgagggccaccccctgcacgaggtgctgctggagcaggccaaggtggtgtggcagttccggggcaaggaggacctggacaagtggacagtgaccagtgacaagaccatcggcggccgctctgaggtgttcctgaagatgggcaagaacaaccagagcgccctgctgtatggcaccctgagcagcgaggccccccaggatggagagagcaccaggagcggctactgtgccatgatcagccgcatccccaggggggcctttgagaggaagatgtcctatgactggagccagttcaacaccctgtacctgcgggtgagaggagatggccggccctggatggtgaacatcaaggaggacacagacttcttccagaggaccaaccagatgtacagctacttcatgttcacccggggcggcccctactggcaggaggtgaagatccccttcagcaagttcttcttcagcaacagaggccgcatcagagatgtgcagcacgagctgcccctggacaagatcagcagcatcggcttcaccctggccgacaaggtggatggccccttcttcctggagattgacttcatcggggtcttcacagatcctgcccacacagaggagtttgcctatgagaacagccctgagctgaaccccaggctcttcaagtag

SEQ ID NO: 188894 - DNA, 1457 bp, Artificial Sequence
  derived and/or modified sequence
aagcggcggcaggccggcggttggtgtgtcccgggtgtggggaggcgacagagccctggcacttgagggttgagggggcctccccagcgcggcgaaccgtctagcctccggaggccaggccgtgagtgcgggaggtatacgccaaggcggaagaattttgccactcactacctgtgtgacctcgggtaaattagccttggaacgtcagtttcttcgtctctataattgaaataataatagtacctctctcaggattgttgtgagccgtcagtgaaacacttagagcagtttctggcacatggtagaattgggctatttgctgaagcttcttggtggcccttgctagcccaggaagaaacttacattttgatttttttgtaccatggctttggttcacaaattgctgcgtggtacttattttctcagaaaattctctaagccaacttctgccttgtatccatttttgggtattcgctttgcagagtattccagtagtcttcagaaaccagtggcttctcctggcaaagcctcctcacagaggaagactgaaggggatttgcaaggagatcaccagaaagaagttgctttggatataacttcttctgaggagaagcctgatgttagtttcgataaagcaattagagatgaagcaatataccattttaggcttttgaaggatgaaattgtggatcattggagaggaccggaaggccaccctctgcatgaggtcttgctggaacaagccaaggttgtctggcaattccgggggaaagaagatttggataagtggacagtgacttctgataagacgattggaggcagaagtgaagtgtttttgaaaatgggcaagaataaccaaagtgcactgctatatggaactctgagctctgaggcgcctcaggacggggagtctacccgaagtgggtactgtgcaatgatatccaggattccaaggggtgcttttgagaggaagatgtcttacgattggtcccagttcaatactctgtatctccgtgtacgtggggatggtcggccttggatggtgaatatcaaggaggacacagatttcttccagaggacgaatcagatgtatagttacttcatgttcacccgcgggggaccctactggcaggaggtcaagattcctttttccaaatttttcttctctaatcgaggaagaatccgggatgttcagcatgagcttccgcttgataagatctcttctataggattcaccttggctgataaagtggatggtccattcttcctggagatagattttattggcgtgtttactgatccagctcatacagaagaatttgcctatgaaaattctccagagcttaacccaaggctttttaaataaagatcatatggtagttttgttttactaatctaagggtactagcatctacaatgatatagacaaaataaaatatttctttaatggcatccaa

SEQ ID NO: 188895 - DNA, 984 bp, Artificial Sequence
  derived and/or modified sequence
atggccctggtgcacaagctgctgcggggcacctacttcctgcggaagttcagcaagccgacctccgcactctatcccttcctgggtatccggtttgcggagtactcatccagccttcagaagccggtggcctcccccggaaaggcatcttcgcagaggaaaacggagggagatctccagggagaccaccaaaaggaggtggctttggatattacatcctcagaagagaagcccgacgtaagctttgataaagctattcgcgatgaagcgatctatcactttagactgctcaaggatgagattgtagatcactggcgcggcccggagggacaccctctgcatgaggtgctgctggagcaagccaaggtggtgtggcagtttaggggaaaagaagatttagacaagtggactgttacctcggacaaaaccattggcggccgtagtgaggtattcctgaagatgggcaagaacaatcagagcgccctgctgtatgggacactgagcagcgaggccccacaggatggtgagtccacacgttctggatactgcgcaatgatctcgcggatcccacggggagcatttgagagaaagatgtcatatgattggtcccagttcaataccttgtacctgcgcgtccggggcgacggcaggccttggatggttaatattaaggaagacactgatttttttcagaggactaaccagatgtacagctatttcatgtttactagaggcgggccgtattggcaggaagttaagattcccttcagtaagtttttcttctcaaaccgcgggcgcatcagggacgtgcagcatgagctgcctttggataaaatatctagcattggtttcacactcgcggataaagtagacggacctttctttctcgagatcgattttatcggggtcttcactgaccccgcccacactgaagagttcgcctacgaaaactctcccgagctcaacccacggctgttcaagtag

SEQ ID NO: 188896 - DNA, 984 bp, Artificial Sequence
  derived and/or modified sequence
atggccttggtgcacaagttgttgagagggacttattttctgaggaaattttctaaaccaactagcgcgttgtaccccttcctcggcattcggttcgccgagtactccagctcactgcagaaacctgtggcatcgcccggaaaagcatccagtcagcgtaagacagagggcgaccttcaaggggaccaccagaaggaggtggcattggatattacgtctagcgaagagaaacctgacgtttccttcgataaggccatccgggacgaagctatctaccatttccgattactgaaagatgaaatcgttgatcactggcggggacccgagggccatcctctgcatgaagtattgctagagcaagcgaaagtcgtatggcagtttcggggaaaggaggatctggataaatggaccgtgaccagcgacaagacaataggtggacggtcagaagtattcctcaagatggggaaaaacaaccagtctgctctcctttacggcacactgagctctgaagcaccacaggacggagagagcacgcgcagcggctattgtgcgatgatcagcagaatacctagaggcgcatttgagcgcaaaatgagctatgattggagccagttcaacacgctgtacctgagggtccgtggagatggcaggccgtggatggtgaacatcaaagaggataccgattttttccagcgtactaaccagatgtattcgtactttatgttcactcgaggtggcccttactggcaggaagtcaaaattcccttttcaaagttcttcttttctaatcgtggaaggatcagggacgtgcagcatgagctgcccctggacaagatttcgagcataggcttcacccttgcagacaaggtggacggacccttctttctggaaatcgactttatcggtgtattcactgacccagcacataccgaggagttcgcgtacgagaactctcctgagctgaatccccgacttttcaagtag

SEQ ID NO: 188897 - DNA, 984 bp, Artificial Sequence
  derived and/or modified sequence
atggccctggtgcacaagctgctgagaggcacctacttcctgagaaagttcagcaagcccaccagcgccctgtaccccttcctgggcatcagattcgccgagtacagcagcagcctgcagaagcccgtggccagccccggcaaggccagcagccagagaaagaccgagggcgacctgcagggcgaccaccagaaggaggtggccctggacatcaccagcagcgaggagaagcccgacgtgagcttcgacaaggccatcagagacgaggccatctaccacttcagactgctgaaggacgagatcgtggaccactggagaggccccgagggccaccccctgcacgaggtgctgctggagcaggccaaggtggtgtggcagttcagaggcaaggaggacctggacaagtggaccgtgaccagcgacaagaccatcggcggcagaagcgaggtgttcctgaagatgggcaagaacaaccagagcgccctgctgtacggcaccctgagcagcgaggccccccaggacggcgagagcaccagaagcggctactgcgccatgatcagcagaatccccagaggcgccttcgagagaaagatgagctacgactggagccagttcaacaccctgtacctgagagtgagaggcgacggcagaccctggatggtgaacatcaaggaggacaccgacttcttccagagaaccaaccagatgtacagctacttcatgttcaccagaggcggcccctactggcaggaggtgaagatccccttcagcaagttcttcttcagcaacagaggcagaatcagagacgtgcagcacgagctgcccctggacaagatcagcagcatcggcttcaccctggccgacaaggtggacggccccttcttcctggagatcgacttcatcggcgtgttcaccgaccccgcccacaccgaggagttcgcctacgagaacagccccgagctgaaccccagactgttcaagtag

SEQ ID NO: 188898 - protein, 293 aa, Artificial Sequence
  derived and/or modified sequence
MNNLSFSELCCLFCCPPCPGKIASKLAFLPPDPTYTLMCDESGSRWTLHLSERADWQYSSREKDAIECFMTRTSKGNRIACMFVRCSPNAKYTLLFSHGNAVDLGQMSSFYIGLGSRINCNIFSYDYSGYGASSGKPTEKNLYADIEAAWLALRTRYGIRPENVIIYGQSIGTVPSVDLAARYESAAVILHSPLTSGMRVAFPDTKKTYCFDAFPNIDKISKITSPVLIIHGTEDEVIDFSHGLALFERCQRPVEPLWVEGAGHNDVELYGQYLERLKQFVSQELVQKHKEGK

SEQ ID NO: 188899 - DNA, 882 bp, Artificial Sequence
  derived and/or modified sequence
atgaacaacctttcattctccgagctttgttgtctcttctgctgcccaccgtgtccgggaaaaatcgctagcaagctggcctttctccctcccgacccaacttatactcttatgtgtgacgaatccggctcgcggtggactctccatctgtccgagagagcagattggcagtattcatccagagaaaaagacgcgattgaatgctttatgacgcgtactagtaaaggaaatcgtatcgcctgcatgttcgtcagatgctcaccaaatgccaaatacacattattattctcccacgggaacgccgtggatctaggacaaatgtcttctttttatataggactgggaagcagaattaattgcaacatattttcatatgattactccggttacggagcatcgagtggaaagcccaccgagaaaaacctgtacgccgacatcgaggctgcctggctggccttaagaacacgttatgggatccggcctgaaaatgtaataatttacggccagtccattgggactgttccctccgtggatctggccgctaggtacgagtcagctgctgttattctgcactcacctctcacttctggaatgagggtggcatttcccgacactaaaaaaacctactgtttcgatgcttttcctaacatagataagatctccaaaattacttctcccgttttaattattcacgggaccgaggacgaggtcatcgacttttcccacggactggccctgttcgaaaggtgtcagaggccagtcgagcctctgtgggtggagggtgccggtcacaatgacgtcgaactgtacggccagtacctggagagattgaaacagttcgtgagccaagaattggtgcagaaacacaaagaaggaaagtag

SEQ ID NO: 188900 - DNA, 882 bp, Artificial Sequence
  derived and/or modified sequence
atgaacaatttgtccttttctgaactctgctgtctgttttgctgccctccatgtcccggtaaaatagcaagtaaactagctttcctccccccggatccaacttacacccttatgtgcgacgaatccggttcgcggtggaccctccaccttagcgaacgagcagattggcagtactcctcaagggaaaaggacgctattgaatgctttatgactaggactagtaagggaaaccgtattgcctgcatgttcgttaggtgcagccctaacgcaaaatacactctgctgttctctcacgggaatgcggtcgacttgggacaaatgagtagtttctatattggtctgggctctagaataaactgcaacatttttagttatgactacagcggctatggcgcctccagcgggaagccaacggaaaaaaatctttacgcagatattgaagcggcttggctggccctgcgcacacgatatggtattaggccagaaaacgtcatcatctatggacagagcatcggaactgttccctccgtcgaccttgctgcaagatacgaatccgcggccgtgatcctccatagtcccttaacatccggcatgcgcgttgccttcccggacacaaaaaagacttactgctttgatgcatttccgaatatcgataaaatctcaaagatcacttcccccgtgctaatcatccacggtacagaggacgaagtcatagacttttcacacggattagccctctttgaacggtgtcaaaggcccgtggagcctttgtgggtagagggagcaggacacaatgacgtggaactgtatggccagtatctggaacggctcaaacagttcgtatcccaggagttggttcaaaagcataaagagggaaagtag

SEQ ID NO: 188901 - DNA, 882 bp, Artificial Sequence
  derived and/or modified sequence
atgaataatctgtccttctcagaactttgttgcctcttctgttgccccccctgtcccggcaagattgcaagcaagttagcttttctgcccccagatcctacttacactctcatgtgcgatgaaagtggttctagatggaccttgcatctcagtgaacgcgctgattggcaatattcctctcgcgagaaagatgcaatcgaatgttttatgacccggacaagcaagggcaaccgaattgcatgcatgttcgtcagatgctcccccaacgccaagtatacccttttgtttagccacggaaacgcggtcgacttgggacaaatgagtagtttctatattggtctgggctctagaataaactgcaacatttttagttatgactacagcggctatggcgcctccagcgggaagccaacggaaaaaaatctttacgcagatattgaagcggcttggctggccctgcgcacacgatatggtattaggccagaaaacgtcatcatctatggacagagcatcggaactgttccctccgtcgaccttgctgcaagatacgaatccgcggccgtgatcctccatagtcccttaacatccggcatgcgcgttgcctttcctgacaccaagaaaacctactgcttcgacgcatttccaaatatcgataaaatctctaaaattaccagccccgtgctaattatacacggaaccgaggatgaggttattgatttctcacacgggttagcattgttcgagagatgtcaacgcccagtggagcccttgtgggtggaaggggcagggcacaatgacgtggagctttacggtcagtacctcgaaaggctgaaacagtttgtatcccaggaactggtgcaaaagcataaagagggtaagtag

SEQ ID NO: 188902 - DNA, 882 bp, Artificial Sequence
  derived and/or modified sequence
atgaacaacctgagcttcagcgagctgtgctgcctgttctgctgccccccctgccccggcaagatcgccagcaagctggccttcctgccccccgaccccacctacaccctgatgtgcgacgagagcggcagcagatggaccctgcacctgagcgagagagccgactggcagtacagcagcagagagaaggacgccatcgagtgcttcatgaccagaaccagcaagggcaacagaatcgcctgcatgttcgtgagatgcagccccaacgccaagtacaccctgctgttcagccacggcaacgccgtggacctgggccagatgagcagcttctacatcggcctgggcagcagaatcaactgcaacatcttcagctacgactacagcggctacggcgccagcagcggcaagcccaccgagaagaacctgtacgccgacatcgaggccgcctggctggccctgagaaccagatacggcatcagacccgagaacgtgatcatctacggccagagcatcggcaccgtgcccagcgtggacctggccgccagatacgagagcgccgccgtgatcctgcacagccccctgaccagcggcatgagagtggccttccccgacaccaagaagacctactgcttcgacgccttccccaacatcgacaagatcagcaagatcaccagccccgtgctgatcatccacggcaccgaggacgaggtgatcgacttcagccacggcctggccctgttcgagagatgccagagacccgtggagcccctgtgggtggagggcgccggccacaacgacgtggagctgtacggccagtacctggagagactgaagcagttcgtgagccaggagctggtgcagaagcacaaggagggcaagtag

SEQ ID NO: 188903 - DNA, 882 bp, Artificial Sequence
  derived and/or modified sequence
atgaacaacttgagttttagtgaactttgttgcttgttttgctgtccaccatgccccgggaagattgcctccaaactcgcctttctcccaccagatcccacgtacaccctaatgtgtgatgaatctgggtcacggtggacgctacacctatccgagcgggccgactggcagtactcttcacgcgaaaaggatgcgattgaatgcttcatgacacggacttctaaaggaaatagaatcgcctgcatgtttgtgcgttgtagtccaaatgctaaatacacactgctatttagtcacgggaacgctgtggacctgggacagatgtcttccttctacatcggtctcggctcacgaattaattgtaacatcttctcctatgactacagcggctacggtgcatctagtgggaagcctacagagaagaatctgtacgcagacattgaggctgcctggttggcactgcgcacgcgttatggtattaggcccgaaaacgtcatcatttatgggcaatctatcgggactgtgccctctgtggatcttgctgctaggtacgagtcggccgcagtcatcctgcatagcccattaacgtcaggtatgcgcgtggccttccctgacactaagaagacatactgttttgacgccttcccaaatattgacaaaatcagcaaaattacctcccctgtcctgatcattcatggtactgaggatgaggtgatcgacttttcacatgggctcgccctgtttgagaggtgtcagagaccggtggaacccttgtgggtggagggtgcaggccacaacgatgtggagctgtacggccagtacctggagaggctgaagcagtttgtctctcaggaactggtccaaaagcataaggagggcaaatag

SEQ ID NO: 188904 - DNA, 882 bp, Artificial Sequence
  derived and/or modified sequence
atgaacaacctgtccttcagcgagctgtgctgcctcttctgctgccccccctgccctgggaagatcgccagcaagctggccttcctgcccccagaccccacctacaccctgatgtgtgatgagagcggcagccgctggaccctgcacctgtctgaaagagctgactggcagtacagcagccgggagaaggatgccatcgagtgcttcatgaccaggaccagcaaaggaaacagaattgcctgcatgtttgtgcgctgcagccccaatgccaagtacaccctgctcttcagccacggcaatgctgtggacctgggccagatgagcagcttctacatcggcctgggcagccgcatcaactgcaacatcttctcctatgactacagcggctacggggccagcagcggcaagcccacagagaagaacctgtatgctgacatcgaggccgcctggctggccctgcggaccaggtatggcatccggccagaaaatgtcatcatctacggccagagcattggaacagtgcccagcgtggacctggccgcccgctatgaatctgctgctgtgatcctgcacagccccctgaccagcggcatgagggtggccttcccagacaccaagaagacctactgctttgatgccttccccaacatcgacaagatcagcaagatcaccagccctgtgctgatcatccatggaacagaagatgaagtcatcgacttcagccacggcctggccctgtttgagcgctgccagaggcctgtggagcccctgtgggtggagggcgccggccacaatgatgtggagctgtatggccagtacctggagcggctgaagcagtttgtgtcccaggagctggtgcagaagcacaaggagggcaagtag

SEQ ID NO: 188905 - DNA, 1312 bp, Artificial Sequence
  derived and/or modified sequence
cagcgccccgcaccggggccgttagtcagcagaacgcgagctcttgtggaggagcagggccggcgcgaggcgagactcgggagcgtgagcggggcccctggggcgccgccgtccttcttcgccccggcgccgggggctgtagccctggtccccgctcctctgtcgggccagtctgcaggcggagagagtcggacggcgcccggagcgcggatctcgccttgtggaggacagcgcgtcggctgcggttctctctcgaccccttctgcccggcgcttcggcccgggccgctcaggtgcagagcatgaataatctttcatttagtgagctatgttgcctcttctgctgtccaccttgtccagggaagattgcttcaaaattagcgtttttgccacctgatccaacttacacactgatgtgtgatgaaagcggaagccgttggactttacatctgtctgaacgagcagactggcagtattcttctagagaaaaagatgctattgagtgtttcatgactagaaccagtaaaggcaacagaattgcttgtatgtttgtacgttgttcacccaatgcgaaatacactttactcttctcacatggaaatgctgttgatcttggtcaaatgagcagcttttacataggactaggatcacggattaattgtaatatattctcatatgattattctggatatggtgccagttccgggaaacccacagagaagaacctctatgcagacattgaagctgcttggcttgctcttaggacaagatatggcattcgccctgaaaatgtgattatatatggccaaagtatagggacagtaccgtctgtggatcttgctgctcgatatgagagtgctgctgttattcttcattctcctctgacttcgggaatgcgagttgcctttcctgataccaagaagacctactgttttgatgcattcccaaacattgacaaaatctctaagataacctctccagtattaataattcatgggactgaagatgaagtcattgacttttcacatggcctcgcattgtttgaacgttgccaaagacctgtggagcctctctgggttgaaggagcaggtcacaatgatgtggaactttatggacagtatcttgaaaggttgaaacagtttgtgtcacaggaactggtgcagaaacataaagaagggaagtgattttctcaaggtctacagttttcaatgacggtactatgtattccattatcttctctttaccaaacttaactggattaatataccaatgatcctttcaaattatatgacataaacttatttgctctccaa

SEQ ID NO: 188906 - DNA, 882 bp, Artificial Sequence
  derived and/or modified sequence
atgaacaacctgagcttcagcgagctgtgctgcctgttctgctgccccccatgtcccggcaaaattgccagtaaactggcctttctgccaccagaccccacatatacactcatgtgcgatgagtcaggatcacggtggaccctacatctgagcgagagggcagattggcagtacagcagcagggaaaaggacgcgatcgaatgtttcatgaccagaacaagcaagggcaatcggatcgcctgcatgttcgtccggtgctcccctaatgccaaatatactctattattcagtcacggaaatgccgtggatttgggtcagatgtcgtctttttatattggacttggatctcggataaactgtaatatcttctcctacgattactctggttatggagcctcatcaggtaagccaacagagaaaaatctctacgccgacatcgaggcggcctggctggcactgagaactaggtatggaataaggccagaaaacgttataatctatgggcagtccattgggactgtcccatcggtggatcttgccgcaaggtatgaatcggccgcggtgattcttcacagtcccctcaccagcggaatgagagttgcatttcccgataccaaaaagacatactgttttgacgcctttcccaatattgacaagatcagtaagatcacatcccccgtgttgataattcacgggacagaggatgaggttattgacttctctcatggtctcgcactctttgagcggtgtcagaggccagttgaacctctctgggtggagggggcaggacataacgatgtggagttgtacggccaatacctagaaaggttgaagcagtttgtcagccaggagctagtccaaaaacacaaggaaggaaagtag

SEQ ID NO: 188907 - RNA, 882 nt, Artificial Sequence
  derived and/or modified sequence
augaacaauuuguccuuuucugaacucugcugucuguuuugcugcccuccaugucccgguaaaauagcaaguaaacuagcuuuccuccccccggauccaacuuacacccuuaugugcgacgaauccgguucgcgguggacccuccaccuuagcgaacgagcagauuggcaguacuccucaagggaaaaggacgcuauugaaugcuuuaugacuaggacuaguaagggaaaccguauugccugcauguucguuaggugcagcccuaacgcaaaauacacucugcuguucucucacgggaaugcggucgacuugggacaaaugaguaguuucuauauuggucugggcucuagaauaaacugcaacauuuuuaguuaugacuacagcggcuauggcgccuccagcgggaagccaacggaaaaaaaucuuuacgcagauauugaagcggcuuggcuggcccugcgcacacgauaugguauuaggccagaaaacgucaucaucuauggacagagcaucggaacuguucccuccgucgaccuugcugcaagauacgaauccgcggccgugauccuccauagucccuuaacauccggcaugcgcguugccuucccggacacaaaaaagacuuacugcuuugaugcauuuccgaauaucgauaaaaucucaaagaucacuucccccgugcuaaucauccacgguacagaggacgaagucauagacuuuucacacggauuagcccucuuugaacggugucaaaggcccguggagccuuuguggguagagggagcaggacacaaugacguggaacuguauggccaguaucuggaacggcucaaacaguucguaucccaggaguugguucaaaagcauaaagagggaaaguag

SEQ ID NO: 188908 - RNA, 882 nt, Artificial Sequence
  derived and/or modified sequence
augaauaaucuguccuucucagaacuuuguugccucuucuguugcccccccugucccggcaagauugcaagcaaguuagcuuuucugcccccagauccuacuuacacucucaugugcgaugaaagugguucuagauggaccuugcaucucagugaacgcgcugauuggcaauauuccucucgcgagaaagaugcaaucgaauguuuuaugacccggacaagcaagggcaaccgaauugcaugcauguucgucagaugcucccccaacgccaaguauacccuuuuguuuagccacggaaacgcggucgacuugggacaaaugaguaguuucuauauuggucugggcucuagaauaaacugcaacauuuuuaguuaugacuacagcggcuauggcgccuccagcgggaagccaacggaaaaaaaucuuuacgcagauauugaagcggcuuggcuggcccugcgcacacgauaugguauuaggccagaaaacgucaucaucuauggacagagcaucggaacuguucccuccgucgaccuugcugcaagauacgaauccgcggccgugauccuccauagucccuuaacauccggcaugcgcguugccuuuccugacaccaagaaaaccuacugcuucgacgcauuuccaaauaucgauaaaaucucuaaaauuaccagccccgugcuaauuauacacggaaccgaggaugagguuauugauuucucacacggguuagcauuguucgagagaugucaacgcccaguggagcccuuguggguggaaggggcagggcacaaugacguggagcuuuacggucaguaccucgaaaggcugaaacaguuuguaucccaggaacuggugcaaaagcauaaagaggguaaguag

SEQ ID NO: 188909 - protein, 346 aa, Artificial Sequence
  derived and/or modified sequence
MAASGKLSTCRLPPLPTIREIIKLLRLQAAKQLSQNFLLDLRLTDKIVRKAGNLTNAYVYEVGPGPGGITRSILNADVAELLVVEKDTRFIPGLQMLSDAAPGKLRIVHGDVLTFKVEKAFSESLKRPWEDDPPNVHIIGNLPFSVSTPLIIKWLENISCRDGPFVYGRTQMTLTFQKEVAERLAANTGSKQRSRLSVMAQYLCNVRHIFTIPGQAFVPKPEVDVGVVHFTPLIQPKIEQPFKLVEKVVQNVFQFRRKYCHRGLRMLFPEAQRLESTGRLLELADIDPTLRPRQLSISHFKSLCDVYRKMCDEDPQLFAYNFREELKRRKSKNEEKEEDDAENYRL

SEQ ID NO: 188910 - DNA, 1289 bp, Artificial Sequence
  derived and/or modified sequence
tttctttcggagcggcggtgaaggtcctgggtgaggtagggttggatggtgcttgccgcgtatcatggctgcctccggaaaactcagcacttgccgtctccctccgttgcccacgattcgagaaatcattaagttgttaagactgcaagcagcgaagcagctatcacagaatttcctcctggacttgaggctgacagataagattgtaaggaaagctggcaatctgacaaatgcttatgtttacgaagtgggccctgggccagggggaatcacaagatctattcttaatgccgacgtcgctgaacttctggtggttgaaaaggacactcgatttattcctggattacagatgctttctgatgcagcacctgggaaactgagaattgttcatggagatgtcttgacatttaaggtagaaaaggctttttcagaaagtcttaaaagaccctgggaagatgatcctccaaatgtacatattattggaaatctgccttttagtgtttcaactccactgattatcaagtggcttgaaaatatttcctgtagagatggaccttttgtttatggcagaactcagatgactttgacttttcaaaaggaagtggcagagagacttgcagccaatacaggaagcaaacagcgtagtcgcctctctgttatggctcagtacctctgcaatgttcgacacatctttacgattccaggacaagcttttgtccccaaaccagaggtggacgtgggcgtggtgcacttcactcccttgatacagcccaagatagagcagccattcaagctggtggaaaaagtggttcagaatgtatttcagttccgaaggaaatactgccatcgagggctcagaatgttattccctgaagcgcagcgcttggaaagcacgggcaggctgttagagttggcagacatagaccctactcttcggccccgccagctctccatctcacactttaagagcctctgtgatgtatacagaaaaatgtgtgatgaagacccacaactctttgcatataatttcagagaagaactcaagcgaagaaaaagcaaaaatgaagaaaaagaagaggatgacgcagagaattacagactctagctgctgcctgggggcgagcagcctaccagatgtcgatttgcactacgtggagcttcttatataggtactcttttgtctttacagaatgacgatacaaatgccaatgaccagatgtgacttattttccttttactatacagcttggcagagaaaataaatatcatcaaataagatacagtaaaaa

SEQ ID NO: 188911 - DNA, 1041 bp, Artificial Sequence
  derived and/or modified sequence
atggccgccagcggcaagctgagcacctgcagactgccccccctgcccaccatcagagagatcatcaagctgctgagactgcaggccgccaagcagctgagccagaacttcctgctggacctgagactgaccgacaagatcgtgagaaaggccggcaacctgaccaacgcctacgtgtacgaggtgggccccggccccggcggcatcaccagaagcatcctgaacgccgacgtggccgagctgctggtggtggagaaggacaccagattcatccccggcctgcagatgctgagcgacgccgcccccggcaagctgagaatcgtgcacggcgacgtgctgaccttcaaggtggagaaggccttcagcgagagcctgaagagaccctgggaggacgacccccccaacgtgcacatcatcggcaacctgcccttcagcgtgagcacccccctgatcatcaagtggctggagaacatcagctgcagagacggccccttcgtgtacggcagaacccagatgaccctgaccttccagaaggaggtggccgagagactggccgccaacaccggcagcaagcagagaagcagactgagcgtgatggcccagtacctgtgcaacgtgagacacatcttcaccatccccggccaggccttcgtgcccaagcccgaggtggacgtgggcgtggtgcacttcacccccctgatccagcccaagatcgagcagcccttcaagctggtggagaaggtggtgcagaacgtgttccagttcagaagaaagtactgccacagaggcctgagaatgctgttccccgaggcccagagactggagagcaccggcagactgctggagctggccgacatcgaccccaccctgagacccagacagctgagcatcagccacttcaagagcctgtgcgacgtgtacagaaagatgtgcgacgaggacccccagctgttcgcctacaacttcagagaggagctgaagagaagaaagagcaagaacgaggagaaggaggaggacgacgccgagaactacagactgtag

SEQ ID NO: 188912 - DNA, 1041 bp, Artificial Sequence
  derived and/or modified sequence
atggccgcgtctgggaaactaagcacatgccggctgcctcccttacccacaatcagagaaataatcaagctgctccggttgcaggcggccaaacagctgagccagaattttctcctggatcttagactgacagataagatcgtacgcaaagccggcaatctgacaaatgcctacgtatacgaagtggggcccggacccggcggtattacaaggtctatccttaacgccgatgtagccgagttgcttgtggttgaaaaagatacacggttcatccctggcctccaaatgctgagcgacgccgctccaggtaaactccgaatcgtgcacggtgacgttctcacattcaaagtggaaaaagcgttctccgagagccttaaacgaccctgggaagacgacccgcccaacgtgcatatcattggaaacttgccattttccgtgtccaccccactgattatcaagtggcttgagaatatttcttgcagagacggcccttttgtttatggacggactcagatgacgttaacttttcaaaaagaggtggcagagcggttggcagcaaacactgggagtaagcaaagaagtaggctgtcggtaatggctcagtacctttgtaacgtcagacacatattcaccataccaggacaagcgttcgttcccaagcccgaggtggatgtaggcgtcgtacactttacacccttaatccagccaaagatagagcagccttttaaactggtagagaaagtagtgcagaatgtgttccagtttcgtcgaaagtactgccatcgaggcttgcgtatgctttttccggaggctcagagactggagtcgactgggaggcttctggagctagccgatatagacccgacactgaggccacggcagctgagtatttcccacttcaagagtctgtgcgacgtctaccgaaaaatgtgtgatgaagatccccagctgtttgcatataacttccgcgaggagctaaagcgtcggaaatctaagaacgaggaaaaggaagaggatgacgcagagaattacaggctctag

SEQ ID NO: 188913 - DNA, 1041 bp, Artificial Sequence
  derived and/or modified sequence
atggccgccagcggcaagctgagcacctgccgcctgccccccctgcccaccatccgggagatcatcaagctgctgcggctgcaggccgccaagcagctgagccagaacttcctgctggacctgcggctgacagacaagatcgtgaggaaggccggcaacctgaccaatgcctacgtgtatgaggtgggccctggccctgggggcatcaccaggagcatcctgaatgctgatgtggccgagctgctggtggtggagaaggacacccgcttcatccctggcctgcagatgctgagtgatgctgcccctgggaagctgagaattgtgcatggagatgtgctgaccttcaaggtggagaaggccttcagcgagagcctgaagaggccctgggaggatgatcctccaaatgtgcacatcatcggcaacctgcccttctctgtgtccacccccctcatcatcaagtggctggagaacatcagctgcagagatggcccctttgtgtatggccgcacccagatgaccctgaccttccagaaggaggtggccgagcggctggccgccaacacaggcagcaagcagaggagccggctgtctgtgatggcccagtacctgtgcaatgtgcgccacatcttcaccatccctggccaggcctttgtgcccaagccagaggtggatgtgggcgtggtgcacttcacccccctcatccagcccaagattgagcagcccttcaagctggtggagaaggtggtgcagaatgtgttccagttccggaggaagtactgccaccggggcctgaggatgctgtttcctgaggcccagaggctggagagcacaggccgcctgctggagctggccgacatcgaccccaccctgcggccccggcagctgagcatcagccacttcaagagcctgtgtgatgtgtacaggaagatgtgtgatgaggacccccagctgtttgcctacaacttccgggaggagctgaagaggaggaagagcaagaatgaggagaaggaggaggatgatgctgagaactaccgcctgtag

SEQ ID NO: 188914 - DNA, 1041 bp, Artificial Sequence
  derived and/or modified sequence
atggccgccagcggcaagctgagcacctgccggctgccccccctgcccaccataagggaaattatcaagctcctgaggctgcaagcagccaaacagctaagccaaaacttccttctcgacttgaggctgaccgacaagatcgtgaggaaggcaggaaacctaaccaatgcatacgtatatgaagtgggccccgggcccggaggtataacacgatccatcttgaatgcagatgtggccgaacttcttgtggtggaaaaggatacccgtttcatccctgggctacaaatgctcagcgacgccgcccccgggaagctgaggattgtgcatggtgatgtactgaccttcaaagtagagaaagcctttagtgaatcgctcaagcgaccttgggaggacgatccaccaaatgtccatataataggcaacctgcctttttccgtctctacacccctcatcatcaaatggctggagaatatttcctgtagagatgggccgtttgtttacggccgaactcagatgaccctgactttccagaaggaggtagcagaaagattagcggccaacacagggagtaagcagagatcacggcttagtgtcatggctcagtacttgtgcaatgtaaggcacatctttacaatccctgggcaggcttttgtgcccaaacccgaagttgatgtgggcgttgtccactttacaccattaattcagccaaagatcgaacagcccttcaagctggtggaaaaggttgtgcaaaacgtgttccaatttcgaagaaaatattgccatagaggcttgaggatgctgtttcctgaggcacaacgcttagaatccactgggcggcttctggagctggctgatattgatcccactctgcgcccaagacagctcagcatatcacatttcaagtctctttgtgacgtgtataggaagatgtgcgatgaagatccacaactgttcgcttacaatttccgggaagagttgaaaaggaggaagtcaaagaatgaagagaaggaggaggatgatgccgagaattatagattgtag

SEQ ID NO: 188915 - DNA, 1041 bp, Artificial Sequence
  derived and/or modified sequence
atggcggcatctggcaagctgtccacatgtcgcttgccgcctctgcccaccatcagggagatcattaagttgttgcgcctgcaagccgcaaaacagttatcccagaactttctactcgacttgcggctgaccgacaagatcgtcagaaaggcaggtaatcttacaaatgcttatgtctacgaggtgggtcctgggccaggaggaatcacgcgctcaatcttgaatgccgatgtagccgagttgctggtggtggagaaagacactaggtttattcctggacttcagatgctgtctgacgccgcaccaggcaagttgcgcattgttcacggagatgttttgacctttaaggtggagaaggccttcagcgagagcctaaagcgcccttgggaggacgaccccccaaatgttcacattattggtaatctccctttcagtgtgtctacacccttgattatcaagtggctggaaaacatcagttgtagggatgggcctttcgtttatgggagaacccagatgacactgaccttccaaaaggaagtggcagaaagattggcggctaataccggtagtaagcagcggtcacgactgtctgttatggctcaatacctgtgtaacgttcgtcatattttcactatccccggtcaggcttttgtgcctaaacccgaagtcgacgtcggtgtagtgcatttcacccccctgatccagccaaagatcgaacaacccttcaaactggtggaaaaggtggttcagaacgtgtttcagttccgaagaaagtattgtcatcgcggactccgcatgctcttccctgaggcccagcgccttgagtcaactgggagattacttgagcttgctgatattgatcccactctgcggcctcgacagctatctatctcacattttaaaagtctttgtgacgtctatagaaaaatgtgtgacgaggacccacagctgttcgcatacaactttcgcgaggagcttaaacgccgaaaatctaaaaatgaagagaaagaggaagacgacgccgaaaactatcggctatag

SEQ ID NO: 188916 - DNA, 1424 bp, Artificial Sequence
  derived and/or modified sequence
ggagcggcggtgaaggtcctgggtgaggtagggttggatggtgcttgccgcgtatcatggctgcctccggaaaactcagcacttgccgtctccctccgttgcccacgattcgagaaatcattaagttgttaagactgcaagcagcgaagcagctatcacagaatttcctcctggacttgaggctgacagataagattgtaaggaaagctggcaatctgacaaatgcttatgtttacgaagtgggccctgggccagggggaatcacaagatctattcttaatgccgacgtcgctgaacttctggtggttgaaaaggacactcgatttattcctggattacagatgctttctgatgcagcacctgggaaactgagaattgttcatggagatgtcttgacatttaaggtagaaaaggctttttcagaaagtcttaaaagaccctgggaagatgatcctccaaatgtacatattattggaaatctgccttttagtgtttcaactccactgattatcaagtggcttgaaaatatttcctgtagagatggaccttttgtttatggcagaactcagatgactttgacttttcaaaaggaagtggcagagagacttgcagccaatacaggaagcaaacagcgtagtcgcctctctgttatggctcagtacctctgcaatgttcgacacatctttacgattccaggacaagcttttgtccccaaaccagaggtggacgtgggcgtggtgcacttcactcccttgatacagcccaagatagagcagccattcaagctggtggaaaaagtggttcagaatgtatttcagttccgaaggaaatactgccatcgagggctcagaatgttattccctgaagcgcagcgcttggaaagcacgggcaggctgttagagttggcagacatagaccctactcttcggccccgccagctctccatctcacactttaagagcctctgtgatgtatacagaaaaatgtgtgatgaagacccacaactctttgcatataatttcagagaagaactcaagcgaagaaaaagcaaaaatgaagaaaaagaagaggatgacgcagagaattacagactctagctgctgcctgggggcgagcagcctaccagatgtcgatttgcactacgtggagcttcttatataggtactcttttgtctttacagaatgacgatacaaatgccaatgaccagatgtgacttattttccttttactatacagcttggcagagaaaataaatatcatcaaataagatacagtacaagctttcttttaatatatactgtatagatagttatgacatgtttagtataaacagcatctattacaatctatcttacaaaaatgaagtatctgcacattttgcccctaaaccacattaaaataacttaaatatgctttaaataaa

SEQ ID NO: 188917 - protein, 318 aa, Artificial Sequence
  derived and/or modified sequence
METRYNLKSPAVKRLMKEAAELKDPTDHYHAQPLEDNLFEWHFTVRGPPDSDFDGGVYHGRIVLPPEYPMKPPSIILLTANGRFEVGKKICLSISGHHPETWQPSWSIRTALLAIIGFMPTKGEGAIGSLDYTPEERRALAKKSQDFCCEGCGSAMKDVLLPLKSGSDSSQADQEAKELARQISFKAEVNSSGKTISESDLNHSFSLTDLQDDIPTTFQGATASTSYGLQNSSAASFHQPTQPVAKNTSMSPRQRRAQQQSQRRLSTSPDVIQGHQPRDNHTDHGGSAVLIVILTLALAALIFRRIYLANEYIFDFEL

SEQ ID NO: 188918 - protein, 303 aa, Artificial Sequence [sequence omitted]

SEQ ID NO: 188919 - DNA, 957 bp, Artificial Sequence
  derived and/or modified sequence
atggagaccagatacaacctgaagagccccgccgtgaagagactgatgaaggaggccgccgagctgaaggaccccaccgaccactaccacgcccagcccctggaggacaacctgttcgagtggcacttcaccgtgagaggcccccccgacagcgacttcgacggcggcgtgtaccacggcagaatcgtgctgccccccgagtaccccatgaagccccccagcatcatcctgctgaccgccaacggcagattcgaggtgggcaagaagatctgcctgagcatcagcggccaccaccccgagacctggcagcccagctggagcatcagaaccgccctgctggccatcatcggcttcatgcccaccaagggcgagggcgccatcggcagcctggactacacccccgaggagagaagagccctggccaagaagagccaggacttctgctgcgagggctgcggcagcgccatgaaggacgtgctgctgcccctgaagagcggcagcgacagcagccaggccgaccaggaggccaaggagctggccagacagatcagcttcaaggccgaggtgaacagcagcggcaagaccatcagcgagagcgacctgaaccacagcttcagcctgaccgacctgcaggacgacatccccaccaccttccagggcgccaccgccagcaccagctacggcctgcagaacagcagcgccgccagcttccaccagcccacccagcccgtggccaagaacaccagcatgagccccagacagagaagagcccagcagcagagccagagaagactgagcaccagccccgacgtgatccagggccaccagcccagagacaaccacaccgaccacggcggcagcgccgtgctgatcgtgatcctgaccctggccctggccgccctgatcttcagaagaatctacctggccaacgagtacatcttcgacttcgagctgtag

SEQ ID NO: 188920 - DNA, 912 bp, Artificial Sequence
  derived and/or modified sequence
atgaaggaggccgccgagctgaaggaccccaccgaccactaccacgcccagcccctggaggacaacctgttcgagtggcacttcaccgtgagaggcccccccgacagcgacttcgacggcggcgtgtaccacggcagaatcgtgctgccccccgagtaccccatgaagccccccagcatcatcctgctgaccgccaacggcagattcgaggtgggcaagaagatctgcctgagcatcagcggccaccaccccgagacctggcagcccagctggagcatcagaaccgccctgctggccatcatcggcttcatgcccaccaagggcgagggcgccatcggcagcctggactacacccccgaggagagaagagccctggccaagaagagccaggacttctgctgcgagggctgcggcagcgccatgaaggacgtgctgctgcccctgaagagcggcagcgacagcagccaggccgaccaggaggccaaggagctggccagacagatcagcttcaaggccgaggtgaacagcagcggcaagaccatcagcgagagcgacctgaaccacagcttcagcctgaccgacctgcaggacgacatccccaccaccttccagggcgccaccgccagcaccagctacggcctgcagaacagcagcgccgccagcttccaccagcccacccagcccgtggccaagaacaccagcatgagccccagacagagaagagcccagcagcagagccagagaagactgagcaccagccccgacgtgatccagggccaccagcccagagacaaccacaccgaccacggcggcagcgccgtgctgatcgtgatcctgaccctggccctggccgccctgatcttcagaagaatctacctggccaacgagtacatcttcgacttcgagctgtag

SEQ ID NO: 188921 - DNA, 957 bp, Artificial Sequence
  derived and/or modified sequence
atggagactcggtataacctgaagtcccctgcagtgaagagactgatgaaggaagctgctgagttgaaggatcccacagatcattaccacgcacagccgttggaggataacctgttcgagtggcatttcaccgtgcgcggaccacccgattctgactttgatggaggggtgtatcatggcaggatcgtgcttcctcctgaatatcccatgaagcctccgtcgatcattctactcactgctaatggccgtttcgaagttggcaaaaaaatctgccttagtatcagcggtcaccacccggaaacatggcaaccttcatggtcaatccgcacagctttactggctatcatcggctttatgccaaccaagggcgaaggtgctattggttcactggattacacccctgaagaacggcgggccctcgccaaaaaatcccaagacttttgttgtgaagggtgcgggtcagccatgaaggacgttttgttgcccctgaaatccggtagcgatagcagtcaggcggatcaggaagccaaagaactggcgaggcagatttctttcaaagccgaggtaaacagctccggcaagacgatttctgaaagtgacctgaaccattcattcagcctgaccgacttgcaagacgacattcccacaaccttccaaggcgccacagcttctacctcttatgggctacaaaactcctcagccgcttcctttcaccagccaactcagcccgttgctaagaatacatccatgtccccaaggcagagacgtgctcagcagcagtcccagaggaggctatccacttctccagacgtcattcaggggcaccaaccaagagataatcacacggaccatggggggtccgctgttctgattgtgattttgaccctcgccttagcagcacttattttcagaagaatttacctggctaatgaatatattttcgactttgagctgtag

SEQ ID NO: 188922 - DNA, 912 bp, Artificial Sequence
  derived and/or modified sequence
atgaaggaagctgcagagttgaaggaccctacagaccattatcacgcccagccacttgaagacaacttgtttgagtggcacttcaccgtccggggacctccagactcggattttgacggcggagtctatcacgggagaattgtcctgccaccagaataccctatgaaaccaccttcaatcatccttctgacggccaatggtcgtttcgaagttgggaaaaagatttgcctcagcattagcggacaccacccggaaacttggcaaccaagttggtccattcggacagctttactcgccattataggcttcatgccaacaaagggggagggcgccattggcagtctggactatacacctgaagaaagacgcgctctagcaaaaaagagccaagacttttgctgtgaggggtgcggctcagctatgaaggacgtcctgctcccattgaagagcgggtccgattcatcccaggctgaccaggaggccaaagagctggctcgacagattagcttcaaggccgaggtgaacagctccggtaagactatctccgaatctgatctgaaccattcattctcattgactgaccttcaagatgatattcctaccaccttccagggagcaactgccagtacatcttatggccttcagaactccagtgccgccagtttccatcagccgacacagccagttgcaaagaatacctcgatgagtcctaggcagagacgtgcccagcagcaatcacagaggcgcctaagcacttcacccgacgtgattcagggacaccagccccgggacaatcacacagatcatggcgggtcagcagttctcatagtgatcctgactctggccctggctgcccttatcttccgtcgtatatatctagctaacgaatatattttcgacttcgagttatag

SEQ ID NO: 188923 - DNA, 957 bp, Artificial Sequence
  derived and/or modified sequence
atggagacccgctacaacctgaagagccctgctgtgaagaggctgatgaaggaggccgctgagctgaaggaccccacagaccactaccacgcccagcccctggaggacaacctgtttgagtggcacttcaccgtgcggggccccccagacagcgactttgatggcggcgtgtaccacggccgcatcgtgctgcccccagagtaccccatgaagccacccagcatcatcctgctgacagccaacggccgctttgaggtgggcaagaagatctgcctgagcatcagcggccaccaccctgagacctggcagcccagctggagcatcagaacagccctgctggccatcatcggcttcatgcccaccaagggggagggcgccatcggcagcctggactacaccccagaggagcggcgggccctggccaagaagagccaggacttctgctgtgagggctgcggcagcgccatgaaggatgtgctgctgcccctgaagagcggcagtgacagcagccaggccgaccaggaggccaaggagctggcccggcagatctccttcaaggccgaggtgaacagcagcggcaagaccatcagcgagagtgacctgaaccacagcttcagcctgacagacctgcaggatgacatccccaccaccttccagggcgccacagccagcaccagctatggcctgcagaacagcagcgctgccagcttccaccagcccacccagcctgtggccaagaacacctccatgagcccccggcagaggcgggcccagcagcagagccagaggcggctgagcaccagcccagatgtgatccagggccaccagccccgggacaaccacacagaccacggcggcagcgctgtgctgattgtcatcctgaccctggccctggccgccctgatcttccgccgcatctacctggccaatgagtacatctttgattttgagctgtag

SEQ ID NO: 188924 - DNA, 912 bp, Artificial Sequence
  derived and/or modified sequence
atgaaggaggccgctgagctgaaggaccccacagaccactaccacgcccagcccctggaggacaacctgtttgagtggcacttcaccgtgcggggccccccagacagcgactttgatggaggagtgtaccacggcagaattgtgctgcccccagagtaccccatgaagcccccatccatcatcctgctgacagccaacggccgctttgaggtgggcaagaagatctgcctgagcatcagcggccaccaccctgagacctggcagcccagctggagcatcagaacagccctgctggccatcatcggcttcatgcccaccaagggggagggcgccatcggcagcctggactacaccccagaggagcggcgggccctggccaagaagagccaggacttctgctgtgagggctgcggcagcgccatgaaggatgtgctgctgcccctgaagagcggcagtgacagcagccaggccgaccaggaggccaaggagctggcccggcagatctccttcaaggccgaggtgaacagcagcggcaagaccatcagcgagagtgacctgaaccacagcttcagcctgacagacctgcaggatgacatccccaccaccttccagggcgccacagccagcaccagctatggcctgcagaacagcagcgctgccagcttccaccagcccacccagcctgtggccaagaacacctccatgagcccccggcagaggcgggcccagcagcagagccagaggcggctgagcaccagcccagatgtgatccagggccaccagccccgggacaaccacacagaccatggaggcagcgctgtgctgattgtcatcctgaccctggccctggccgccctgatcttccgccgcatctacctggccaatgagtacatctttgattttgagctgtag

SEQ ID NO: 188925 - DNA, 957 bp, Artificial Sequence
  derived and/or modified sequence
atggagacccggtacaacctgaagagccccgccgtgaagcggctgatgaaagaagcagccgagctgaaggatccaactgaccactaccacgcgcagcccctggaggacaatctgttcgagtggcactttactgtgcgtgggccccccgattctgacttcgatggcggagtctatcatgggagaatcgtcttgccgcccgagtacccgatgaaaccaccgagtattattttgcttaccgccaacggtcggtttgaggtcgggaagaagatttgcctttccatttcaggacaccacccggagacctggcaaccctcctggtccatcaggaccgcactgctggctatcattggttttatgcctacaaagggcgagggcgcaatcggctcactcgactacacgcccgaggagaggagggcactagctaagaagagtcaggatttttgttgtgaagggtgtggctccgctatgaaagacgtgcttctgcctctaaagtcaggatctgattcatcacaggctgaccaagaggccaaggagctagctcgacaaatctcatttaaagccgaggtgaattcaagcgggaaaaccatctcagaaagcgatctgaatcacagtttctctctcaccgaccttcaggatgacattcctaccaccttccaaggcgccacggcatccacaagttacggattgcagaactcctcggccgcctcattccaccagcctacacagcctgttgcaaaaaatacttcaatgtccccacgtcagagacgcgcacagcagcagagtcagcgtaggttgagtaccagcccagatgtgatccagggtcaccagcctagagataaccacacggaccacggaggttccgctgtactgattgtcatcttaaccttggccttggctgcactgatcttccgacggatttatttggccaatgaatatattttcgacttcgagttgtag

SEQ ID NO: 188926 - DNA, 912 bp, Artificial Sequence
  derived and/or modified sequence
atgaaggaggccgccgagctgaaggaccccaccgaccactaccacgcccagcccctggaggataatctcttcgagtggcacttcacagttaggggacctccggactcagactttgacggcggggtctatcacggtcgcattgtgctacccccagagtacccaatgaaaccaccatccattatactgctcacagctaacggacgtttcgaagttgggaaaaaaatatgcctgtctatctcaggacaccaccccgagacctggcaacctagctggtcaatcagaaccgccctgctggctataattggctttatgcctactaaaggtgaaggggcaatcggcagcctggattacacccccgaggagaggcgcgcgcttgctaagaagtcccaggatttctgttgtgagggttgcggttcagccatgaaggacgtgctactgcccctgaagtcaggctctgacagctctcaggccgatcaggaggctaaggaactggctcgacagatcagcttcaaggcagaggtgaacagttccggtaaaactatctctgaaagcgatttgaatcattctttctccttaaccgacctccaggacgacattcctactacttttcaaggtgctacagcaagcactagctatggactgcaaaacagctcggcggcttctttccaccaaccgactcagcccgttgctaagaatacctcaatgagcccgaggcagcgccgagcccaacagcagagccaacggcggctgtccacttcaccagacgttattcagggacatcagccaagagataaccataccgatcatggcgggagtgcagtgcttatcgtgattctgactcttgcgttggctgccctcatctttaggcgaatttacctagctaatgagtacatatttgacttcgagctctag

SEQ ID NO: 188927 - DNA, 957 bp, Artificial Sequence
  derived and/or modified sequence
atggaaaccagatacaatctgaagagccctgcagttaaacggctgatgaaggaagccgctgagctgaaggatccgacagatcactatcatgcacaacctttagaggacaatctattcgagtggcactttacggtccgcggaccgcctgattccgactttgatggtggcgtctatcacggccgaatcgtgttacccccagaatatcctatgaaacccccaagtattatattgttgacagcaaatggccgatttgaggtcggcaagaagatttgtctgtcaatcagcggccatcatcccgagacatggcagcctagctggtctataagaaccgcactgcttgctataattggcttcatgccgaccaagggtgaaggcgcaatcggtagcctggactacacaccagaagaaaggcgggctctggctaagaagagtcaggacttctgctgcgagggctgtgggagtgcaatgaaagacgtactgttgcctctcaaatctggaagcgactcttcccaagcagaccaagaggccaaggaactggcgaggcagatctctttcaaggcagaggtgaacagctcaggcaagactattagtgagtcagatttgaatcatagttttagtctgacggacctacaggatgacattcccacgactttccagggcgcaacagcaagcacctcatatggcctgcagaattcatccgctgcatcctttcaccagcccacgcagcccgtcgctaaaaacacaagcatgagtccccgtcaacggagagcacagcagcagtcacagaggaggctaagtacttctccagacgtgattcagggtcaccagccccgagacaatcacaccgatcatgggggttcagcagtgctgattgtgatcttgacacttgccctcgctgcactgatatttaggcgcatctatctcgctaatgaatatattttcgacttcgagttatag

SEQ ID NO: 188928 - DNA, 912 bp, Artificial Sequence
  derived and/or modified sequence
atgaaagaagccgctgagcttaaggatcctactgaccattaccatgcccagcctttggaggacaatctgtttgagtggcactttacggtgaggggaccgccagactctgatttcgacggtggagtttaccacgggaggatcgtattgccccctgaatacccaatgaagcccccttccataatcttgttaactgccaatggcagatttgaagtagggaagaagatctgtttgtctataagcgggcaccacccggaaacatggcagccgagttggtccatccgcaccgccctcctagcgattatcggttttatgcccacgaagggcgaaggtgctattggctccttggattacacccctgaggagcggagagccctcgcgaagaagagccaagatttctgctgcgagggctgtgggtctgctatgaaggatgtgcttcttccgctgaagagcgggtcagatagctctcaggccgaccaggaagccaaagaactcgcccgtcagataagcttcaaggccgaggttaacagcagcgggaagacaatctctgaaagtgatttgaaccattcgttttcattaacggacttacaagatgacatcccaacaactttccagggtgccaccgccagcacctcctacggcttacaaaattcttcagccgcaagcttccatcagccaacccagcccgtcgcaaagaacacctctatgagccctaggcagaggcgcgctcaacagcagtctcagagacgcctctctacctcacctgatgtgatacagggacatcaacctcgcgataaccataccgatcacggcggttctgcagtgttgatagtgattctcactctggcccttgcagctctgatcttcaggagaatatacctagctaacgaatatatcttcgacttcgagctgtag

SEQ ID NO: 188929 - DNA, 4290 bp, Artificial Sequence
  derived and/or modified sequence
ccgggcgcccggttcagcgccgccccggccggcgccggtgcctgccaggcactcagggaggcgggggcgcagtggaggaggcggcgccatcgcgaagcgagcgcctcgcccgcactcagccttgccaccccgcccgcagtccaggctggactgggcggcatttgccgaggctcctcggccaggccccgtccgcccgagccgcgctgagacccgggcagcggccgcgtggagaggaggtggcagcggcccgggaggccggagccaagccagcgacccaccatggagacccgctacaacctgaagagtccggctgttaaacgtttaatgaaagaagcggcagaattgaaagatccaacagatcattaccatgcgcagcctttagaggataacctttttgaatggcacttcacggttagagggcccccagactccgattttgatggaggagtttatcacgggcggatagtactgccaccagagtatcccatgaaaccaccaagcattattctcctaacggctaatggtcgatttgaagtgggcaagaaaatctgtttgagcatctcaggccatcatcctgaaacttggcagccttcgtggagtataaggacagcattattagccatcattgggtttatgccaacaaaaggagagggagccataggttctctagattacactcctgaggaaagaagagcacttgccaaaaaatcacaagatttctgttgtgaaggatgtggctctgccatgaaggatgtcctgttgcctttaaaatctggaagcgattcaagccaagctgaccaagaagccaaagaactggctaggcaaataagctttaaggcagaagtcaattcatctggaaagactatctctgagtcagacttaaaccactctttttcactaactgatttacaagatgatatacctacaacattccagggtgctacggccagtacatcgtacggactccagaattcctcagcagcatcctttcatcaacctacccaacctgtagctaagaatacctccatgagccctcgacagcgccgggcccagcagcagagtcagagaaggttgtctacttcaccagatgtaatccagggccaccagccaagagacaaccacactgatcatggtgggtcagctgtactgattgtcatcctgactttggcattggcagctcttatattccgacgaatatatctggcaaacgaatacatatttgactttgagttataatatggttttgtgacttatgagctgtgactcaactgcttcattaaacattctgcattgggtataatctaagaattgtttacaaaaagattattttgtatttacccttcattcctttttttgatccttgtaagtttagtataaatatatctagacattcagactgtgtctagcagttacgtcctgcttaaagggactagaagtcaaagttccttgtctcactatttgatctgctttgcagggaaataacttgttttttctcatgtttcatcttctttttatgtaaatttgtaatactttcctatattgccctttgaaatttttggataaaagatgatgttttaagttccaatgagtattactagttactcaataccacttattgagtactctgtttctacgtatgtagaatgtatagggatagaagagttgaaaagggaaagcaaaactcctcaagtagcttccttaaaatgtcattcataggagatgtactggaattgctcattctgtgactttatttgtgtcctaaacattcttcagtgaaaataattttatttcagtcaaacatttatgaggaaatgagatcacatctttgtcactggatgctacttgaagagggagtactttgtaaccactttgatatgctgttatcaccaccccctgccctctgctgccataatcacacaaatttaaaaagaaagaaaacagtcttccatagatttttaaggaagaaagggcccaagccaggagatcgcttggttttcttccagaagttaaatggggggatctgaagatttgaatgtttggtctgctttgaaatgtatgtcttttgggatgtattatatgcctagctttataatcagtataaattttaattattccaggaatatgcataatattgaaatatttcatgtcctattttaatagaaaacctcagggcccaagtaacagtgatagaagttagaaaaacctttacttagaattgtccacctagtcagagcccaagaaagaattttcagtggaaaaatcaatatataacttagtgctagctagcgccacagactctagtagataatattatcatcataatggctggtgaaaccatataatcacagaaaaacattgccttcagcatgttcagttcgcagcactgagggcactcttgagggtgttgttaatgaagatttaatttttaaatacaggtggttccaagctttcaaataggttatgctccaaaagtgttatttgtaagttaatttttttacaagtcaaacaatgttggaagtggtatttaggttctagatcggtccacgaaagttagcccatatgtatatcttgaatagtataggggagggtattcataaagtccttatgtggttttaactaagtgaaattatggacaagagaaataattgtaaaatcgtcttaaaggaaaatttaatttttactcctgtttatgggacattcgttctattaactgtcagacacaatttctgttttcatctgagagccagttttcctttatttctacatctaaaataagaacatattgtacactattatataatacagaattgtcttaaactttaataaattcgcattttaaaggtgtttacagattattttttatatctgtagctgaatttgttaaagtctaaaaagctcaaggactttatgaagatctcattatatgaggaaaatcataggttaccattttataactctattgccataagaaaatacactctaaaatcttgatttgaaacatattagaaaccttgattcagtgctcagtggtctcctagtaagaagtcaccgacggtagcgtcatatgagaagaaagaaatccccaccacctcaacctctgctgagattgtgtgctaggaacagccttccctccgtttcccctcagtcaaacttgagccagcctctggatcgatgtgatcttattgcatgtttccatggggtgtacctatactttaagccaatcctgctgcattcactgctaagttaaataaaaagccaagaagattttgcactgtgcagatcctttgctatctgacttgcatctcttcccccacctgtcagctagccacctgcttgtttgtgttgggatattttttagcacctgaagcaccatctgaaaggggcaccattttcttcttccctttgatctcacatatgctccctaaaaatccttaagttgtcaatctgatccccagtgtgaggttaatgagcaaaattggtctttggggccctttttgtccaagccccactgaaaggcctcttcagaaaactattatctttaaagccctactttaactccttaattccagcatacagctaaaactggatgtatattctggcaagtaaaggctgaggactcctctttaatcctcagatctagataactcatgacattttatttgaccaacatagcacatgatgagatatcaaggtaattaaaatagcatgcttgaaaaaaaaatacgtaatctgtttcacctgtaactgtttaagccaataaacttttcaaaatttatgtaatgtggggcttttatgtagcactttacgttttcatgctgcttattgttttattctactgaaaaaaatgaatttcaagattctcaacttttttaatttcaaaaattgtttattgttttgactataggaatacaaaatttcctattttgggagaataagaactctttttgtcatttttggctatgaataaactttctggtcttttgagaccacccatttttatagatcagaatcagaaaacaggtaaacctcactcacacatttggactcatttgaacaaaaatctaggccaaaatactgaaaagcctatgtgtttttttaattggaagtatatgtaaggttaatgcatttagtgaacgtgactaacaaagactaatgtgcacattaacagatgtactttttaaggttttatgggaggctgtgcattgctcaaaagctgttgggaacgccttctgaacagttgccttcagaactagtttgagctgctcaataaaaccagtgactttactcata

SEQ ID NO: 188930 - DNA, 1037 bp, Artificial Sequence
  derived and/or modified sequence
accccgcccgcagtccaggctggactgggcggcatttgccgaggctcctcggccaggccccgtccgcccgagccgcgctgagacccgctacaacctgaagagtccggctgttaaacgtttaatgaaagaagcggcagaattgaaagatccaacagatcattaccatgcgcagcctttagaggataacctttttgaatggcacttcacggttagagggcccccagactccgattttgatggaggagtttatcacgggcggatagtactgccaccagagtatcccatgaaaccaccaagcattattctcctaacggctaatggtcgatttgaagtgggcaagaaaatctgtttgagcatctcaggccatcatcctgaaacttggcagccttcgtggagtataaggacagcattattagccatcattgggtttatgccaacaaaaggagagggagccataggttctctagattacactcctgaggaaagaagagcacttgccaaaaaatcacaagatttctgttgtgaaggatgtggctctgccatgaaggatgtcctgttgcctttaaaatctggaagcgattcaagccaagctgaccaagaagccaaagaactggctaggcaaataagctttaaggcagaagtcaattcatctggaaagactatctctgagtcagacttaaaccactctttttcactaactgatttacaagatgatatacctacaacattccagggtgctacggccagtacatcgtacggactccagaattcctcagcagcatcctttcatcaacctacccaacctgtagctaagaatacctccatgagccctcgacagcgccgggcccagcagcagagtcagagaaggttgtctacttcaccagatgtaatccagggccaccagccaagagacaaccacactgatcatggtgggtcagctgtactgattgtcatcctgactttggcattggcagctcttatattccgacgaatatatctggcaaacgaatacatatttgactttgagttataatatg

SEQ ID NO: 188931 - protein, 322 aa, Artificial Sequence
  derived and/or modified sequence
MNPLTKVKLINELNEREVQLGVADKVSWHSEYKDSAWIFLGGLPYELTEGDIICVFSQYGEIVNINLVRDKKTGKSKGFCFLCYEDQRSTILAVDNFNGIKIKGRTIRVDHVSNYRAPKDSEEIDDVTRQLQEKGCGARTPSPSLSESSEDEKPTKKHKKDKKEKKKKKKEKEKADREVQAEQPSSSSPRRKTVKEKDDTGPKKHSSKNSERAQKSEPREGQKLPKSRTAYSGGAEDLERELKKEKPKHEHKSSSRREAREEKTRIRDRGRSSDAHSSWYNGRSEGRSYRSRSRSRDKSHRHKRARRSRERESSNPSDRWRH

SEQ ID NO: 188932 - protein, 58 aa, Artificial Sequence
  derived and/or modified sequence
MNPLTKVKLINELNEREVQLGVADKVSWHSEYKDSAWIFLGGLPYELTEGDIICVFSQ

SEQ ID NO: 188933 - protein, 275 aa, Artificial Sequence
  derived and/or modified sequence
MNPLTKVKLINELNEREVQLGVADKVSWHSEYKDSAWIFLGGLPYELTEGDIICVFSQYGEIVNINLVRDKKTGKSKGFCFLCYEDQRSTILAVDNFNGIKIKGRTIRVDHVSNYRAPKDSEEIDDVTRQLQEKGCGARTPSPSLSESSEDEKPTKKHKKDKKEKKKKKKEKEKADREVQAEQPSSSSPRRKTVKEKDDTGPKKHSSKNSERAQKSEPREGQKLPKSRTAYSGGAEDLERELKKEKPKHEHKSSSRREAREEKTRIRDRGLRCTF

SEQ ID NO: 188934 - DNA, 1528 bp, Artificial Sequence
  derived and/or modified sequence
gcgcatgcgctgcgctgcctttcccgggcgctgattcctgagtgctgagcgcgaacccgaggagatgaaccctttaactaaggtgaagctgatcaacgagctgaatgaacgagaggtccagcttggggtggccgataaggtgtcctggcactccgagtacaaggacagcgcctggatcttcctgggagggcttccttatgaactgactgaaggggacatcatctgtgtgttctcacaatatggggagattgttaacattaatctcgtgcgggacaagaaaactgggaaatccaaaggattctgtttcctctgctatgaagaccagaggagcacaattctggccgtcgacaattttaatgggatcaagatcaaaggaagaactatccgagtggatcatgtgtctaactatcgggctcctaaggactcagaagaaatagatgatgtgaccagacaactccaggagaagggctgtggggctcgtaccccctcaccaagtttgtctgagagctctgaagatgaaaaaccaacaaaaaagcacaaaaaagacaaaaaggaaaaaaagaaaaaaaagaaagaaaaagagaaagccgaccgggaggtacaggcagagcaaccatcctcttcgtcacccagacgcaagacagtaaaggaaaaggatgacactggccctaagaagcacagcagcaagaactcagagagagctcagaagtcagagcccagggaggggcagaagctccccaaatccaggacggcctactctggtggagcagaggacctagagagggagctgaagaaggagaaacccaagcacgagcacaagtcctcaagcaggagggaggcaagagaagaaaagaccaggattagggacagagggcggagctcagatgcacattctagctggtataatgggcgttctgaagggcgtagttatagaagtagaagtaggagccgagataaatcccataggcataaaagggcccgacgctcccgggagcgggagtcttcgaatcccagtgaccgttggcgtcactgaagacttcagctgcacagtagatttggaaataattatgttttttaaatgcagtcaaattcagttgggtggttactatttttgtatctaaaacttctggggctggattcttttaatcccttgactatttagagtcattgggagggctgcagtttcaacagctagatatcctggatattgtttgcaccatccattgtccctgtaccagagtatgtatcctgaactttggttcataaatatggctcttgaacccatagaccccagttgaagatggaattttcaggaaagggaaaatactagataattctagaattctagtcttcgtgttagatgtttatagcccagcatcttgggacctttccagttactaggtttggacagcttgatgtgaacgaatgggataggatttttaaaatcagccagctccatgcccaaaccttcctgtttgcagaactttttaatgtcttttctttttcattaaaacttttttgttcgata

SEQ ID NO: 188935 - DNA, 798 bp, Artificial Sequence
  derived and/or modified sequence
cctgagtgctgagcgcgaacccgaggagatgaaccctttaactaaggtgaagctgatcaacgagctgaatgaacgagaggtccagcttggggtggccgataaggtgtcctggcactccgagtacaaggacagcgcctggatcttcctgggagggcttccttatgaactgactgaaggggacatcatctgtgtgttctcacagtaagtgtcctttcatttcctgcctcctgagtcgacagagtactttgtttctgtaatacattttgtggcatcacaaaaaccacttattttcactctaggctgaatggcatccctgcatggggagggctggagcttctgttctagatcagtcccaggacatggttctagaatgttctgtgggagatccaagaggtttgttaatttgggagggcatcttggggatcctagtctatttctgttgtttttcactgaggcttgttcagcctgggcctagactggaacagactggactccttgggctcttgcaaactaggggtaacccatggtcacagggcccttctggcccttacctgtgtggcgtcatacgattggggcaaagcacagaggaaattggggtaaaaaacagaaggtcgtagtttgctttctttgtttctcgatgagtgtaaggttagtgagcaaaggcaatctctgcctggaggctgagaatcacagcccgaagggaacaagaatgaataggagacctgtatattcttcattctgctgaggtgttagcagcagcatttcatgggagagggtgttggcagctcatactggtag

SEQ ID NO: 188936 - DNA, 1523 bp, Artificial Sequence
  derived and/or modified sequence
gcgcatgcgctgcgctgcctttcccgggcgctgattcctgagtgctgagcgcgaacccgaggagatgaaccctttaactaaggtgaagctgatcaacgagctgaatgaacgagaggtccagcttggggtggccgataaggtgtcctggcactccgagtacaaggacagcgcctggatcttcctgggagggcttccttatgaactgactgaaggggacatcatctgtgtgttctcacaatatggggagattgttaacattaatctcgtgcgggacaagaaaactgggaaatccaaaggattctgtttcctctgctatgaagaccagaggagcacaattctggccgtcgacaattttaatgggatcaagatcaaaggaagaactatccgagtggatcatgtgtctaactatcgggctcctaaggactcagaagaaatagatgatgtgaccagacaactccaggagaagggctgtggggctcgtaccccctcaccaagtttgtctgagagctctgaagatgaaaaaccaacaaaaaagcacaaaaaagacaaaaaggaaaaaaagaaaaaaaagaaagaaaaagagaaagccgaccgggaggtacaggcagagcaaccatcctcttcgtcacccagacgcaagacagtaaaggaaaaggatgacactggccctaagaagcacagcagcaagaactcagagagagctcagaagtcagagcccagggaggggcagaagctccccaaatccaggacggcctactctggtggagcagaggacctagagagggagctgaagaaggagaaacccaagcacgagcacaagtcctcaagcaggagggaggcaagagaagaaaagaccaggattagggacagagggctcagatgcacattctagctggtataatgggcgttctgaagggcgtagttatagaagtagaagtaggagccgagataaatcccataggcataaaagggcccgacgctcccgggagcgggagtcttcgaatcccagtgaccgttggcgtcactgaagacttcagctgcacagtagatttggaaataattatgttttttaaatgcagtcaaattcagttgggtggttactatttttgtatctaaaacttctggggctggattcttttaatcccttgactatttagagtcattgggagggctgcagtttcaacagctagatatcctggatattgtttgcaccatccattgtccctgtaccagagtatgtatcctgaactttggttcataaatatggctcttgaacccatagaccccagttgaagatggaattttcaggaaagggaaaatactagataattctagaattctagtcttcgtgttagatgtttatagcccagcatcttgggacctttccagttactaggtttggacagcttgatgtgaacgaatgggataggatttttaaaatcagccagctccatgcccaaaccttcctgtttgcagaactttttaatgtcttttctttttcattaaaacttttttgttcgata

SEQ ID NO: 188937 - DNA, 969 bp, Artificial Sequence
  derived and/or modified sequence
atgaaccccctgaccaaggtgaagctgatcaacgagctgaacgagagagaggtgcagctgggcgtggccgacaaggtgagctggcacagcgagtacaaggacagcgcctggatcttcctgggcggcctgccctacgagctgaccgagggcgacatcatctgcgtgttcagccagtacggcgagatcgtgaacatcaacctggtgagagacaagaagaccggcaagagcaagggcttctgcttcctgtgctacgaggaccagagaagcaccatcctggccgtggacaacttcaacggcatcaagatcaagggcagaaccatcagagtggaccacgtgagcaactacagagcccccaaggacagcgaggagatcgacgacgtgaccagacagctgcaggagaagggctgcggcgccagaacccccagccccagcctgagcgagagcagcgaggacgagaagcccaccaagaagcacaagaaggacaagaaggagaagaagaagaagaagaaggagaaggagaaggccgacagagaggtgcaggccgagcagcccagcagcagcagccccagaagaaagaccgtgaaggagaaggacgacaccggccccaagaagcacagcagcaagaacagcgagagagcccagaagagcgagcccagagagggccagaagctgcccaagagcagaaccgcctacagcggcggcgccgaggacctggagagagagctgaagaaggagaagcccaagcacgagcacaagagcagcagcagaagagaggccagagaggagaagaccagaatcagagacagaggcagaagcagcgacgcccacagcagctggtacaacggcagaagcgagggcagaagctacagaagcagaagcagaagcagagacaagagccacagacacaagagagccagaagaagcagagagagagagagcagcaaccccagcgacagatggagacactag

SEQ ID NO: 188938 - DNA, 177 bp, Artificial Sequence
  derived and/or modified sequence
atgaaccccctgaccaaggtgaagctgatcaacgagctgaacgagagagaggtgcagctgggcgtggccgacaaggtgagctggcacagcgagtacaaggacagcgcctggatcttcctgggcggcctgccctacgagctgaccgagggcgacatcatctgcgtgttcagccagtag

SEQ ID NO: 188939 - DNA, 828 bp, Artificial Sequence
  derived and/or modified sequence
atgaaccccctgaccaaggtgaagctgatcaacgagctgaacgagagagaggtgcagctgggcgtggccgacaaggtgagctggcacagcgagtacaaggacagcgcctggatcttcctgggcggcctgccctacgagctgaccgagggcgacatcatctgcgtgttcagccagtacggcgagatcgtgaacatcaacctggtgagagacaagaagaccggcaagagcaagggcttctgcttcctgtgctacgaggaccagagaagcaccatcctggccgtggacaacttcaacggcatcaagatcaagggcagaaccatcagagtggaccacgtgagcaactacagagcccccaaggacagcgaggagatcgacgacgtgaccagacagctgcaggagaagggctgcggcgccagaacccccagccccagcctgagcgagagcagcgaggacgagaagcccaccaagaagcacaagaaggacaagaaggagaagaagaagaagaagaaggagaaggagaaggccgacagagaggtgcaggccgagcagcccagcagcagcagccccagaagaaagaccgtgaaggagaaggacgacaccggccccaagaagcacagcagcaagaacagcgagagagcccagaagagcgagcccagagagggccagaagctgcccaagagcagaaccgcctacagcggcggcgccgaggacctggagagagagctgaagaaggagaagcccaagcacgagcacaagagcagcagcagaagagaggccagagaggagaagaccagaatcagagacagaggcctgagatgcaccttctag

SEQ ID NO: 188940 - DNA, 969 bp, Artificial Sequence
  derived and/or modified sequence
atgaacccactgacaaaggttaagctgatcaacgagctgaacgaacgtgaggtgcagctgggcgtagcagataaggtgtcctggcattcagagtacaaagacagtgcctggatctttctcggggggcttccatatgaactcacagagggagatatcatttgcgtgttctcccagtatggggaaattgtcaatattaatctggtgagagacaagaaaactgggaaaagcaaagggttctgcttcctctgttacgaggatcagcgctctaccatcctggctgtcgacaatttcaatggtattaagataaagggaaggactataagggttgatcatgtgtccaattaccgcgcacctaaagatagtgaagaaatcgatgacgttaccagacagcttcaggagaaaggttgcggagccaggaccccttccccgtctctctcggagtcgtccgaggatgaaaaacccaccaaaaagcacaagaaggacaaaaaggaaaagaagaagaagaagaaagagaaggagaaggccgacagggaggtgcaggccgaacagccaagttcatcctcccctcgaagaaaaacagtcaaagaaaaggacgacacaggccctaagaaacactcctcgaaaaacagcgaaagggctcagaaatcagagccccgggaagggcaaaaactgcccaagtcccgtactgcttattccggaggagctgaggacttggagcgcgaattaaagaaagaaaaacccaaacacgaacacaagagttcttccagaagagaggcccgcgaagaaaagacgaggatccgggatagaggccgcagttccgacgcacatagctcttggtataatgggagaagcgaaggaagatcttatcggtcaagaagccgaagcagagacaagagtcaccggcacaagcgtgcccggcgttcacgcgaacgtgagtcgtctaatccttcagaccgctggagacattag

SEQ ID NO: 188941 - DNA, 177 bp, Artificial Sequence
  derived and/or modified sequence
atgaatcccctcacaaaagtgaagttaatcaacgagctgaacgagcgtgaggtccagcttggggtggcagacaaggttagctggcactccgaatataaggactctgcatggatcttcctggggggtctgccctacgaactcacggagggggacatcatttgcgtgttcagccagtag

SEQ ID NO: 188942 - DNA, 828 bp, Artificial Sequence
  derived and/or modified sequence
atgaatccccttactaaggtgaagttgatcaacgagttaaatgagcgggaagtgcagcttggcgtggccgataaggtctcctggcacagcgaatataaggactccgcctggatctttctcggagggctgccctacgagctgaccgagggggacatcatttgcgttttttcgcaatacggggaaatagtgaatattaacttggtgcgcgataagaaaacagggaaatccaaaggattctgtttcctgtgctacgaggaccagcggagtactatcctggccgtggacaatttcaatggaattaaaattaagggtaggacaattagagtggaccacgtgtcaaattaccgggcccccaaggattcagaggagatcgatgatgtgactcgacagttgcaggaaaaagggtgtggagctcgaactccatctccaagtctgtcagaatcttctgaggatgaaaagcccactaagaagcacaagaaagataagaaggagaagaagaagaagaaaaaagaaaaagagaaggcagacagggaggtccaggcggagcaaccctcgtcttcctctcccagaaggaaaacagtgaaggagaaggacgataccggtccaaagaaacatagttctaaaaactctgaaagagctcaaaagtctgagcctcgggaaggccagaaacttcctaaaagtagaactgcctacagtggcggcgccgaagacctcgagagagaacttaagaaggaaaagcctaagcacgagcacaagagtagcagccgacgagaagctagggaagagaagactcggattcgcgaccgcggcctgaggtgcaccttttag

SEQ ID NO: 188943 - DNA, 969 bp, Artificial Sequence
  derived and/or modified sequence
atgaaccccctgaccaaggtgaagctgatcaatgagctgaatgaaagagaggtgcagctgggcgtggccgacaaggtgtcctggcacagcgagtacaaggacagcgcctggatcttcctgggcggcctgccctatgagctgacagaaggagacatcatctgtgtgttcagccagtatggagagatcgtgaacatcaacctggtgcgggacaagaagacaggcaagagcaagggcttctgcttcctgtgctatgaggaccagaggagcaccatcctggccgtggacaacttcaacggcatcaagatcaagggccgcaccatccgggtggaccacgtgagcaactaccgggcccccaaggacagcgaggagattgatgatgtgacccggcagctgcaggagaagggctgtggggcccggacccccagccccagcctgtctgagagcagtgaagatgagaagcccaccaagaagcacaagaaggacaagaaggagaagaagaagaagaagaaggagaaggagaaggctgaccgggaggtgcaggccgagcagcccagcagcagcagccccaggaggaagacagtgaaggagaaggatgacaccggccccaagaagcacagcagcaagaacagcgagcgggcccagaagtctgagccccgggagggccagaagctgcccaagagcaggacagcctacagcggcggcgctgaggacctggagcgggagctgaagaaggagaagcccaagcatgagcacaagagcagcagccggcgggaggcccgggaggagaagacccgcatccgggaccggggccgcagcagtgatgcccacagctcctggtacaacggccgctctgagggccgcagctaccgcagccgcagccgcagccgggacaagagccaccgccacaagagggcccggcgcagccgggagcgggagagcagcaaccccagcgaccgctggaggcactag

SEQ ID NO: 188944 - DNA, 177 bp, Artificial Sequence
  derived and/or modified sequence
atgaaccccctgaccaaggtgaagctgatcaatgagctgaatgaaagagaggtgcagctgggcgtggccgacaaggtgtcctggcacagcgagtacaaggacagcgcctggatcttcctgggcggcctgccctatgagctgacagaaggagacatcatctgtgtgttcagccagtag

SEQ ID NO: 188945 - DNA, 828 bp, Artificial Sequence
  derived and/or modified sequence
atgaaccccctgaccaaggtgaagctgatcaatgagctgaatgaaagagaggtgcagctgggcgtggccgacaaggtgtcctggcacagcgagtacaaggacagcgcctggatcttcctgggcggcctgccctatgagctgacagaaggagacatcatctgtgtgttcagccagtatggagagatcgtgaacatcaacctggtgcgggacaagaagacaggcaagagcaagggcttctgcttcctgtgctatgaggaccagaggagcaccatcctggccgtggacaacttcaacggcatcaagatcaagggccgcaccatccgggtggaccacgtgagcaactaccgggcccccaaggacagcgaggagattgatgatgtgacccggcagctgcaggagaagggctgtggggcccggacccccagccccagcctgtctgagagcagtgaagatgagaagcccaccaagaagcacaagaaggacaagaaggagaagaagaagaagaagaaggagaaggagaaggctgaccgggaggtgcaggccgagcagcccagcagcagcagccccaggaggaagacagtgaaggagaaggatgacaccggccccaagaagcacagcagcaagaacagcgagcgggcccagaagtctgagccccgggagggccagaagctgcccaagagcaggacagcctacagcggcggcgctgaggacctggagcgggagctgaagaaggagaagcccaagcatgagcacaagagcagcagccggcgggaggcccgggaggagaagacccgcatccgggaccggggcctgcgctgcaccttctag

SEQ ID NO: 188946 - DNA, 969 bp, Artificial Sequence
  derived and/or modified sequence
atgaaccccctgaccaaggtgaagctgatcaacgagctgaacgagcgtgaagtgcagttgggcgttgcagacaaagtatcatggcattctgaatataaggactccgcctggatattccttggcggcctgccttatgagcttacagagggtgacatcatatgcgtgttttctcagtacggtgaaatcgtaaatatcaatctggttcgtgacaagaaaacaggcaagtcaaagggtttttgttttctgtgttatgaagatcagcggagcacaattttagcggttgacaacttcaacggcataaaaattaagggccgaaccatacgcgtggatcatgtgtcgaactaccgagcccccaaagatagtgaagaaatcgatgacgtaactcgacaactgcaggagaagggctgcggagcccgcaccccctctcctagcttgtcagagagctccgaggatgagaagcctacgaagaagcacaagaaagataaaaaggagaagaagaaaaagaagaaagagaaggagaaggcagaccgggaggtgcaggcggagcagcccagctcatcaagcccacggaggaagacggtgaaagaaaaggatgacacaggtcctaagaaacactcctcgaaaaatagtgagcgagctcagaagtccgaacctcgggaagggcaaaaactcccaaagagcagaacagcgtattccggtggtgccgaggatttggagagggagctcaagaaggagaagccaaagcacgagcataaatccagcagccggagggaagctcgagaggagaaaacaagaatcagggacaggggccggtcttccgacgcccactcatcctggtacaacgggcgttccgaaggacggagctaccgctctcggtccagatcgcgggataagagccatcgccacaaaagggcccggagatcgagggagcgggagtcgtcaaatccatcagatcgctggcggcactag

SEQ ID NO: 188947 - DNA, 177 bp, Artificial Sequence
  derived and/or modified sequence
atgaaccccctgaccaaggtgaagctgatcaacgagctgaacgagcgcgaggtccaactgggcgtggctgacaaggttagctggcatagtgagtacaaggactcagcatggattttcctggggggactcccatatgagcttacagaaggcgatataatttgtgtgtttagccagtag

SEQ ID NO: 188948 - DNA, 828 bp, Artificial Sequence
  derived and/or modified sequence
atgaaccccctgaccaaggtgaagctgatcaacgagctgaacgagagggaggtgcaactgggggtcgcagataaggtgagttggcatagtgagtacaaagactccgcctggatctttcttggagggctgccgtacgagttaaccgaaggtgacattatctgcgtattttcccaatacggtgaaatagtgaacatcaacttggtgcgcgacaaaaaaaccgggaaatctaagggcttctgctttctgtgttacgaggaccagcgctccaccattttagctgtggataatttcaacggcatcaagattaagggtaggacaattagggttgaccacgtttccaattacagagcccccaaggatagtgaagaaatcgatgacgttaccaggcagctgcaagaaaaggggtgcggagcgagaaccccatcgccaagcctatccgagtcttctgaagatgaaaagcccacaaagaaacataagaaagataaaaaagagaaaaaaaagaagaaaaaggaaaaggagaaagcagaccgagaggttcaggcagagcaaccttcaagctcctctccccgcagaaagacagttaaggaaaaggacgacaccggccctaaaaaacacagcagcaagaattctgaaagggcacagaaaagtgagccccgcgaaggtcagaagctgccaaaatccaggacagcctactctgggggggccgaagatcttgagcgagagttgaaaaaggagaagcctaaacacgagcacaagtcatcaagcagaagagaagcacgtgaagagaagacaaggattagggatcgaggcctcaggtgcactttttag

SEQ ID NO: 188949 - DNA, 969 bp, Artificial Sequence
  derived and/or modified sequence
atgaatccccttaccaaggtgaaactcatcaatgagctcaacgaaagggaagtccagctgggggtggccgataaggtatcttggcattccgaatacaaagatagcgcctggatcttcctcggtggactgccctacgagttgaccgagggagatatcatttgcgtgttttcccagtacggcgagatagtcaacatcaacctggtcagggataagaagaccggaaaatcaaagggtttttgcttcctctgctatgaggatcagcgctctaccatcctggccgtagataattttaatggcataaaaatcaagggcaggactatccgggtggatcacgtgagtaattaccgcgctccaaaggattcggaggagattgatgatgtgacacggcagctccaagagaagggctgcggcgctcggactccatctcctagtctgagcgaaagtagtgaagatgaaaagcccactaaaaagcataaaaaggataagaaagaaaagaagaagaaaaagaaagagaaggaaaaagctgacagagaagtgcaagccgagcagccatcctcaagtagcccaagaaggaaaacagtgaaggaaaaggacgacacaggtccgaaaaagcactcgtctaagaacagcgagcgagcccagaagtcagaacccagggaaggacagaagctgccaaaaagccgaaccgcctatagcggcggtgcggaagatctggaaagagaattaaagaaggaaaagcccaaacacgaacacaaatccagttcaagaagggaggcccgtgaggagaaaactaggattagggataggggaagatcgtccgacgcacattcaagctggtacaacggtcggtccgaggggagatcctacagaagtcgttcgcggtcccgagataagtctcacaggcataagcgcgcaaggcgatcgagggagagagaaagttccaacccgagtgacagatggcgacactag

SEQ ID NO: 188950 - DNA, 177 bp, Artificial Sequence
  derived and/or modified sequence
atgaatcccctgactaaggtgaaactcattaacgagctcaacgagcgagaagttcaattgggggttgcagataaagtctcttggcacagcgaatacaaagactctgcttggatttttctcggcggactcccatacgaactgacagaaggtgacatcatctgcgtcttttctcagtag

SEQ ID NO: 188951 - DNA, 828 bp, Artificial Sequence
  derived and/or modified sequence
atgaacccccttacgaaagtgaagctgataaacgaactgaatgagagggaagttcaactgggtgttgctgataaagtgagttggcactcggagtacaaggacagcgcgtggatcttcctcgggggacttccctatgaattaactgaaggagacattatctgtgttttctcccagtacggggagattgttaacatcaacttggtaagagacaaaaagaccggcaagagcaagggattctgctttctctgctacgaggaccagcgttccactatcctggctgtcgataatttcaacggtatcaagatcaagggcaggaccatccgagtggaccacgtcagtaactaccgagccccaaaagactctgaagagattgatgacgtcacgaggcaacttcaagaaaaggggtgcggggcaaggacgcctagcccatctctgagtgaaagcagcgaggacgagaagcctactaagaaacacaagaaagacaaaaaggagaagaaaaagaagaaaaaggagaaggagaaagccgaccgcgaggtacaggcagagcagcctagtagtagctctccacggaggaaaaccgtaaaggagaaggacgataccggcccaaaaaaacattcctcgaagaactccgagcgggctcagaaatccgagcccagggaggggcagaagctgcccaaatcgcggaccgcctattctggaggtgccgaagacctagagcgtgagcttaagaaggagaaacccaagcatgaacacaagagcagctccagacgggaggccagagaagagaaaacaagaatcagagatagaggcctgaggtgtactttctag

SEQ ID NO: 188952 - protein, 318 aa, Artificial Sequence
  derived and/or modified sequence
MRLLAGWLCLSLASVWLARRMWTLRSPLTRSLYVNMTSGPGGPAAAAGGRKENHQWYVCNREKLCESLQAVFVQSYLDQGTQIFLNNSIEKSGWLFIQLYHSFVSSVFSLFMSRTSINGLLGRGSMFVFSPDQFQRLLKINPDWKTHRLLDLGAGDGEVTKIMSPHFEEIYATELSETMIWQLQKKKYRVLGINEWQNTGFQYDVISCLNLLDRCDQPLTLLKDIRSVLEPTRGRVILALVLPFHPYVENVGGKWEKPSEILEIKGQNWEEQVNSLPEVFRKAGFVIEAFTRLPYLCEGDMYNDYYVLDDAVFVLKPV

SEQ ID NO: 188953 - protein, 282 aa, Artificial Sequence
  derived and/or modified sequence
MWTLRSPLTRSLYVKENHQWYVCNREKLCESLQAVFVQSYLDQGTQIFLNNSIEKSGWLFIQLYHSFVSSVFSLFMSRTSINGLLGRGSMFVFSPDQFQRLLKINPDWKTHRLLDLGAGDGEVTKIMSPHFEEIYATELSETMIWQLQKKKYRVLGINEWQNTGFQYDVISCLNLLDRCDQPLTLLKDIRSVLEPTRGRVILALVLPFHPYVENVGGKWEKPSEILEIKGQNWEEQVNSLPEVFRKAGFVIEAFTRLPYLCEGDMYNDYYVLDDAVFVLKPV

SEQ ID NO: 188954 - DNA, 957 bp, Artificial Sequence
  derived and/or modified sequence
atgagactgctggccggctggctgtgcctgagcctggccagcgtgtggctggccagaagaatgtggaccctgagaagccccctgaccagaagcctgtacgtgaacatgaccagcggccccggcggccccgccgccgccgccggcggcagaaaggagaaccaccagtggtacgtgtgcaacagagagaagctgtgcgagagcctgcaggccgtgttcgtgcagagctacctggaccagggcacccagatcttcctgaacaacagcatcgagaagagcggctggctgttcatccagctgtaccacagcttcgtgagcagcgtgttcagcctgttcatgagcagaaccagcatcaacggcctgctgggcagaggcagcatgttcgtgttcagccccgaccagttccagagactgctgaagatcaaccccgactggaagacccacagactgctggacctgggcgccggcgacggcgaggtgaccaagatcatgagcccccacttcgaggagatctacgccaccgagctgagcgagaccatgatctggcagctgcagaagaagaagtacagagtgctgggcatcaacgagtggcagaacaccggcttccagtacgacgtgatcagctgcctgaacctgctggacagatgcgaccagcccctgaccctgctgaaggacatcagaagcgtgctggagcccaccagaggcagagtgatcctggccctggtgctgcccttccacccctacgtggagaacgtgggcggcaagtgggagaagcccagcgagatcctggagatcaagggccagaactgggaggagcaggtgaacagcctgcccgaggtgttcagaaaggccggcttcgtgatcgaggccttcaccagactgccctacctgtgcgagggcgacatgtacaacgactactacgtgctggacgacgccgtgttcgtgctgaagcccgtgtag

SEQ ID NO: 188955 - DNA, 849 bp, Artificial Sequence
  derived and/or modified sequence
atgtggaccctgagaagccccctgaccagaagcctgtacgtgaaggagaaccaccagtggtacgtgtgcaacagagagaagctgtgcgagagcctgcaggccgtgttcgtgcagagctacctggaccagggcacccagatcttcctgaacaacagcatcgagaagagcggctggctgttcatccagctgtaccacagcttcgtgagcagcgtgttcagcctgttcatgagcagaaccagcatcaacggcctgctgggcagaggcagcatgttcgtgttcagccccgaccagttccagagactgctgaagatcaaccccgactggaagacccacagactgctggacctgggcgccggcgacggcgaggtgaccaagatcatgagcccccacttcgaggagatctacgccaccgagctgagcgagaccatgatctggcagctgcagaagaagaagtacagagtgctgggcatcaacgagtggcagaacaccggcttccagtacgacgtgatcagctgcctgaacctgctggacagatgcgaccagcccctgaccctgctgaaggacatcagaagcgtgctggagcccaccagaggcagagtgatcctggccctggtgctgcccttccacccctacgtggagaacgtgggcggcaagtgggagaagcccagcgagatcctggagatcaagggccagaactgggaggagcaggtgaacagcctgcccgaggtgttcagaaaggccggcttcgtgatcgaggccttcaccagactgccctacctgtgcgagggcgacatgtacaacgactactacgtgctggacgacgccgtgttcgtgctgaagcccgtgtag

SEQ ID NO: 188956 - DNA, 957 bp, Artificial Sequence
  derived and/or modified sequence
atgcgcttactggccggctggctgtgtttgtccctggcctctgtgtggctggctaggaggatgtggaccctgaggtctccattgacccggtccctctacgtgaacatgacatccggacctggaggcccagcagccgcggcaggcggtagaaaggagaatcaccagtggtacgtgtgcaatcgtgagaagttatgtgaatctttgcaggctgtctttgtgcagtcttacctggaccaagggactcagatcttcctcaataattctatcgaaaagtcagggtggctgttcattcagttgtatcattctttcgtaagcagtgttttctctctgttcatgtcacgcacgagcattaatgggcttctcggaagaggcagcatgtttgtgttctccccagaccagtttcaacggcttcttaagattaacccagactggaaaacacaccgactacttgatctcggagccggagacggcgaggttacgaaaattatgtcaccgcacttcgaagagatctacgctacggaactctcggagacaatgatttggcaactgcagaaaaagaaatacagagttttaggaatcaacgaatggcagaatacaggcttccagtatgatgtgatttcctgtctcaatctgcttgaccggtgcgatcagcccctaacactcctcaaggatatacggtccgtgcttgaaccaacacgaggccgggttatcctggctctggtgctcccatttcacccatacgtagaaaatgtcggaggcaaatgggaaaaaccttctgaaattttagagattaagggacaaaactgggaggaacaggtgaacagcctgccggaggtattccggaaagcaggcttcgtgattgaggcttttactagactaccttacctatgtgagggcgatatgtataacgactactacgttctcgatgacgctgtctttgtgctgaagcctgtgtag

SEQ ID NO: 188957 - DNA, 849 bp, Artificial Sequence
  derived and/or modified sequence
atgtggactctaagatcccccttaacgcggtcgctgtatgtcaaagagaatcatcaatggtatgtttgcaaccgggaaaagctatgtgagtcactacaggctgtcttcgttcaatcatacctggaccagggaacccagattttcctgaataacagcatcgagaaatctgggtggttgttcatccagttatatcacagttttgtgagcagcgttttcagtctgttcatgtcccgcacttctattaatggcctcttgggccgtggctcaatgttcgtgttctccccagatcagtttcaaagactactcaaaatcaacccggactggaaaactcacagattgctggacctgggcgcaggggacggcgaggtcacaaagatcatgtccccacattttgaagagatctatgctaccgagttgtccgaaactatgatctggcagctccaaaagaagaaatatcgtgtcctgggcattaacgaatggcagaataccggattccagtacgatgttatatcatgcctaaacctactggatcgttgcgatcagccgttaacgctgttaaaggatatcagaagcgttctcgaacctacgagaggacgagtcatcctcgcgctggttctgccatttcacccttatgtcgagaacgtgggcggcaagtgggagaagcccagcgagatcctggaaatcaaaggtcagaactgggaggagcaagtcaactcacttcctgaggtgtttcggaaagcaggattcgtcatcgaagccttcactcgcctcccttacctgtgcgaaggcgacatgtataacgattactacgtcctcgatgatgcagtgttcgtactcaagccagtctag

SEQ ID NO: 188958 - DNA, 957 bp, Artificial Sequence
  derived and/or modified sequence
atgaggctgctggccggctggctgtgcctgagcctggcctctgtgtggctggcccggaggatgtggaccctgcggagccccctgaccaggagcctgtatgtgaacatgaccagcggccctgggggccctgctgctgctgctgggggcaggaaggagaaccaccagtggtacgtgtgcaaccgggagaagctgtgtgagagcctgcaggccgtgtttgtgcagagctacctggaccagggcacccagatcttcctgaacaacagcattgagaagagcggctggctgttcatccagctgtaccacagctttgtgagcagcgtcttcagcctcttcatgagcaggaccagcatcaatggcctgctgggccggggctccatgtttgtgttctccccagaccagttccagaggctgctgaagatcaacccagactggaagacccaccggctgctggacctgggcgctggagatggagaggtgaccaagatcatgagcccccactttgaggagatctatgccacagagctgtctgagaccatgatctggcagctgcagaagaagaagtacagagtgctgggcatcaatgagtggcagaacacaggcttccagtatgatgtgatcagctgcctgaacctgctggacagatgtgaccagcccctgaccctgctgaaggacatccgctctgtgctggagcccacccggggccgggtcatcctggccctggtgctgcccttccacccctacgtggagaatgtgggcggcaagtgggagaagcccagcgagatcctggagatcaagggccagaactgggaggagcaggtgaacagcctgcctgaggtgttcaggaaggccggctttgtgattgaggccttcacccggctgccctacctgtgtgagggggacatgtacaatgactactacgtgctggatgatgctgtgtttgtgctgaagcctgtgtag

SEQ ID NO: 188959 - DNA, 849 bp, Artificial Sequence
  derived and/or modified sequence
atgtggaccctgcggagccccctgaccaggagcctgtatgtgaaggagaaccaccagtggtacgtgtgcaaccgggagaagctgtgtgagagcctgcaggccgtgtttgtgcagagctacctggaccagggcacccagatcttcctgaacaacagcattgagaagagcggctggctgttcatccagctgtaccacagctttgtgagcagcgtcttcagcctcttcatgagcaggaccagcatcaatggcctgctgggccggggctccatgtttgtgttctccccagaccagttccagaggctgctgaagatcaacccagactggaagacccaccggctgctggacctgggcgctggagatggagaggtgaccaagatcatgagcccccactttgaggagatctatgccacagagctgtctgagaccatgatctggcagctgcagaagaagaagtacagagtgctgggcatcaatgagtggcagaacacaggcttccagtatgatgtgatcagctgcctgaacctgctggacagatgtgaccagcccctgaccctgctgaaggacatccgctctgtgctggagcccacccggggccgggtcatcctggccctggtgctgcccttccacccctacgtggagaatgtgggcggcaagtgggagaagcccagcgagatcctggagatcaagggccagaactgggaggagcaggtgaacagcctgcctgaggtgttcaggaaggccggctttgtgattgaggccttcacccggctgccctacctgtgtgagggggacatgtacaatgactactacgtgctggatgatgctgtgtttgtgctgaagcctgtgtag

SEQ ID NO: 188960 - DNA, 957 bp, Artificial Sequence
  derived and/or modified sequence
atgcggctgctggccggctggctgtgcctgagcctggccagcgtgtggctggcccggcggatgtggacgctgcgttccccacttaccaggtctctttacgtgaatatgacatccggccctggcggccctgctgctgccgccggcgggcgtaaagagaaccatcagtggtacgtttgtaaccgcgagaaactgtgcgagagtctgcaagcggtgtttgttcagtcgtacttagaccaaggcacacagatattcctcaacaactctattgagaagtctggctggctctttattcagctgtaccatagtttcgtgtccagtgttttctccctgttcatgagtagaacttctattaacggcctgctcggtagaggcagtatgttcgtattcagtcccgaccagtttcagcgtttgcttaaaattaaccctgattggaaaacgcataggttgttagatttgggtgcaggcgacggggaggtgactaagattatgagtccgcactttgaggaaatttacgctacagaactatccgagaccatgatctggcagctgcagaaaaaaaaatatagggtcttagggatcaacgaatggcagaataccggcttccagtatgatgtgatttcctgcctgaaccttctggatcgttgcgatcagccactaactctgttgaaggatattcgcagtgttttggaaccgacgcgtggaagagtgatcctggcgttggtgctaccatttcatccctacgtcgagaatgtcggcggcaaatgggagaagccaagcgaaattctagaaatcaagggccagaattgggaggagcaagtcaactccctgcccgaggttttccgcaaggctggctttgtgatcgaggcttttacacgactgccttacctgtgcgagggcgatatgtataacgattattacgtgctcgacgacgctgtgtttgttttaaagccagtgtag

SEQ ID NO: 188961 - DNA, 849 bp, Artificial Sequence
  derived and/or modified sequence
atgtggaccctgcggagccccctgacccggagcctgtacgtgaaggaaaaccatcagtggtacgtgtgtaatagagagaagctctgtgagtcgttgcaggctgtctttgtacagagctaccttgaccaaggcacccagatctttctaaacaactccatcgagaagtctggctggctgtttatacaactgtatcacagcttcgtatcctctgtcttcagcctcttcatgtcacgcacaagcatcaatggcctgctcggccgcggttccatgtttgtgttttctcctgaccagttccagaggttgttgaagattaaccctgattggaagacacaccgcctgctcgatttaggcgcaggggatggcgaggtcaccaaaatcatgagcccccactttgaagaaatatacgccacagaactgtcggagacaatgatctggcaactgcaaaaaaagaagtatagggtactaggcatcaacgagtggcagaataccggtttccaatacgatgtaatctcttgcctgaacctgctcgacaggtgcgatcaacccctgacacttttaaaggacataaggagtgttctggaacccacgagaggcagagttatactggcactggtgttgccgttccacccctatgttgaaaatgtgggcgggaaatgggaaaaaccttcggaaatcttggagatcaaagggcagaactgggaagaacaggtgaattcactgcctgaggtgtttcgtaaggcaggttttgttatagaggcttttactcggctgccatatctctgtgagggcgacatgtataacgattactatgtgttggatgacgcagtatttgttctgaagcctgtttag

SEQ ID NO: 188962 - DNA, 3256 bp, Artificial Sequence
  derived and/or modified sequence
ggccgctcgtaagtgctccggatggaaactggtgcagggggcagcggcgttccgcggccggaagggaagggggaggtgccgaggctgcgcgccggctgctcctccccacccccagcctttgccctgaagggggctggatgggcaaggcggccgcgatggctcgagctcgggcggtggcggcggtggccggaggcggcggtgcctcctcctcctcgccccggcgccggcggtgatccgagcgagcggccgcggcccccgatgagactgctggcgggctggctgtgcctgagcctggcgtccgtgtggctggcgcggaggatgtggacgctgcggagcccgctcacccgctccctgtacgtgaacatgactagcggcccgggtgggccggcggcggccgcgggcggcaggaaggagaaccaccagtggtatgtgtgcaacagagagaaattatgcgaatcactccaggctgtctttgttcagagttaccttgatcaaggaacacagatcttcttaaacaacagcattgagaaatcgggctggctatttatccaattatatcattcttttgtgtcatctgtttttagcctgtttatgtctagaacatctatcaatgggttgctaggaagaggctcaatgtttgtgttttcaccagatcagtttcagagactgcttaaaattaatccagactggaaaacccacagacttcttgatttaggtgctggagatggagaagtcacaaaaatcatgagccctcattttgaagaaatctatgccactgagctttctgaaactatgatatggcagcttcagaaaaagaaatacagagtccttggtataaatgaatggcagaatacggggttccagtatgatgtcatcagctgcctgaacttgctggaccgctgtgatcagcccctgactttgttaaaagatatcagaagtgtcttggagccaactagaggcagggtcatccttgcccttgtcctcccctttcatccctatgtggaaaacgtaggtggcaagtgggagaaaccatcagaaattttggaaatcaaaggacagaactgggaagaacaagtgaatagtctgcctgaagttttcagaaaagctggttttgttatcgaagctttcaccagactaccatacctgtgtgaaggcgacatgtataatgactactacgttctggatgacgctgtctttgttctcaaaccagtataaacacgtggaggtcgaagtcttcagagtccgcaccctccgggatgtgcccttggaagagggtctgtgttcacaattacgtgaagggaggacccttggggaccgccattctaaatatcatgtaggaatttaaaaagccaaaatactaattatttctttgtagtgtgtaaaggaatgtttttaaaagacaaaaacccaactctttgtggatttttatcaactctttactcagagccactctccaatgcaggtcacactccaattatgatggaagatattttttatacttaattgcagtagggactcattcccagacaaagcaatagtcacgacttcatggaaccaatcaatggattgttttttgaagactggcaataaagctgtccattcaattccaaatactggttttaaggtatagccactgatattctttcatgtttagaaattctttctgttattattcaagaaaatgtttttaatcatgctaataaacttttttggagatgactttggcatcatgtttgaattcatataaagctcccctagcattttttattggtttggcttcaggagtacccaaatagtagcattatgagaatgacgcagacaatttgaataggggggaaggaaggcttcagacttgggggaaggggagattattgcaaattgcagtgaacactgagtcagtaaaaaaaaaaaacagaaacaaaaacccagcctcattcagatacagaacttcagggacccctccccccacccccccagttaatgctgctgtgaaaaatgcaaaataacctggttctgactttgtgatcactcatgtcccatacactgaactttgtttttttctggacaatctcaggttctcagaattgaaacattcagttttgtctactgacaaaatgcaactaaaaatgttttaattcaacttcttactctacacttatatacctctctcccagagcttggctcttccctgaaatccttaaaggagtttattatttgccaagaatatggtttgatgaagaccgtgtcagactcatgcattctggaatccgtgagtgcctccaaccataaacccagaaatgctgccatagaggaacccattagcaagatcaataaccatcgtggatattccaaagagcagagcatttaacccagaatctgaaatctcagtaataacagaaatgtcaatatgagattgtggttattaacaatatgttatcctcactactttatttcttttttcatccaggtgtttcattaagtattctcatttatatgctcatagaagtcatcagatcaacacattcactccaacacctgggtataaaggcgaattaaaacctgaagaattactttattattcattaagaactgcattcccacatcctcacaccaatatcttccactgttactgtgcagtcataataagagttgggttatgtgatttatgcaaaattgttattggtgtgttctaatgatttttttccaggaattcaagtaagtgaagtacaaatacttagcaccatagattgtaaaaatagaaagaggaaatgagaaaacttaatgtcgttcttgtacagttgagttttgcttctttataaactgtctgttaaaatcaggggttgctgttagactgtcaagcagaagtgatggatgttcaaggaggcaggttgccccaaagtgttttctaactttcaagtagagaactttatgctctaataagaaaaatacaactcattcttaaccacccccccaaaacagagaaaacacatacatttatgcattttaaagataaaaagtagtttctcaaaaaaatctgaagttctctgaaaaccagcttattaaaagtgctgttttgtggtgaaaattgaaaccaaatccactcacatttcctatcgggtcttgaaattcttggtggtgtgtcaccattccactagatggcagtgttgcttactgagtgtcaatggcttttttccccgtaaatggaatcatgtttttctcccccaaagtacaataaagctgccttgtctgcaccatt

SEQ ID NO: 188963 - DNA, 2531 bp, Artificial Sequence
  derived and/or modified sequence
tgcctgagcctggcgtccgtgtggctggcgcggaggatgtggacgctgcggagcccgctcacccgctccctgtacgtgaaggagaaccaccagtggtatgtgtgcaacagagagaaattatgcgaatcactccaggctgtctttgttcagagttaccttgatcaaggaacacagatcttcttaaacaacagcattgagaaatcgggctggctatttatccaattatatcattcttttgtgtcatctgtttttagcctgtttatgtctagaacatctatcaatgggttgctaggaagaggctcaatgtttgtgttttcaccagatcagtttcagagactgcttaaaattaatccagactggaaaacccacagacttcttgatttaggtgctggagatggagaagtcacaaaaatcatgagccctcattttgaagaaatctatgccactgagctttctgaaactatgatatggcagcttcagaaaaagaaatacagagtccttggtataaatgaatggcagaatacggggttccagtatgatgtcatcagctgcctgaacttgctggaccgctgtgatcagcccctgactttgttaaaagatatcagaagtgtcttggagccaactagaggcagggtcatccttgcccttgtcctcccctttcatccctatgtggaaaacgtaggtggcaagtgggagaaaccatcagaaattttggaaatcaaaggacagaactgggaagaacaagtgaatagtctgcctgaagttttcagaaaagctggttttgttatcgaagctttcaccagactaccatacctgtgtgaaggcgacatgtataatgactactacgttctggatgacgctgtctttgttctcaaaccagtataaacacgtggaggtcgaagtcttcagagtccgcaccctccgggatgtgcccttggaagagggtctgtgttcacaattacgtgaagggaggacccttggggaccgccattctaaatatcatgtaggaatttaaaaagccaaaatactaattatttctttgtagtgtgtaaaggaatgtttttaaaagacaaaaacccaactctttgtggatttttatcaactctttactcagagccactctccaatgcaggtcacactccaattatgatggaagatattttttatacttaattgcagtagggactcattcccagacaaagcaatagtcacgacttcatggaaccaatcaatggattgttttttgaagactggcaataaagctgtccattcaattccaaatactggttttaaggtatagccactgatattctttcatgtttagaaattctttctgttattattcaagaaaatgtttttaatcatgctaataaacttttttggagatgactttggcatcatgtttgaattcatataaagctcccctagcattttttattggtttggcttcaggagtacccaaatagtagcattatgagaatgacgcagacaatttgaataggggggaaggaaggcttcagacttgggggaaggggagattattgcaaattgcagtgaacactgagtcagtaaaaaaaaaaaacagaaacaaaaacccagcctcattcagatacagaacttcagggacccctccccccacccccccagttaatgctgctgtgaaaaatgcaaaataacctggttctgactttgtgatcactcatgtcccatacactgaactttgtttttttctggacaatctcaggttctcagaattgaaacattcagttttgtctactgacaaaatgcaactaaaaatgttttaattcaacttcttactctacacttatatacctctctcccagagcttggctcttccctgaaatccttaaaggagtttattatttgccaagaatatggtttgatgaagaccgtgtcagactcatgcattctggaatccgtgagtgcctccaaccataaacccagaaatgctgccatagaggaacccattagcaagatcaataaccatcgtggatattccaaagagcagagcatttaacccagaatctgaaatctcagtaataacagaaatgtcaatatgagattgtggttattaacaatatgttatcctcactactttatttcttttttcatccaggtgtttcattaagtattctcatttatatgctcatagaagtcatcagatcaacacattcactccaacacctgggtataaaggcgaattaaaacctgaagaattactttattattcattaagaactgcattcccacatcctcacaccaatatcttccactgttactgtgcagtcataataagagttgggttatgtgatttatgcaaaattgttattggtgtgttctaatgatttttttccaggaattcaagtaagtgaagtacaaatacttagcaccatagattgtaaaaatagaaagaggaaatgagaaaacttaatgtcgttcttgtacagttgagttttgcttctttataaactgtctgttaaaatcaggggttgctgttagactgtcaagca

SEQ ID NO: 188964 - DNA, 957 bp, Artificial Sequence
  derived and/or modified sequence
atgcggctcctagcgggatggctgtgcctgagcttagcctccgtctggctggctcggagaatgtggacacttcgctcccctttgactaggagcctgtatgtcaatatgacttcaggccctggtggacctgccgcagccgctggcggacgcaaggaaaaccatcagtggtatgtttgtaaccgggaaaagctctgtgagagcttgcaggcagtgtttgtgcaaagttatctggatcaagggactcaaatattccttaacaattcaattgagaaatcaggttggctcttcatccagctttatcatagctttgtctcctccgttttctccttattcatgagtcgcacaagcattaacgggctgctgggtagaggctcaatgttcgttttcagtcctgatcagtttcagcggctactaaagataaatccagattggaaaacccatcgcctgctggacctaggggctggcgacggcgaggttacgaagattatgtccccccatttcgaggaaatttacgccacagagctgagcgagactatgatctggcagttacagaaaaagaaatatcgggtccttggtatcaatgagtggcagaatacaggatttcagtatgacgtaattagttgcctgaacctcctcgatcggtgtgaccagccgctgaccttactcaaggatattcggtccgtactggagccaacgagggggagggtcatcctcgccctggttctgccattccacccatacgtcgagaacgtcgggggaaagtgggagaagcccagcgagatactggaaataaaaggccagaactgggaagaacaggtcaactccctgccagaagtctttaggaaagctggtttcgtgattgaggcctttactcgtctgccgtacctatgcgaaggcgacatgtataatgactattatgttctggatgacgcggtatttgtgctcaagccagtatag

SEQ ID NO: 188965 - DNA, 849 bp, Artificial Sequence
  derived and/or modified sequence
atgtggactctgagatctcccctgacccggtcactatacgtcaaggagaaccaccaatggtacgtgtgcaacagagagaaactatgcgaaagtctgcaggctgtgtttgtgcagtcttatctggatcagggtactcaaatttttctgaacaactcaattgaaaaaagcgggtggctgtttattcagctgtatcattcattcgtgtctagcgtgttttccctgtttatgtctcgaacttctataaatggcctcctggggaggggttccatgttcgtattctccccagaccaattccagcggttgcttaaaattaaccctgactggaagacccaccgtctgctagatctgggtgcaggcgatggggaagttacgaaaatcatgtctcctcattttgaagaaatctatgcaactgaactaagcgagacaatgatctggcagctgcagaagaaaaagtacagggttctgggtataaacgagtggcagaacaccgggttccaatacgatgtgatatcttgcttgaatcttcttgataggtgcgatcagcccctgacacttctgaaggacattcggtcggtcttagaacccacccgcggacgagtcattctggccctcgtgctgccgtttcacccctacgtggagaatgttgggggaaagtgggagaagccttccgagatacttgagatcaagggtcagaactgggaagaacaggttaacagcctgcctgaggtgttcagaaaggctggatttgttattgaggcctttactcgtctcccctacctatgtgaaggagacatgtacaacgactactatgtgttggacgatgcagttttcgtgctgaaacctgtgtag

SEQ ID NO: 188966 - protein, 318 aa, Artificial Sequence
  derived and/or modified sequence
MVELMFPLLLLLLPFLLYMAAPQIRKMLSSGVCTSTVQLPGKVVVVTGANTGIGKETAKELAQRGARVYLACRDVEKGELVAKEIQTTTGNQQVLVRKLDLSDTKSIRAFAKGFLAEEKHLHVLINNAGVMMCPYSKTADGFEMHIGVNHLGHFLLTHLLLEKLKESAPSRIVNVSSLAHHLGRIHFHNLQGEKFYNAGLAYCHSKLANILFTQELARRLKGSGVTTYSVHPGTVQSELVRHSSFMRWMWWLFSFFIKTPQQGAQTSLHCALTEGLEILSGNHFSDCHVAWVSAQARNETIARRLWDVSCDLLGLPID

SEQ ID NO: 188967 - protein, 305 aa, Artificial Sequence
  derived and/or modified sequence
MVELMFPLLLLLLPFLLYMAAPQIRKMLSSGVCTSTVQLPGKVVVVTGANTGARVYLACRDVEKGELVAKEIQTTTGNQQVLVRKLDLSDTKSIRAFAKGFLAEEKHLHVLINNAGVMMCPYSKTADGFEMHIGVNHLGHFLLTHLLLEKLKESAPSRIVNVSSLAHHLGRIHFHNLQGEKFYNAGLAYCHSKLANILFTQELARRLKGSGVTTYSVHPGTVQSELVRHSSFMRWMWWLFSFFIKTPQQGAQTSLHCALTEGLEILSGNHFSDCHVAWVSAQARNETIARRLWDVSCDLLGLPID

SEQ ID NO: 188968 - DNA, 957 bp, Artificial Sequence
  derived and/or modified sequence
atggtggaattgatgttccccctcctgctgctgcttctgccttttctcctgtatatggcagcccctcagattcggaagatgttgtcttcaggcgtctgcacaagcactgtgcagttgccagggaaagtggtagtcgtgactggcgccaacacgggcatcgggaaggaaacagccaaagagctggcccagcggggtgcaagagtgtacctcgcttgtcgggacgtggagaaaggggaattggtcgccaaggagatccagactactaccggcaatcagcaagttcttgtacgtaaattggacctgagcgacactaaatcaattagggcctttgccaaagggtttctagctgaagaaaaacacctgcacgtgttgatcaacaacgccggagtgatgatgtgcccttacagcaagactgctgacggattcgaaatgcatatcggagtaaaccatctgggccacttcttactcacccacctgctcctcgagaaattgaaggaatctgcgcccagcagaatcgttaacgtcagttctctggcccatcacctggggagaattcacttccacaatctgcagggagaaaagttctacaacgctgggcttgcctattgtcactcaaagctggcaaatattcttttcacccaagaactggcccggaggctcaaaggaagcggcgtaacaacttattccgtgcaccccggaaccgtccagagcgagctggtgcggcacagcagcttcatgaggtggatgtggtggctcttcagttttttcatcaagacccctcaacagggcgcacagaccagtctgcactgtgcactaaccgagggcctggagatactcagcgggaatcatttttcagattgtcacgtagcctgggtgtctgcccaggcccgtaacgaaacaattgctcggaggctatgggatgtttcctgtgatctcttggggttgccaatcgattag

SEQ ID NO: 188969 - DNA, 918 bp, Artificial Sequence
  derived and/or modified sequence
atggtggagcttatgttccctctgctgttgctccttcttcctttcctactgtacatggctgctccccaaatacggaaaatgctttcaagcggggtttgtacgtccacagttcagctcccaggtaaggtcgtggtagtaacaggcgctaacacaggcgctagggtgtaccttgcctgccgtgacgtggaaaaaggcgagctggtggcaaaggagatccagacgactacgggcaatcagcaggtgcttgtaaggaagctggatctgtcagacacaaagtcaatccgcgcattcgccaagggttttctggcagaggagaaacacttgcacgtattgattaacaacgctggggtcatgatgtgtccatattcaaaaacagctgatgggtttgagatgcacatcggggtaaaccatctaggacactttctactgactcatctgttgctggagaagctgaaggagtccgctccaagccgcatcgtgaatgtctcatctctggcccaccatttaggccgcatccattttcacaacctgcagggggagaagttttataacgcagggctggcctattgccactccaagctggccaacattctgttcacgcaggagctcgcacgaaggctgaaaggctctggtgtgacgacttattcagtacatcctggcaccgtccagagcgaacttgtgagacattcttcattcatgagatggatgtggtggctgttctccttttttatcaagaccccccagcagggcgcccagacaagcctgcactgtgccctgacagaaggattagagattcttagcggaaaccattttagtgactgtcatgtggcttgggtgtccgcccaggctaggaatgaaacgatcgcccgcaggctgtgggatgtgtcctgcgatttgttgggcctgcctatcgattag

SEQ ID NO: 188970 - DNA, 957 bp, Artificial Sequence
  derived and/or modified sequence
atggtggagctgatgttccccctgctgctgctgctgctgcccttcctgctgtacatggccgccccccagatcaggaagatgctgagcagcggcgtgtgcaccagcacagtgcagctgcccgggaaggtggtggtggtgactggagccaacacaggaattggcaaggagacagccaaggagctggcccagagaggagcccgggtgtacctggcctgcagagatgtggagaagggggagctggtggccaaggagatccagaccaccactggaaaccagcaggtgctggtgaggaagctggacctgagtgacaccaagagcatccgggcctttgccaagggcttcctggccgaggagaagcacctgcacgtgctgatcaacaatgctggggtgatgatgtgcccctacagcaagacagcagatggctttgagatgcacatcggcgtgaaccacctgggccacttcctgctgacccacctgctgctggagaagctgaaggagagcgcccccagccgcatcgtgaatgtgagcagcctggcccaccacctgggccgcatccacttccacaacctgcagggcgagaagttctacaatgccggcctggcctactgccacagcaagctggccaacatcctcttcacccaggagctggcccggcggctgaagggcagcggcgtgaccacctacagcgtgcaccctggcaccgtgcagagcgagctggtgcgccacagcagcttcatgcgctggatgtggtggctgttctccttcttcatcaagaccccccagcagggcgcccagaccagcctgcactgtgccctgacagagggcctggagatcctgagcggcaaccacttcagtgactgccacgtggcctgggtgtctgcccaggccagaaatgagaccatcgcccggcggctgtgggatgtgtcctgtgacctgctgggcctgcccattgattag

SEQ ID NO: 188971 - DNA, 918 bp, Artificial Sequence
  derived and/or modified sequence
atggtggagctgatgttccccctgctgctgctgctgctgcccttcctgctgtacatggccgccccccagatcaggaagatgctgagcagcggcgtgtgcaccagcacagtgcagctgcccgggaaggtggtggtggtgactggagccaacacaggagcccgggtgtacctggcctgcagagatgtggagaagggggagctggtggccaaggagatccagaccaccaccggcaaccagcaggtgctggtgaggaagctggacctgagtgacaccaagagcatccgggcctttgccaagggcttcctggccgaggagaagcacctgcacgtgctgatcaacaatgccggcgtgatgatgtgcccctacagcaagacagcagatggctttgagatgcacatcggcgtgaaccacctgggccacttcctgctgacccacctgctgctggagaagctgaaggagagcgcccccagcagaattgtgaatgtgagcagcctggcccaccacctgggccgcatccacttccacaacctgcagggcgagaagttctacaatgccggcctggcctactgccacagcaagctggccaacatcctcttcacccaggagctggcccggcggctgaagggcagcggcgtgaccacctacagcgtgcaccctggcaccgtgcagagcgagctggtgcgccacagcagcttcatgcgctggatgtggtggctgttctccttcttcatcaagaccccccagcagggcgcccagaccagcctgcactgtgccctgacagagggcctggagatcctgagcggcaaccacttcagtgactgccacgtggcctgggtgtctgcccaggccagaaatgagaccatcgcccggcggctgtgggatgtgtcctgtgacctgctgggcctgcccatcgactag

SEQ ID NO: 188972 - DNA, 957 bp, Artificial Sequence
  derived and/or modified sequence
atggtggagctgatgttccccctgctgctgctgctgctgcccttcttgctgtacatggcagccccacagatccgcaagatgctgagctcaggggtctgcacgtctacagtccagctgcctggtaaggtcgtggtggtaactggcgccaatactggcataggcaaggaaaccgccaaagaacttgcccagaggggtgcgcgcgtttatctggcttgtagggacgtggagaagggcgaattggtggctaaggagatccagacgacaacgggcaaccagcaggtactcgtgcgtaaactcgacctaagcgatacaaagtctattcgcgccttcgccaagggttttctggctgaagagaagcatctgcacgtgctgatcaacaacgccggggttatgatgtgtccatacagcaagaccgccgatgggtttgaaatgcacattggggtgaaccacctggggcattttttgctgacccacttactgcttgaaaaacttaaggagtccgctcctagccggatagtcaacgtttcatctctagcacaccatcttggtagaatccacttccacaacctccaaggtgagaaattctataatgcaggcctggcctattgccattctaagctggctaacattctcttcacacaggagctggctaggaggttaaagggttccggggtgacgacttattctgtgcacccgggtaccgttcaatctgaactggtccggcatagcagttttatgcgttggatgtggtggctcttttcgttttttataaaaacaccgcagcagggagcgcaaacatccctgcactgcgcactgacagaagggctcgagattttaagcgggaatcacttcagtgactgtcatgtggcttgggtgtctgcacaggcccgcaacgagacaattgctagaaggctgtgggatgtctcatgtgacctcttggggctgcccattgactag

SEQ ID NO: 188973 - DNA, 918 bp, Artificial Sequence
  derived and/or modified sequence
atggtggagctgatgttccccctgctgctgctgctgctgcccttcctcctgtatatggcagcgccacagataaggaaaatgctatccagtggagtgtgcaccagcaccgtgcagctacctgggaaggtcgtcgtggtcacgggcgcaaatacaggcgcccgcgtatacttggcatgcagagatgttgagaagggcgagttagtcgcaaaggaaattcagaccacgaccggtaaccagcaagtcctggtcaggaagcttgatctgtctgacactaagtccatccgcgcattcgcaaagggatttctagcggaagaaaaacatttacatgtgctcatcaataatgctggggtcatgatgtgtccttattccaagacagccgacggcttcgagatgcacataggcgtcaaccacttaggccattttttgttgactcacctactcctcgaaaagcttaaggagtctgctccatccagaatcgtgaacgtctccagcctggcccatcatttaggccgtattcattttcataaccttcaaggagagaaattctataacgccgggctggcctactgtcactccaagctggcaaatatcctgttcactcaggagcttgcccgaaggctgaaagggtctggggtaacaacatactccgtgcaccctgggacagtgcagtcggagctggtccggcactcctctttcatgaggtggatgtggtggttgtttagcttctttattaagactccacagcagggtgcacaaaccagcctacactgcgctctgactgagggactagagattctcagtggtaatcattttagcgattgccatgtggcctgggtctccgcccaggcccgtaatgagaccatcgcgagacgactgtgggacgtgagttgtgacttgctggggctgcctatcgattag

SEQ ID NO: 188974 - DNA, 957 bp, Artificial Sequence
  derived and/or modified sequence
atggtggagcttatgttccccctcctcttgttgctactgcccttcctgttatacatggccgcacctcagatacggaaaatgctctccagcggtgtgtgcaccagtaccgtgcagttgcccggtaaggtggtcgtggtgacaggggctaacactgggatcgggaaagaaacggcaaaggagctggcacaaaggggagctagggtgtacctggcctgtcgcgatgtcgaaaaaggcgagctggtagctaaagaaatccagactaccactgggaaccagcaagtgttggtgagaaagctcgaccttagtgatactaaaagtattcgagcattcgcgaagggctttttagcagaagagaagcatcttcacgtgttgataaataatgccggagtaatgatgtgcccgtactccaaaacagccgacgggtttgaaatgcatatcggtgtcaaccatttgggacactttctcttaactcacctcctgctggagaaactgaaagagtcagccccaagcagaatagttaacgtgtcgagccttgctcatcatctcgggaggatccactttcacaatctccagggcgaaaagttttataatgcaggacttgcctactgccactccaagctcgccaatattctgtttactcaggaactagcgcgaagattgaagggaagtggggtgactacttactccgtgcatcccggaacagtgcaaagcgagctagtgaggcacagctctttcatgcggtggatgtggtggttattttcattcttcattaagacacctcaacagggcgctcaaacttccctgcattgcgctctgaccgagggcctcgagatcctgagcgggaaccactttagtgactgccacgtagcctgggtctcggcccaggccaggaatgaaacaattgcgagacgactgtgggatgtgagttgtgaccttcttggactccctatcgattag

SEQ ID NO: 188975 - DNA, 918 bp, Artificial Sequence
  derived and/or modified sequence
atggtggaactcatgttccccctcctacttctgctcttgccgttcctcttgtacatggcggcaccacaaatcaggaaaatgctgagcagcggcgtttgtactagcacggtccagttgcctggcaaagtagttgtggtcacgggggctaacactggggctagagtgtatcttgcctgtagggatgtagagaagggtgaacttgtggctaaggagattcagaccacgactggtaatcagcaagtgctggtcaggaaattagatctgtctgacaccaagtcaattagagcattcgcgaagggctttctggcagaggaaaaacatctgcacgtacttattaacaacgccggagtgatgatgtgtccctacagtaaaaccgccgatggattcgagatgcacatcggtgtcaaccacctgggccacttcctgctcactcacctgctgttggagaagctcaaggaaagcgcaccatcgagaatcgtgaacgtgtcttcactggctcatcaccttggacgcatccattttcacaacttgcagggcgagaagttttacaatgccggacttgcttattgccactccaaactcgctaacatcctatttacccaagagctggccaggcgccttaaagggagtggtgtcaccacatactcagtccaccctggtactgtccagagcgaattagtgcggcattcttcttttatgagatggatgtggtggctcttctccttctttatcaagaccccacagcaaggtgcgcaaacctcactgcattgcgccctgaccgagggcctcgaaatcttatctggtaatcacttcagcgattgtcacgtcgcgtgggtctctgcgcaggctcgtaacgagactattgcgagacgactgtgggatgtttcatgcgacctgctcggactgccgatcgattag

SEQ ID NO: 188976 - DNA, 2588 bp, Artificial Sequence
  derived and/or modified sequence
gtctgctccccgggctgtcgcaatttgaattggggcgtgtctagaaagagaagccatagtcggcgagcaacgctggagcatcccgctctggtgccgctgcagccggcagagatggttgagctcatgttcccgctgttgctcctccttctgcccttccttctgtatatggctgcgccccaaatcaggaaaatgctgtccagtggggtgtgtacatcaactgttcagcttcctgggaaagtagttgtggtcacaggagctaatacaggtatcgggaaggagacagccaaagagctggctcagagaggagctcgagtatatttagcttgccgggatgtggaaaagggggaattggtggccaaagagatccagaccacgacagggaaccagcaggtgttggtgcggaaactggacctgtctgatactaagtctattcgagcttttgctaagggcttcttagctgaggaaaagcacctccacgttttgatcaacaatgcaggagtgatgatgtgtccgtactcgaagacagcagatggctttgagatgcacataggagtcaaccacttgggtcacttcctcctaacccatctgctgctagagaaactaaaggaatcagccccatcaaggatagtaaatgtgtcttccctcgcacatcacctgggaaggatccacttccataacctgcagggcgagaaattctacaatgcaggcctggcctactgtcacagcaagctagccaacatcctcttcacccaggaactggcccggagactaaaaggctctggcgttacgacgtattctgtacaccctggcacagtccaatctgaactggttcggcactcatctttcatgagatggatgtggtggcttttctcctttttcatcaagactcctcagcagggagcccagaccagcctgcactgtgccttaacagaaggtcttgagattctaagtgggaatcatttcagtgactgtcatgtggcatgggtctctgcccaagctcgtaatgagactatagcaaggcggctgtgggacgtcagttgtgacctgctgggcctcccaatagactaacaggcagtgccagttggacccaagagaagactgcagcagactacacagtacttcttgtcaaaatgattctccttcaaggttttcaaaacctttagcacaaagagagcaaaaccttccagccttgcctgcttggtgtccagttaaaactcagtgtactgccagattcgtctaaatgtctgtcatgtccagatttactttgcttctgttactgccagagttactagagatatcataataggataagaagaccctcatatgacctgcacagctcattttccttctgaaagaaactactacctaggagaatctaagctatagcagggatgatttatgcaaatttgaactagcttctttgttcacaattcagttcctcccaaccaaccagtcttcacttcaagagggccacactgcaacctcagcttaacatgaataacaaagactggctcaggagcagggcttgcccaggcatggtggatcaccggaggtcagtagttcaagaccagcctggccaacatggtgaaaccccacctctactaaaaattgtgtatatctttgtgtgtcttcctgtttatgtgtgccaagggagtattttcacaaagttcaaaacagccacaataatcagagatggagcaaaccagtgccatccagtctttatgcaaatgaaatgctgcaaagggaagcagattctgtatatgttggtaactacccaccaagagcacatgggtagcagggaagaagtaaaaaaagagaaggagaatactggaagataatgcacaaaatgaagggactagttaaggattaactagccctttaaggattaactagttaaggattaatagcaaaagatattaaatatgctaacatagctatggaggaattgagggcaagcacccaggactgatgaggtcttaacaaaaaccagtgtggcaaaaaaaaaaaaaaaaaaaaaaaaaaaaatcctaaaaacaaacaaacaaaaaaaacaattcttcattcagaaaaattatcttagggactgatattggtaattatggtcaatttaataatattttggggcatttccttacattgtcttgacaagattaaaatgtctgtgccaaaattttgtattttatttggagacttcttatcaaaagtaatgctgccaaaggaagtctaaggaattagtagtgttcccatcacttgtttggagtgtgctattctaaaagattttgatttcctggaatgacaattatattttaactttggtgggggaaagagttataggaccacagtcttcacttctgatacttgtaaattaatcttttattgcacttgttttgaccattaagctatatgtttagaaatggtcattttacggaaaaattagaaaaattctgataatagtgcagaataaatgaattaatgttttacttaatttatattgaactgtcaatgacaaataaaaattctttttgattattttttgttttcatttaccagaataaaaactaagaattaaaagtttgattacagtcaaa

SEQ ID NO: 188977 - DNA, 1926 bp, Artificial Sequence
  derived and/or modified sequence
cggcgagcaacgctggagcatcccgctctggtgccgctgcagccggcagagatggttgagctcatgttcccgctgttgctcctccttctgcccttccttctgtatatggctgcgccccaaatcaggaaaatgctgtccagtggggtgtgtacatcaactgttcagcttcctgggaaagtagttgtggtcacaggagctaatacaggagctcgagtatatttagcttgccgggatgtggaaaagggggaattggtggccaaagagatccagaccacgacagggaaccagcaggtgttggtgcggaaactggacctgtctgatactaagtctattcgagcttttgctaagggcttcttagctgaggaaaagcacctccacgttttgatcaacaatgcaggagtgatgatgtgtccgtactcgaagacagcagatggctttgagatgcacataggagtcaaccacttgggtcacttcctcctaacccatctgctgctagagaaactaaaggaatcagccccatcaaggatagtaaatgtgtcttccctcgcacatcacctgggaaggatccacttccataacctgcagggcgagaaattctacaatgcaggcctggcctactgtcacagcaagctagccaacatcctcttcacccaggaactggcccggagactaaaaggctctggcgttacgacgtattctgtacaccctggcacagtccaatctgaactggttcggcactcatctttcatgagatggatgtggtggcttttctcctttttcatcaagactcctcagcagggagcccagaccagcctgcactgtgccttaacagaaggtcttgagattctaagtgggaatcatttcagtgactgtcatgtggcatgggtctctgcccaagctcgtaatgagactatagcaaggcggctgtgggacgtcagttgtgacctgctgggcctcccaatagactaacaggcagtgccagttggacccaagagaagactgcagcagactacacagtacttcttgtcaaaatgattctccttcaaggttttcaaaacctttagcacaaagagagcaaaaccttccagccttgcctgcttggtgtccagttaaaactcagtgtactgccagattcgtctaaatgtctgtcatgtccagatttactttgcttctgttactgccagagttactagagatatcataataggataagaagaccctcatatgacctgcacagctcattttccttctgaaagaaactactacctaggagaatctaagctatagcagggatgatttatgcaaatttgaactagcttctttgttcacaattcagttcctcccaaccaaccagtcttcacttcaagagggccacactgcaacctcagcttaacatgaataacaaagactggctcaggagcagggcttgcccaggcatggtggatcaccggaggtcagtagttcaagaccagcctggccaacatggtgaaaccccacctctactaaaaattgtgtatatctttgtgtgtcttcctgtttatgtgtgccaagggagtattttcacaaagttcaaaacagccacaataatcagagatggagcaaaccagtgccatccagtctttatgcaaatgaaatgctgcaaagggaagcagattctgtatatgttggtaactacccaccaagagcacatgggtagcagggaagaagtaaaaaaagagaaggagaatactggaagataatgcacaaaatgaagggactagttaaggattaactagccctttaaggattaactagttaaggattaatagcaaaagatattaaatatgctaacatagctatggaggaattgagggcaagcacccaggactgatgaggtcttaacaaaaaccagtgtggcaaaaaaaaaaaaaaaaaaaaaaaaaaaaa

SEQ ID NO: 188978 - DNA, 957 bp, Artificial Sequence
  derived and/or modified sequence
atggtggagctgatgttccccctgctgctgctgctgctgcccttcctgctgtacatggccgccccccagatcagaaagatgctgagcagcggcgtgtgcaccagcaccgtgcagctgcccggcaaggtggtggtggtgaccggcgccaacaccggcatcggcaaggagaccgccaaggagctggcccagagaggcgccagagtgtacctggcctgcagagacgtggagaagggcgagctggtggccaaggagatccagaccaccaccggcaaccagcaggtgctggtgagaaagctggacctgagcgacaccaagagcatcagagccttcgccaagggcttcctggccgaggagaagcacctgcacgtgctgatcaacaacgccggcgtgatgatgtgcccctacagcaagaccgccgacggcttcgagatgcacatcggcgtgaaccacctgggccacttcctgctgacccacctgctgctggagaagctgaaggagagcgcccccagcagaatcgtgaacgtgagcagcctggcccaccacctgggcagaatccacttccacaacctgcagggcgagaagttctacaacgccggcctggcctactgccacagcaagctggccaacatcctgttcacccaggagctggccagaagactgaagggcagcggcgtgaccacctacagcgtgcaccccggcaccgtgcagagcgagctggtgagacacagcagcttcatgagatggatgtggtggctgttcagcttcttcatcaagaccccccagcagggcgcccagaccagcctgcactgcgccctgaccgagggcctggagatcctgagcggcaaccacttcagcgactgccacgtggcctgggtgagcgcccaggccagaaacgagaccatcgccagaagactgtgggacgtgagctgcgacctgctgggcctgcccatcgactag

SEQ ID NO: 188979 - DNA, 918 bp, Artificial Sequence
  derived and/or modified sequence
atggtggagctgatgttccccctgctgctgctgctgctgcccttcctgctgtacatggccgccccccagatcagaaagatgctgagcagcggcgtgtgcaccagcaccgtgcagctgcccggcaaggtggtggtggtgaccggcgccaacaccggcgccagagtgtacctggcctgcagagacgtggagaagggcgagctggtggccaaggagatccagaccaccaccggcaaccagcaggtgctggtgagaaagctggacctgagcgacaccaagagcatcagagccttcgccaagggcttcctggccgaggagaagcacctgcacgtgctgatcaacaacgccggcgtgatgatgtgcccctacagcaagaccgccgacggcttcgagatgcacatcggcgtgaaccacctgggccacttcctgctgacccacctgctgctggagaagctgaaggagagcgcccccagcagaatcgtgaacgtgagcagcctggcccaccacctgggcagaatccacttccacaacctgcagggcgagaagttctacaacgccggcctggcctactgccacagcaagctggccaacatcctgttcacccaggagctggccagaagactgaagggcagcggcgtgaccacctacagcgtgcaccccggcaccgtgcagagcgagctggtgagacacagcagcttcatgagatggatgtggtggctgttcagcttcttcatcaagaccccccagcagggcgcccagaccagcctgcactgcgccctgaccgagggcctggagatcctgagcggcaaccacttcagcgactgccacgtggcctgggtgagcgcccaggccagaaacgagaccatcgccagaagactgtgggacgtgagctgcgacctgctgggcctgcccatcgactag

SEQ ID NO: 188980 - protein, 314 aa, Artificial Sequence
  derived and/or modified sequence
MALAARLWRLLPFRRGAAPGSRLPAGTSGSRGHCGPCRFRGFEVMGNPGTFKRGLLLSALSYLGFETYQVISQAAVVHATAKVEEILEQADYLYESGETEKLYQLLTQYKESEDAELLWRLARASRDVAQLSRTSEEEKKLLVYEALEYAKRALEKNESSFASHKWYAICLSDVGDYEGIKAKIANAYIIKEHFEKAIELNPKDATSIHLMGIWCYTFAEMPWYQRRIAKMLFATPPSSTYEKALGYFHRAEQVDPNFYSKNLLLLGKTYLKLHNKKLAAFWLMKAKDYPAHTEEDKQIQTEAAQLLTSFSEKN

SEQ ID NO: 188981 - DNA, 3063 bp, Artificial Sequence
  derived and/or modified sequence
aaaccatgggggcggaagaggtgctgggcaggaggcggaagaggtgctgtgcaggaggcgggcgggcgcggttctttccggaaggattgaatctcctttagccccgcccgcctccgtagctgcctgaagtagtgcagggtcagcccgcaagttgcaggtcatggcgctggctgctcgactgtggcgccttctgcctttccgacgtggagccgccccggggtctcgtctccctgcggggacttcgggcagccgcgggcattgcggcccctgtcgattccgcggcttcgaggtaatgggaaacccaggaactttcaaaagaggccttttactctcagctttgtcgtatttgggttttgaaacttaccaggttatctctcaggctgctgtggttcatgccacagccaaagttgaagaaatacttgaacaagcagactacctgtatgaaagcggagaaacagaaaaactttatcagttgctaacccaatacaaggaaagtgaagatgcagagttactgtggcgtttggcacgggcatcacgtgatgtagctcagcttagcagaacctcagaagaggagaaaaagctattggtgtatgaagccctagagtatgcaaaaagagcactagaaaaaaatgaatcaagttttgcatctcataagtggtatgcaatctgccttagtgatgttggagattatgaaggcatcaaggctaaaattgcaaatgcatatatcatcaaggagcattttgagaaagcaattgaactgaaccctaaagatgctacttcaattcaccttatgggtatttggtgctatacatttgccgaaatgccttggtatcaaagaagaattgctaaaatgctgtttgcaactcctcctagttccacctatgagaaggccttaggctactttcacagggcagaacaagtggatccaaacttctacagcaaaaacttacttcttttaggaaagacatacttgaaactacacaacaaaaagcttgctgctttctggctaatgaaagccaaggactatccagcacacacagaggaggataaacagatacagacagaagctgctcagttgcttacaagtttcagtgagaagaattgagaacttttcagagaagatttatgaaatagctaataaacattgccttttcttttaattctaaacttaatatatgaactataactgttctacggctttttaaatgttgtgaccatttaaccgtgtaaatataaaatattctaggcttcttcacaaataatagggtaaaataaataatcgccataagagtggtagaaataaatctccatggctcaggcaaagagattattttgcatcctggataccagcaatgcaaaatggtatgagatttctaaggattgatcacattgggatgggagatcaagcaaagaaatatttgtagaggaggggaaatggatctataggggatatacagggggatggattttcaaattggattgattctaagttgaaatcttgaagagaaggtgtggtgacagtggttaggatgttgtgggttcctgacataaagtagttaaatgatatatcttggagctaacctgtgtaagtaaagaactaagtaaggagatgactaaaaatggagtagtttccttttttatttttttgagacagagtctcactttgtttcccaggctggtgtgcagtggcacaatctcggcccactgcagcctccgcctcccgggttcaagtgattctcctgccttagcctcctgagtggctgggattacagggttgtaccaccacactcggctaacttttgtatttttggtagagatggggttttgccatgttggctaggctggtctcaaactcctggcctcaagtgatctgcccgccttggcctcccaaattgctgggattacaggcgtgagccaccgcacctggccagtttactttaaatgtggtgtagtctcatggtaaactgaatttgtcatcagatgcaaagttctattccctaatggaatggaaggaacacaaaacttaagagtgaaatggaatactaagatgtttttaaataggcaggactatgctactcacttgaggctggagtgccaccactgcaaaatctttttaagttttgtaaaaaggagcatcttgaatccacttagataaagacagactgtgtgtgtaggtggatttttcccaaaggatttgggaattgtaatgttacaatgaactgtatggatatgtttgtcatgtacattttcaaacaaaaaggaaaactgaaagtagtgatctttgtatacccatctcttagattcagtgattttgctatataggttgtgtatcccttatctgaaatacttgggactagtagaagcatcttggatttgggatgtttttccaaattttggaatacctgcatacacacaataagatatcttggagatgggacccaagtttaaacacaaattcacttgtttcatatataccttatgcacatagcttgaaggtaactttatataacattatttttaataattttgtgcattgagaccaagtttgcataccttgaaccatcagaaagcaaaggtgtcattatctcagccactcatgtgggtaatttgtggttggttgatgtcaccatcattcctgactgaatgtatatgctaccaataagcagttattttcttatacttattcatgcataagtacttaacagtaaaaaatatgacataactcgcacaggaacaaggatggcaaaaaaaaaaatatgacacaccactgatacagtgaaaaaataatgtggtcagggtagctaggcaacagtagcatcaccagaaacctgtatcagctgttaaacggcaacaacaatggcaggctttcagtttcccacttaatgatgctgtattttaaaaggttattgtatactgtaattttatttttgtaggtgaagagaaacagaagcagctgaagggccaggaagtgggtctttctagggatgtggcattctgctggatggctttttaaaatgggttttttcctttagggagaccgaataaactgtgttgtgcacctgc

SEQ ID NO: 188982 - DNA, 945 bp, Artificial Sequence
  derived and/or modified sequence
atggctttggcagctagattgtggcggctcctcccctttcgccggggagcagctccgggatcccgcctcccagcaggaacttccgggagtagaggacattgcgggccatgccggtttcgggggttcgaagtgatggggaatccggggacttttaagcgaggcctgttactgtctgctctttcatatctgggatttgaaacctaccaagtgatctcgcaggccgccgtggttcacgccaccgcaaaggtagaggaaatcctggagcaagccgattacctgtatgaatcaggggagacagaaaagttatatcagctgctcacccagtataaggaaagtgaggacgctgaactactctggcggttagcgagagcaagccgggacgtagcacagctgtccaggacaagtgaggaagagaagaaactgcttgtgtacgaagccctagaatacgctaagcgcgcactcgagaagaatgagtctagcttcgccagccataaatggtatgccatttgcctcagcgatgtgggggattacgaggggatcaaggctaaaattgcgaatgcctatatcataaaggaacacttcgaaaaagcaattgaattgaacccgaaagatgcaacctctattcatttaatgggcatttggtgttacacattcgctgaaatgccatggtaccagagacgtatcgccaagatgctgtttgctacccccccctccagcacctacgagaaggctcttggctatttccatagggcggaacaagttgacccaaatttttactccaaaaatctgttacttctcggcaagacatacctgaagttgcataacaaaaagctggccgctttctggctgatgaaagccaaagattatcctgcccacacagaggaagacaagcaaattcagactgaagcagcccagctgttgacttccttttccgaaaagaattag

SEQ ID NO: 188983 - DNA, 945 bp, Artificial Sequence
  derived and/or modified sequence
atggccctggccgcccggctgtggaggctgctgcccttcagaagaggagctgcccctggcagccggctgcctgctggcaccagcggcagccggggccactgcggcccctgccgcttccggggctttgaggtgatgggcaaccctggcaccttcaagaggggcctgctgctgagcgccctgagctacctgggctttgagacctaccaggtgatcagccaggccgctgtggtgcacgccacagccaaggtggaggagatcctggagcaggccgactacctgtatgagagcggggagacagagaagctgtaccagctgctgacccagtacaaggagagtgaagatgctgagctgctgtggaggctggcccgggccagcagagatgtggcccagctgagcaggaccagcgaggaggagaagaagctgctggtgtatgaggccctggagtatgccaagagggccctggagaagaatgaaagcagctttgccagccacaagtggtacgccatctgcctgagtgatgtgggggactatgagggcatcaaggccaagatcgccaatgcctacatcatcaaggagcactttgagaaggccatcgagctgaaccccaaggatgccaccagcatccacctgatgggcatctggtgctacacctttgctgagatgccctggtaccagaggcgcatcgccaagatgctgtttgccaccccacccagcagcacctatgagaaggccctgggctacttccacagagctgagcaggtggaccccaacttctacagcaagaacctgctgctgctgggcaagacctacctgaagctgcacaacaagaagctggccgccttctggctgatgaaggccaaggactacccagcccacacagaggaggacaagcagatccagacagaagctgcccagctgctgaccagcttcagcgagaagaactag

SEQ ID NO: 188984 - DNA, 945 bp, Artificial Sequence
  derived and/or modified sequence
atggccctggccgcccggctgtggcggctgctgcccttccggcggggcgccgcgcctggatcacgtctgccggctgggacaagtggtagccgggggcactgtgggccatgtcggtttaggggttttgaggtcatgggaaatccaggcaccttcaaacgcgggctgctgctgagtgctctgagctacctgggctttgagacatatcaggtgatctctcaggccgctgtggttcacgccactgctaaagtagaggagatcctggaacaagccgactatctgtatgaatcaggagaaacagagaaactatatcagcttctaacccaatacaaggaaagcgaggatgctgagctgctgtggcgtctggcccgggcatcccgcgacgtggcgcagctgtcacgaaccagtgaggaagaaaaaaagctgctcgtgtacgaggcactagaatatgcgaagagagcccttgaaaaaaacgaatcctcctttgcgtctcataaatggtatgctatctgtttgtctgatgtgggcgactacgagggcataaaagcaaaaattgccaatgcttacatcatcaaggaacacttcgagaaagctattgagcttaatcccaaagacgccacctccatccatctcatgggcatctggtgttatacattcgccgagatgccctggtaccagcgcagaatcgcaaaaatgctgtttgccaccccccctagctcaacatatgagaaagccctgggctactttcatagagccgaacaggtagaccccaatttctattccaaaaaccttctccttctaggtaagacctacttgaaactgcacaataaaaaactcgccgccttctggctcatgaaagcaaaagattatcctgcccacactgaggaagacaagcaaatccagaccgaagcagcacaactcctgacatcattttctgaaaagaattag

SEQ ID NO: 188985 - DNA, 945 bp, Artificial Sequence
  derived and/or modified sequence
atggcactggccgcaaggctctggcgcttactacccttccgtcgaggagcagcccctggctcaagattgcccgctggcactagcgggagcaggggccattgcggcccttgtagattcaggggttttgaggtcatgggcaaccccggaactttcaagcgcggactgctgctctcggcactgagctatctcggctttgagacctaccaggtgatctcccaagccgcagtggtgcatgcaacagcaaaagtggaagagatcctggaacaggctgattatctgtacgaatcgggagagaccgagaagctgtaccagctgctgacccagtataaggaaagtgaggacgctgaattactctggcggctcgccagagcttctagggatgtcgctcagctcagccgaacgtcagaggaggagaagaagctcttggtctacgaagccttagagtacgccaagagggctctagagaaaaacgaatctagctttgcttcgcacaagtggtacgccatttgcctgagtgatgtgggagactacgaagggataaaggccaagatagcaaacgcctacattatcaaggagcacttcgagaaagcgatagagctcaaccccaaagacgcaactagcattcatctcatggggatctggtgctacacattcgctgaaatgccatggtaccagcgaagaatcgccaaaatgttattcgccacccccccttcatccacctatgagaaggcactggggtattttcaccgggctgagcaggtcgacccaaacttttatagtaagaatctgctcttgttgggaaaaacatatcttaaactgcataataaaaaactagcagcattctggctgatgaaagctaaagattaccctgcccacaccgaggaagataagcaaattcaaacggaggccgcacaactcctaacttcttttagtgaaaaaaattag

SEQ ID NO: 188986 - DNA, 945 bp, Artificial Sequence
  derived and/or modified sequence
atggccctggccgccagactgtggagactgctgcccttcagaagaggcgccgcccccggcagcagactgcccgccggcaccagcggcagcagaggccactgcggcccctgcagattcagaggcttcgaggtgatgggcaaccccggcaccttcaagagaggcctgctgctgagcgccctgagctacctgggcttcgagacctaccaggtgatcagccaggccgccgtggtgcacgccaccgccaaggtggaggagatcctggagcaggccgactacctgtacgagagcggcgagaccgagaagctgtaccagctgctgacccagtacaaggagagcgaggacgccgagctgctgtggagactggccagagccagcagagacgtggcccagctgagcagaaccagcgaggaggagaagaagctgctggtgtacgaggccctggagtacgccaagagagccctggagaagaacgagagcagcttcgccagccacaagtggtacgccatctgcctgagcgacgtgggcgactacgagggcatcaaggccaagatcgccaacgcctacatcatcaaggagcacttcgagaaggccatcgagctgaaccccaaggacgccaccagcatccacctgatgggcatctggtgctacaccttcgccgagatgccctggtaccagagaagaatcgccaagatgctgttcgccaccccccccagcagcacctacgagaaggccctgggctacttccacagagccgagcaggtggaccccaacttctacagcaagaacctgctgctgctgggcaagacctacctgaagctgcacaacaagaagctggccgccttctggctgatgaaggccaaggactaccccgcccacaccgaggaggacaagcagatccagaccgaggccgcccagctgctgaccagcttcagcgagaagaactag

SEQ ID NO: 188987 - protein, 265 aa, Artificial Sequence
  derived and/or modified sequence
MATLLRPVLRRLCGLPGLQRPAAEMPLRARSDGAGPLYSHHLPTSPLQKGLLAAGSAAMALYNPYRHDMVAVLGETTGHRTLKVLRDQMRRDPEGAQILQERPRISTSTLDLGKLQSLPEGSLGREYLRFLDVNRVSPDTRAPTRFVDDEELAYVIQRYREVHDMLHTLLGMPTNILGEIVVKWFEAVQTGLPMCILGAFFGPIRLGAQSLQVLVSELIPWAVQNGRRAPCVLNLYYERRWEQSLRALREELGITAPPMHVQGLA

SEQ ID NO: 188988 - protein, 151 aa, Artificial Sequence
  derived and/or modified sequence
MATLLRPVLRRLCGLPGLQRPAAEMPLRARSDGAGPLYSHHLPTSPLQKGLLAAGSAAMALYNPYRHDMVAVLGETTGHRTLKVLRDQMRRDPEGAQILQERPRISTSTLDLGKLQSLPEGSLGREYLRFLDVNVSFQLLCIWQSPDRTEE

SEQ ID NO: 188989 - DNA, 798 bp, Artificial Sequence
  derived and/or modified sequence
atggccacactgcttcggccggtattacggcgcctttgcggactccccggtctgcaacggcccgccgcggaaatgcccctgagggctcgcagtgatggcgccggaccattatacagccaccatctgcccacttcacctctccagaagggcctgctggcagcgggaagtgctgccatggcactgtataatccataccgtcatgatatggtcgccgtcctcggcgagactaccgggcaccggactcttaaggttttgcgggatcaaatgaggcgggaccccgagggcgcccagatcctacaggaacgcccccggatctcgactagtacattggacctgggaaaactacagagtctgcccgagggtagtctcggtagggaatacctgcggtttctggacgtgaaccgtgtgagtcccgatacaagggcacccaccaggttcgtagatgacgaggaactcgcctatgttatccagcgttatcgcgaagtgcatgacatgctgcatacactcttgggtatgccaacaaacattctgggggagatcgttgtgaaatggtttgaggctgttcagacagggctgcccatgtgcatcctgggcgcctttttcggtcccatccggctcggcgcccagtccctgcaggtcctcgtgtccgagctgatcccatgggctgttcagaatggccgccgcgcaccatgcgtactgaacctgtattatgagaggcgctgggagcaatcactgagagccttaagggaggagctgggaataacggcacctcctatgcatgttcagggtctggcctag

SEQ ID NO: 188990 - DNA, 798 bp, Artificial Sequence
  derived and/or modified sequence
atggccaccctgctgcggcctgtgctgcggcggctgtgtggcctgcccggcctgcagaggcctgctgctgagatgcccctgcgggcccggagtgatggagctggccccctgtacagccaccacctgcccaccagccccctgcagaagggcctgctggccgccggcagcgctgccatggccctgtacaacccctacagacatgacatggtggccgtgctgggggagaccaccggccacaggaccctgaaggtgctgcgggaccagatgaggcgggaccctgagggcgcccagatcctgcaggagcggccccgcatcagcaccagcaccctggacctgggcaagctgcagagcctgcctgagggcagcctgggccgggagtacctgcgcttcctggatgtgaacagagtgtccccagacacccgggcccccaccaggtttgtggatgatgaggagctggcctacgtgatccagcgctaccgggaggtgcatgacatgctgcacaccctgctgggcatgcccaccaacatcctgggggagatcgtggtgaagtggtttgaagctgtgcagacaggcctgcccatgtgcatcctgggcgccttcttcggccccatccggctgggcgcccagagcctgcaggtgctggtgtctgagctgatcccctgggccgtgcagaatggaagaagagccccctgtgtgctgaacctgtactatgaaagacgctgggagcagagcctgcgggccctgcgggaggagctgggcatcacagccccacccatgcacgtgcagggcctggcctag

SEQ ID NO: 188991 - DNA, 798 bp, Artificial Sequence
  derived and/or modified sequence
atggccaccctgctgcggcccgtgctgcggcggctgtgcggcctgccaggtctgcaacgcccggcagcagaaatgcccctgagggctcggtctgacggagccgggccactgtattcccaccacttgcccacctcccccctgcagaagggacttcttgccgcaggatccgccgctatggcactatacaacccatatcgccatgacatggtggcagtcctcggcgagacaaccgggcacaggacgctaaaagttctgcgcgaccaaatgcggcgagacccagagggggcacaaattctgcaagaacggccaagaatttcaaccagcaccctggacctgggcaagctgcaatcactgcctgaggggagtttgggacgggagtacctgagattcctcgacgtgaacagagtgtcacctgacactcgggccccaactaggtttgtcgacgatgaggagctggcttatgtgatacagcggtatagggaggtgcacgatatgctgcatacgctgcttggaatgcccactaatattttgggagaaatcgtagtgaaatggttcgaagccgtgcagacaggattgcctatgtgtatactgggagccttcttcggacctattcgcttgggtgctcagagtctgcaggtgctcgtgagcgaactcatcccctgggccgtgcaaaatgggaggcgcgccccctgtgtactgaatctgtattatgaacgcaggtgggaacagtcattgcgcgccctccgcgaagagctcggcatcacagcccctccaatgcacgtacagggactcgcctag

SEQ ID NO: 188992 - DNA, 798 bp, Artificial Sequence
  derived and/or modified sequence
atggctacactgctgagacccgttctacggcgactctgcggcctcccaggcctccagagaccagcagccgaaatgccactgcgtgccaggtcagatggggcaggtcccttgtactcccaccacctgcctacctctccccttcagaaaggcctcttagcagcgggaagcgcagcgatggcactgtacaatccatatcgtcacgatatggtggccgtcttgggggaaacaacagggcaccgtaccctcaaagtcctcagggaccagatgcgaagggacccagaaggcgctcagatcctacaagagcggcctcggatttctacttctacactagatctaggaaaactacagtcactcccagagggctcgctcggaagagagtacctgagattcctggatgtcaaccgggtgagccccgatactcgagcacccactaggttcgtcgatgatgaggaactagcttatgtaattcagcggtatcgtgaggtacacgatatgttgcacactttgctcgggatgccaaccaacatcctcggggaaattgtcgtcaagtggttcgaagccgtgcagactgggctgccaatgtgcatccttggggcatttttcggaccgatacgactgggcgctcaatctttacaggttttagtgagcgaactgatcccttgggccgtgcaaaacggtagaagagctccttgcgttttgaacctctactacgaaagaagatgggaacagagcctaagagctttaagagaggagttgggaatcaccgcgcctcctatgcacgtgcagggtcttgcctag

SEQ ID NO: 188993 - DNA, 1548 bp, Artificial Sequence
  derived and/or modified sequence
gggaaaaccggctgtggagaaggaaatagggcccggcgctgagtgagcgtggttgcgtgtcctttgcagacactttctggggcgaggtgacatggcgagagtcttggatcggtggacgtagacggtagacagttcgcgtgcgtttccttcgcctacttggcctacatgccttctgcccgtgaagcgatgtttcccctcgaaaggccgtaggctacgccgtcagaatcggtttttcagtgagttttgacccctccgacgctccgtcgcctgacagaatcgcggcgttcttcgtacccgcccatcctccgcggacgcccgctgccatggcgactctgctgcgccctgtcctccgtcggctctgcgggctcccgggcctacagcggcctgcggcagaaatgcccctccgggctaggagcgacggcgccggcccgctatactcgcaccacctccccacctccccgctgcagaaagggctgttggccgccggctccgcggcgatggcgctctataacccctaccgccacgacatggtcgcagttctaggggagaccacaggacaccgcaccctgaaggtcctcagggaccagatgaggagggatccagagggtgcccagatcctgcaggagcgtccccggatttcgacatccaccctcgacctgggcaagctccagagcctgccggaaggctccctcggtcgcgagtatctccgtttcctggatgtgaacagggtctccccagacacccgagcacccacccgcttcgtggatgatgaggagctagcgtatgtgattcagcggtaccgggaggtgcacgacatgcttcacaccctgctggggatgcccaccaacatcctgggggagatcgtggtgaaatggtttgaggctgtccagactggcctgcccatgtgcatcctgggtgcattctttggaccgatccgacttggcgctcagagcctgcaagtgctggtctcggagttgatcccatgggccgttcagaacgggcgcagagccccatgtgtcctcaacctgtactatgagcggcgctgggagcagtccctgagggctctgcgggaggagctgggcattacagcaccacccatgcacgtccagggcttggcctgagctcctgagccagcggggcctggcctacctcccccatcccctgcttcccttggaggcagagggctcccttgactacctttgttcctcttctttgaacactgacccttggacaacatttatcataatttgtcataaccactgctgagtggccttgaggacgaaccccgcagggagcaagcagtacagtggcattcccagggggaccagcagctacccaaggagaaccatgcatgaacagtatcagtcgtctgggctcatgctgggatgtcgcagtgctcctgttgcaactcctcccagccagccaggtttgctgggggccaggctgggtgtcctcacaggagtgagggctacacccaattccaaaagcctgagaagagagaagtggagggggaggcgagtgtgtgaataaaggctcccatcaggtcaa

SEQ ID NO: 188994 - DNA, 798 bp, Artificial Sequence
  derived and/or modified sequence
atggccaccctgctgagacccgtgctgagaagactgtgcggcctgcccggcctgcagagacccgccgccgagatgcccctgagagccagaagcgacggcgccggccccctgtacagccaccacctgcccaccagccccctgcagaagggcctgctggccgccggcagcgccgccatggccctgtacaacccctacagacacgacatggtggccgtgctgggcgagaccaccggccacagaaccctgaaggtgctgagagaccagatgagaagagaccccgagggcgcccagatcctgcaggagagacccagaatcagcaccagcaccctggacctgggcaagctgcagagcctgcccgagggcagcctgggcagagagtacctgagattcctggacgtgaacagagtgagccccgacaccagagcccccaccagattcgtggacgacgaggagctggcctacgtgatccagagatacagagaggtgcacgacatgctgcacaccctgctgggcatgcccaccaacatcctgggcgagatcgtggtgaagtggttcgaggccgtgcagaccggcctgcccatgtgcatcctgggcgccttcttcggccccatcagactgggcgcccagagcctgcaggtgctggtgagcgagctgatcccctgggccgtgcagaacggcagaagagccccctgcgtgctgaacctgtactacgagagaagatgggagcagagcctgagagccctgagagaggagctgggcatcaccgccccccccatgcacgtgcagggcctggcctag

SEQ ID NO: 188995 - protein, 250 aa, Artificial Sequence
  derived and/or modified sequence
MSIFTPTNQIRLTNVAVVRMKRAGKRFEIACYKNKVVGWRSGVEKDLDEVLQTHSVFVNVSKGQVAKKEDLISAFGTDDQTEICKQILTKGEVQVSDKERHTQLEQMFRDIATIVADKCVNPETKRPYTVILIERAMKDIHYSVKTNKSTKQQALEVIKQLKEKMKIERAHMRLRFILPVNEGKKLKEKLKPLIKVIESEDYGQQLEIVCLIDPGCFREIDELIKKETKGKGSLEVLNLKDVEEGDEKFE

SEQ ID NO: 188996 - DNA, 753 bp, Artificial Sequence
  derived and/or modified sequence
atgagtatctttacacccaccaaccagatcagattgaccaacgtcgcggtggtacgtatgaagcgtgccggcaaacggttcgaaattgcctgctacaagaacaaagtggtggggtggaggtcaggtgtggaaaaggacctagacgaggtgctgcaaacacactccgtattcgtcaacgtcagtaaaggccaggtggccaagaaggaagacctgatctctgcgtttggaacagatgatcagacagaaatttgcaagcagattttgaccaagggcgaggtacaggtgtcagacaaagagcgacacacacagcttgagcagatgtttagggatattgcaacaatcgtggccgacaaatgcgtcaatccagagacaaagcgcccctacacggtgatcctgatcgaacgagcaatgaaagatatccactattccgtcaaaacaaacaaatctacaaagcagcaggccttggaggtgattaagcagctgaaggagaagatgaagatagagcgcgcccatatgaggctgcgctttatcctaccagtgaatgagggaaagaagctcaaggaaaaactcaaacccttgatcaaagtaatcgagtccgaagattatggacagcaactggaaattgtctgcctgattgatccgggatgctttcgggagattgatgagctgatcaagaaggagacaaaagggaagggatctctggaagtgctcaatctgaaggacgtggaagagggtgacgaaaaatttgagtag

SEQ ID NO: 188997 - DNA, 753 bp, Artificial Sequence
  derived and/or modified sequence
atgagcatcttcacccccaccaaccagatccggctgaccaacgtggccgtggtgaggatgaagagagctgggaagagatttgaaattgcctgctacaagaacaaggtggtgggctggaggtctggagtggagaaggacctggatgaggtgctgcagacccacagcgtgtttgtgaatgtgtccaagggccaggtggccaagaaggaggacctgatcagcgcctttggaacagatgaccagacagagatctgcaagcagatcctgaccaagggggaggtgcaggtgtctgacaaggagcggcacacccagctggagcagatgttccgggacatcgccaccatcgtggccgacaagtgtgtgaaccctgagaccaagaggccctacaccgtcatcctgattgagcgggccatgaaggacatccactacagcgtgaagaccaacaagagcaccaagcagcaggccctggaggtgatcaagcagctgaaggagaagatgaagattgagcgggcccacatgaggctgcgcttcatcctgcctgtgaatgaaggcaagaagctgaaggagaagctgaagcccctcatcaaggtgattgaaagtgaggactatggccagcagctggagatcgtgtgcctgattgaccccggctgcttccgggagattgatgagctgatcaagaaggagaccaagggcaagggcagcctggaggtgctgaacctgaaggatgtggaggagggagatgagaagtttgaatag

SEQ ID NO: 188998 - DNA, 753 bp, Artificial Sequence
  derived and/or modified sequence
atgagcatcttcacccccaccaaccagatccggctgaccaacgtggccgtggtgaggatgaagcgggcgggcaaaaggtttgagatcgcttgttacaagaataaggtcgtgggatggaggtccggcgttgagaaagacctcgatgaagtcctccagactcactccgtctttgtcaatgtgtcgaagggacaggttgcaaagaaggaggacctgatttctgcattcgggactgacgaccagacagaaatatgtaaacagattctcacaaaaggagaagtccaggtctctgacaaagagcgacacacacagctagaacagatgtttagagatattgctaccattgtggccgacaaatgcgtgaatcccgagaccaagcgcccctataccgtcatcttgattgagcgtgcaatgaaagatattcactattccgtcaaaaccaataagagcaccaagcagcaagcactggaggtgatcaagcagcttaaagagaaaatgaagattgagcgtgcccacatgagactccgattcatccttcctgtcaacgaaggaaaaaaactgaaagaaaagctcaagcccctgattaaagtcatcgaatcggaggactatgggcagcagctggagattgtctgcctgatcgatccggggtgctttagagagatagatgagcttattaagaaggaaaccaagggaaagggatccttggaggtgttaaatctgaaggatgtagaggagggcgatgagaaatttgagtag

SEQ ID NO: 188999 - DNA, 753 bp, Artificial Sequence
  derived and/or modified sequence
atgagtatttttacgccaaccaatcagatacgccttactaatgtggctgttgtgcgcatgaagagggctggtaagagatttgagattgcttgctacaagaacaaagtggttggttggcgatctggggtggaaaaagacctggatgaggtcctccagactcactccgtcttcgtcaatgtgtctaagggacaagtggcgaaaaaggaggaccttattagcgcatttggcactgatgatcaaaccgagatttgtaagcagatcctcactaagggagaagtgcaagtgtctgacaaggagcggcatacccagttagagcagatgtttcgggacatagcaacgatcgttgcagacaaatgtgttaacccggaaactaaaaggccatacacagtcatactcattgaacgagcaatgaaggatatccattacagcgtgaagacaaataagtccactaaacagcaagccttggaagtgataaagcaactgaaggagaagatgaaaattgagcgggcacatatgaggctcagattcatcctcccggtgaatgagggcaagaagctgaaagaaaagctgaagccattaatcaaagtaattgaatctgaagattatgggcagcagctcgaaattgtctgtttaattgatccgggttgtttccgagaaatagatgagctgattaagaaagaaacaaaaggtaaaggcagtcttgaagtgttgaatctcaaagacgtcgaggagggtgatgagaaatttgagtag

SEQ ID NO: 189000 - DNA, 1631 bp, Artificial Sequence
  derived and/or modified sequence
gtaagtaagcctgccagacacactgtgacggctgcctgaagctagtgagtcgcggcgccgcgcactggtggttgggtcagtgccgcgcgccgatcggtcgttaccgcgaggcgctggtggccttcaggctggacggcgcgggtcagccctggttcgccggcttctgggtctttgaacagccgcgatgtcgatcttcacccccaccaaccagatccgcctaaccaatgtggccgtggtacggatgaagcgtgccgggaagcgcttcgaaatcgcctgctacaaaaacaaggtcgtcggctggcggagcggcgtggaaaaagacctcgatgaagttctgcagacccactcagtgtttgtaaatgtttctaaaggtcaggttgccaaaaaggaagatctcatcagtgcgtttggaacagatgaccaaactgaaatctgtaagcagattttgactaaaggagaagttcaagtatcagataaagaaagacacacacaactggagcagatgtttagggacattgcaactattgtggcagacaaatgtgtgaatcctgaaacaaagagaccatacaccgtgatccttattgagagagccatgaaggacatccactattcggtgaaaaccaacaagagtacaaaacagcaggctttggaagtgataaagcagttaaaagagaaaatgaagatagaacgtgctcacatgaggcttcggttcatccttccagtcaatgaaggcaagaagctgaaagaaaagctcaagccactgatcaaggtcatagaaagtgaagattatggccaacagttagaaatcgtatgtctgattgacccgggctgcttccgagaaattgatgagctaataaaaaaggaaactaaaggcaaaggttctttggaagtactcaatctgaaagatgtagaagaaggagatgagaaatttgaatgacacccatcaatctcttcacctctaaaacactaaagtgtttccgtttccgacggcactgtttcatgtctgtggtctgccaaatacttgcttaaactatttgacattttctatctttgtgttaacagtggacacagcaaggctttcctacataagtataataatgtgggaatgatttggttttaattataaactggggtctaaatcctaaagcaaaattgaaactccaagatgcaaagtccagagtggcattttgctactctgtctcatgccttgatagctttccaaaatgaaagttacttgaggcagctcttgtgggtgaaaagttatttgtacagtagagtaagattattaggggtatgtctatacaacaaaagggggggtctttcctaaaaaagaaaacatatgatgcttcatttctacttaatggaacttgtgttctgagggtcattatggtatcgtaatgtaaagcttggatgatgttcctgattatctgagaaacagatatagaaaaattgtgccggacttacctttcattgaacatgctgccataacttagattattcttggttaaaaaataaaagtcacttatttctaattcttaaagtttataatatatattaatatagctaaaattgtatgtaatcaataaaaccactcttatgtttattaaactatggcttgtgtttctagacaa

SEQ ID NO: 189001 - DNA, 753 bp, Artificial Sequence
  derived and/or modified sequence
atgagcatcttcacccccaccaaccagatcagactgaccaacgtggccgtggtgagaatgaagagagccggcaagagattcgagatcgcctgctacaagaacaaggtggtgggctggagaagcggcgtggagaaggacctggacgaggtgctgcagacccacagcgtgttcgtgaacgtgagcaagggccaggtggccaagaaggaggacctgatcagcgccttcggcaccgacgaccagaccgagatctgcaagcagatcctgaccaagggcgaggtgcaggtgagcgacaaggagagacacacccagctggagcagatgttcagagacatcgccaccatcgtggccgacaagtgcgtgaaccccgagaccaagagaccctacaccgtgatcctgatcgagagagccatgaaggacatccactacagcgtgaagaccaacaagagcaccaagcagcaggccctggaggtgatcaagcagctgaaggagaagatgaagatcgagagagcccacatgagactgagattcatcctgcccgtgaacgagggcaagaagctgaaggagaagctgaagcccctgatcaaggtgatcgagagcgaggactacggccagcagctggagatcgtgtgcctgatcgaccccggctgcttcagagagatcgacgagctgatcaagaaggagaccaagggcaagggcagcctggaggtgctgaacctgaaggacgtggaggagggcgacgagaagttcgagtag

SEQ ID NO: 189002 - protein, 244 aa, Artificial Sequence
  derived and/or modified sequence
MFRRKLTALDYHNPAGFNCKDETEFRNFIVWLEDQKIRHYKIEDRGNLRNIHSSDWPKFFEKYLRDVNCPFKIQDRQEAIDWLLGLAVRLEYGDNAEKYKDLVPDNSKTADNATKNAEPLINLDVNNPDFKAGVMALANLLQIQRHDDYLVMLKAIRILVQERLTQDAVAKANQTKEGLPVALDKHILGFDTGDAVLNEAAQILRLLHIEELRELQTKINEAIVAVQAIIADPKTDHRLGKVGR

SEQ ID NO: 189003 - DNA, 1064 bp, Artificial Sequence
  derived and/or modified sequence
cgccgtcatttcggagcgactcagcgcctgcccgccctctcgccgcgtcgccggtgcctgcgcctcccgctccacctcgcttcttctctcccggccgaggcccgggggaccagagcgagaagcggggaccatgttccgacgcaagttgacggctctcgactaccacaaccccgccggcttcaactgcaaagatgaaacagaatttagaaacttcatcgtttggcttgaagaccagaaaatcaggcactacaagattgaagacagagggaatttaagaaacatccacagcagcgactggcccaagttctttgaaaagtatctcagagatgttaactgtcctttcaagattcaagatcgacaagaagctattgactggcttcttggtttagctgttagacttgaatatggagataatgctgaaaaatacaaggatttagtacctgataattcaaaaactgctgacaatgcaactaaaaatgcagaaccattgatcaatttggatgtaaataatcctgattttaaggctggtgtgatggctttggctaacctgcttcagattcagcgtcatgatgattacctggtaatgcttaaggcaattcggattttggttcaggagcgcctgacacaggatgcagttgctaaggcaaatcaaacaaaagagggcttacctgttgctttagacaaacatattcttggttttgacacaggagatgcagttcttaatgaagctgctcaaattctgcgattgctgcacatagaggagctcagagagctacagacaaaaatcaacgaagccatagtagctgttcaggcaattattgctgatccaaagacagaccacagactgggaaaagttggaagatgaacacttgaggacttcagcttctcacctacttagtacagttgggaaccatacacttctggcatgtttggaaatcaaaatgtcacattctcgggggaggaagcccagaaaattgggtatgttctagagatttaccaccattgcttattgcttttttctttaataaagtttaggaaagtagaatttttaaaaaaaaaaaaaa

SEQ ID NO: 189004 - DNA, 735 bp, Artificial Sequence
  derived and/or modified sequence
atgtttcgtaggaagttgactgcactggattaccataaccctgccggctttaattgcaaggacgagactgaattccgcaactttatcgtttggctggaggaccagaaaatacggcattacaagatagaagataggggaaatcttcgtaacatccactctagcgactggcccaaatttttcgaaaagtacttgcgggacgtcaactgcccctttaagatccaagaccggcaggaagctatcgactggctactggggttagctgttcggctggagtatggagacaatgccgagaagtacaaggacctagtccccgataactcaaaaactgccgacaacgccaccaagaacgctgagccactgatcaacctagatgtgaacaacccagattttaaggccggggttatggccctcgccaatcttttgcagattcaacgccacgacgactatcttgtgatgctcaaggcaataagaatattagtgcaggagaggcttactcaggatgctgtcgctaaggctaaccagaccaaggaggggctgcccgtcgcccttgataagcacattctgggttttgacacgggagacgcagtattgaatgaggccgcccagattttgcggctgctccatatcgaggaacttagagagttgcaaactaagatcaatgaggccatcgttgccgttcaggctatcatcgccgacccaaaaacagatcataggctgggcaaagtgggtaggtag

SEQ ID NO: 189005 - DNA, 735 bp, Artificial Sequence
  derived and/or modified sequence
atgttccggaggaagctgacagccctggactaccacaacccagctggcttcaactgcaaggatgaaacagagttcaggaacttcatcgtgtggctggaggaccagaagatccgccactacaagattgaagatcggggcaacctgaggaacatccacagcagtgactggcccaagttctttgagaagtacctgagagatgtgaactgccccttcaagatccaggaccggcaggaggccatcgactggctgctgggcctggccgtgcggctggagtatggagacaatgctgagaagtacaaggacctggtgcctgacaacagcaagacagctgacaatgccaccaagaatgctgagcccctcatcaacctggatgtgaacaacccagacttcaaggccggcgtgatggccctggccaacctgctgcagatccagagacatgatgactacctggtgatgctgaaggccatccgcatcctggtgcaggagcggctgacccaggatgctgtggccaaggccaaccagaccaaggagggcctgcctgtggccctggacaagcacatcctgggctttgacacaggagatgctgtgctgaatgaggccgcccagatcctgcggctgctgcacatcgaggagctgcgggagctgcagaccaagatcaatgaggccatcgtggccgtgcaggccatcatcgctgaccccaagacagaccaccggctgggcaaggtgggccgctag

SEQ ID NO: 189006 - DNA, 735 bp, Artificial Sequence
  derived and/or modified sequence
atgttccggcggaagctgaccgccctggactaccacaaccccgccggtttcaattgcaaggatgaaacggagtttcgcaacttcatagtttggttagaggaccagaaaatccgtcactacaagatcgaggataggggcaacctgagaaatattcattcctctgattggcctaagtttttcgaaaaatatctaagggatgtgaactgtccttttaaaattcaggaccgccaggaggccatcgactggttgctgggattagctgtgcgcctagagtatggggacaacgccgaaaagtacaaagatttggtgcctgataactcaaagaccgccgataacgcaactaaaaatgcggagcccctgatcaacctcgatgtgaacaacccggactttaaggccggtgtaatggccctcgccaacctgcttcagatccagagacacgatgattatttggtaatgctcaaagcaatacgcatattagtgcaagagcggctgacacaagatgctgtagccaaggctaatcagaccaaggaggggttacctgtcgccctggataagcatatccttggattcgatactggcgacgccgttcttaatgaagctgcccagatcctcaggctgctgcatatcgaggaactgagagagttgcaaaccaagattaatgaggcgattgttgccgtgcaggccatcattgcagacccaaagaccgatcatcgtttggggaaggtggggcggtag

SEQ ID NO: 189007 - DNA, 735 bp, Artificial Sequence
  derived and/or modified sequence
atgttccgcagaaaacttacggcccttgattaccataatcctgccggatttaactgcaaggatgagacagagttccggaattttattgtgtggttagaagaccagaagatccggcactataagattgaggatagggggaatttgagaaacatccactctagcgattggcccaaattttttgaaaagtaccttcgcgatgttaactgccctttcaagattcaggacagacaggaggcgattgattggttgctcggtctggctgtgcggctggaatacggtgacaatgcagagaaatacaaggatcttgtacctgataactcaaagacagctgacaatgccacgaaaaatgcagagcctctgattaatctggatgttaataatcctgacttcaaagccggtgtcatggcactcgcgaatttacttcagatacagcggcacgatgactatcttgtaatgctgaaagcaattcgaattttggtgcaagagcgcttaacccaagatgcagtggcgaaggctaaccagacaaaggaagggttgccagtcgcactggacaaacacatcctgggcttcgacacaggtgacgcagtgctgaatgaggcagcccagattcttcggctgctgcatattgaggaactgcgagagctccaaacaaagatcaatgaggccatcgtagccgtgcaagccataatcgcagatccaaaaacagaccatcgcctggggaaagtgggcagatag

SEQ ID NO: 189008 - DNA, 1080 bp, Artificial Sequence
  derived and/or modified sequence
gcggccaccgcttttaagccacgattggcgaaggccgccgtcatttcggagcgactcagcgcctgcccgccctctcgccgcgtcgccggtgcctgcgcctcccgctccacctcgcttcttctctcccggccgaggcccgggggaccagagcgagaagcggggaccatgttccgacgcaagttgacggctctcgactaccacaaccccgccggcttcaactgcaaagatgaaacagaatttagaaacttcatcgtttggcttgaagaccagaaaatcaggcactacaagattgaagacagagggaatttaagaaacatccacagcagcgactggcccaagttctttgaaaagtatctcagagatgttaactgtcctttcaagattcaagatcgacaagaagctattgactggcttcttggtttagctgttagacttgaatatggagataatgctgaaaaatacaaggatttagtacctgataattcaaaaactgctgacaatgcaactaaaaatgcagaaccattgatcaatttggatgtaaataatcctgattttaaggctggtgtgatggctttggctaacctgcttcagattcagcgtcatgatgattacctggtaatgcttaaggcaattcggattttggttcaggagcgcctgacacaggatgcagttgctaaggcaaatcaaacaaaagagggcttacctgttgctttagacaaacatattcttggttttgacacaggagatgcagttcttaatgaagctgctcaaattctgcgattgctgcacatagaggagctcagagagctacagacaaaaatcaacgaagccatagtagctgttcaggcaattattgctgatccaaagacagaccacagactgggaaaagttggaagatgaacacttgaggacttcagcttctcacctacttagtacagttgggaaccatacacttctggcatgtttggaaatcaaaatgtcacattctcgggggaggaagcccagaaaattgggtatgttctagagatttaccaccattgcttattgcttttttctttaataaagtttaggaaagtagaa

SEQ ID NO: 189009 - DNA, 735 bp, Artificial Sequence
  derived and/or modified sequence
atgttcagaagaaagctgaccgccctggactaccacaaccccgccggcttcaactgcaaggacgagaccgagttcagaaacttcatcgtgtggctggaggaccagaagatcagacactacaagatcgaggacagaggcaacctgagaaacatccacagcagcgactggcccaagttcttcgagaagtacctgagagacgtgaactgccccttcaagatccaggacagacaggaggccatcgactggctgctgggcctggccgtgagactggagtacggcgacaacgccgagaagtacaaggacctggtgcccgacaacagcaagaccgccgacaacgccaccaagaacgccgagcccctgatcaacctggacgtgaacaaccccgacttcaaggccggcgtgatggccctggccaacctgctgcagatccagagacacgacgactacctggtgatgctgaaggccatcagaatcctggtgcaggagagactgacccaggacgccgtggccaaggccaaccagaccaaggagggcctgcccgtggccctggacaagcacatcctgggcttcgacaccggcgacgccgtgctgaacgaggccgcccagatcctgagactgctgcacatcgaggagctgagagagctgcagaccaagatcaacgaggccatcgtggccgtgcaggccatcatcgccgaccccaagaccgaccacagactgggcaaggtgggcagatag

SEQ ID NO: 189010 - protein, 239 aa, Artificial Sequence
  derived and/or modified sequence
MAYQSLRLEYLQIPPVSRAYTTACVLTTAAVQLELITPFQLYFNPELIFKHFQIWRLITNFLFFGPVGFNFLFNMIFLYRYCRMLEEGSFRGRTADFVFMFLFGGFLMTLFGLFVSLVFLGQAFTIMLVYVWSRRNPYVRMNFFGLLNFQAPFLPWVLMGFSLLLGNSIIVDLLGIAVGHIYFFLEDVFPNQPGGIRILKTPSILKAIFDTPDEDPNYNPLPEERPGGFAWGEGQRLGG

SEQ ID NO: 189011 - DNA, 720 bp, Artificial Sequence
  derived and/or modified sequence
atggcctaccagagcctgagactggagtacctgcagatcccccccgtgagcagagcctacaccaccgcctgcgtgctgaccaccgccgccgtgcagctggagctgatcacccccttccagctgtacttcaaccccgagctgatcttcaagcacttccagatctggagactgatcaccaacttcctgttcttcggccccgtgggcttcaacttcctgttcaacatgatcttcctgtacagatactgcagaatgctggaggagggcagcttcagaggcagaaccgccgacttcgtgttcatgttcctgttcggcggcttcctgatgaccctgttcggcctgttcgtgagcctggtgttcctgggccaggccttcaccatcatgctggtgtacgtgtggagcagaagaaacccctacgtgagaatgaacttcttcggcctgctgaacttccaggcccccttcctgccctgggtgctgatgggcttcagcctgctgctgggcaacagcatcatcgtggacctgctgggcatcgccgtgggccacatctacttcttcctggaggacgtgttccccaaccagcccggcggcatcagaatcctgaagacccccagcatcctgaaggccatcttcgacacccccgacgaggaccccaactacaaccccctgcccgaggagagacccggcggcttcgcctggggcgagggccagagactgggcggctag

SEQ ID NO: 189012 - DNA, 4209 bp, Artificial Sequence
  derived and/or modified sequence
gctggcggaaggggaaatggggtgggtggggggtggggcaggcgacggtggggaagatggcgtaccagagcttgcggctggagtacctgcagatcccaccggtcagccgcgcctacaccactgcctgcgtcctcaccaccgccgccgtgcagttggaattgatcacaccttttcagttgtacttcaatcctgaattaatctttaaacactttcaaatatggagattaatcaccaacttcttattttttgggccagttggattcaattttttatttaacatgatttttctatatcgttactgtcgaatgctagaagaaggctctttccgaggtcggacagcagactttgtatttatgttcctttttggtggattcttaatgaccctttttggtctgtttgtgagcttagttttcttgggccaggcctttacaataatgctcgtctatgtgtggagccgaaggaacccctatgtccgcatgaacttcttcggccttctcaacttccaggccccctttctgccctgggtgctcatgggattttccttgttgttggggaactcaatcattgtggaccttttgggtattgcagttggacacatatattttttcttggaagatgtatttcccaatcaacctggtggaataagaattctgaaaacaccatctattttgaaagctatttttgatacaccagatgaggatccaaattacaatccactacctgaggaacggccaggaggcttcgcctggggtgagggccagcggcttggaggttaaagcagcagtgccaataatgagacccagctgggaaggactcggtgatacccactgggatcttttatcctttgttgcaaaagtgtggacacttttgacagcttggcagattttaactccagaagcactttatgaaatggtacactgactaatccagaagacatttccaacagtttgccagtggttcctcactacactggtactgaaagtgtaatttcttagagccaaaaaactggagaaacaaatatcctgccacctctaacaagtacatgagtacttgatttttatggtataaggcagagccttttcttcctcttcttgatagatgaggccatggtgtaaatggaagtttcagagaggacaaaataaaacggaattccatttttctctcactgtattaaagcttttgtgtgtgatcttttaaattctgataatgtattgtagccctcctgcgtagatctgagctcagaacagtttacacagctgttcttcctgtgtcttcacaacttttaactggatttcatttcaggattggaaatacgtggctgtcatgctgtggttgtgtacatcttactaactcagaatgcaagattcagcaggaagatgatttatttctgtcatctggataggttgttttgcatctgggttttgccaaactttgtcagacaacatgaaaaaaaaggagggaggatggttcttgtagcagtaggaattcagctataggaaagtcagctgtaagctaatgtggcatcttatttgctttacttacatttctccattaagaagtatccagggaaagattggtaagggccacatttttgtaaaactaggaagattttcattagactttttttttcttttatttttaaaaaagttttaattaaaaatttttttttaaatacagatggggtctcactgtgttgcccaggctggtcttgaactcctggactcaagcaatcctcccacctcagcctcccaaagtgctaggatgacaggcatgagccaccatgcccagccattttttttttttttgccttttttgttttgttttgttttttgtttttttaattaaaaaaaaaaaatagagacagggtctcagattttcattagatttggaaaccaagttagaatgttgactttggagccagacgaacagataccagttagctaggcatatgttcttccagggtctttggctagttaacattagtcatttgcttcgtgaaaattcaagaaccttttcagagccaagtacctggattaccttcccaatcaggtagaaattagacagggtccacagaagtagacacttaatgctgtggttcaataaatacttcccctaaatattaagtcttccctgagtctcagcaggtttgcattcacactgcttaagtaacttccagaacctggaagagtcgaaagagcacccctaggaaagagatgattccaaacagctttcattaacggcatgtaggcacaggtccctttcccaaaagtggattgttagtagtagttcattcaacctttgttaaggggtagctttccagaatgtgacattgtcctcagaaagatagacataggcttaaacataatggacatcctaaataggaattttcagattgtttttgaagtgaaaagtgttttaatgtctttaaatggaattgcataactaatggtatttaagtattttacatgttgctaataactttgaatatgattgttgcaattttatggaacctgggtctatgggactgctttttaagcagtttaaaaaaggttttcaaagtttaaaagccaatcttagcatgtataatccttatgggattcttaagttttatcctatcttgtttttgctcaagaacgctttatcagtgacgtttgttagaattttgttttttgttttttttttttaaattgtttttgggctagaaatgagtttctctagttttatttgttctccctgagttggagttatgcaatgaatggcatttttgtggtaaaatactaatcctaaaatctgttaactcactgttcatttaagtagggaatatctgtatacattaatgactaggtaaaacaggaaatacattttgaatatacagcctaaaggcaggcagttacagggtttttgatttctccgattttatagggtgcaagttcccagtggcaggatgccctgctgtgtgactgactacactgtgtcctgagcagtggtaatttcaatcacctctcatcagtttggccagccctacaaccaccattcctagccctgtgttgcttgacaggatacctgtgcttgaatggacataaggaaaagtccttactttctccccaatttacctctcaatcttagttcttccagaacacacttccctttcacaatgcaaataaactgaaagtgagatttgatacatggaattttgagaccaaccaactaaccttacacataatttgagggattcctggattcttctagtgatactgaaaagcacacttgactaaagcatagtgttttttgtttgttatggaaatacggtatacgttcatttaaaaataaatggacatacaaattgcatctccttaggagatacattttatatacatttcggtgcgtttttttccagtatggatttctatttgtttctctcttcctcttgttttttctgtgtcactcttgtatgtcctcatatctttcatacctcttgtgtagtctctagaagcagaacacctaagtcctgggtctggataatgaaaccctcagtctctggggcctctgaaaataaggaagcattggagctattgccatgttgagtaatgggcttcctagaactattgtcatctatcctgccagtgttttatgttgtagctgtttttctttgacaggtgagttccagctatgttgttagtcatgatcctgccattattttctgtgttctgtaggatgtctccaggctacttaaacatattttatgagtttgcaataaaattgttgaatcttgtatgatcaagtcactcctctgctcagaaatccacagtgacttcttagtaagcccctacattatatgcatacttgtttttttcttaactttactcccacttctacctaacagggacctcaacttaagtctcttcagttcttcaaggcctggccttgttcctgattcctcaaaaaatcttgactctaaggcctattttattgtctgtctctgaatccctataaagcttcaagtctgtatgacattcttaacgccaaattatatattgtcttgtactgttcctagctggtacatgtatattagtcttgtctccctcatgagaatgtaagctccttaagggcagggaccatgtcttaatttttgtatccaccacagtgcctagcacagtgcttggcacatgggtgctgaataaatacctttgtttattgatcagcaaagta

SEQ ID NO: 189013 - DNA, 720 bp, Artificial Sequence
  derived and/or modified sequence
atggcttatcagagtctgcgactggagtacctgcaaattccccctgtgtcacgcgcgtataccaccgcctgcgtcctaactaccgctgccgtgcagctggagctcattactccttttcaactgtactttaaccctgagcttatcttcaaacattttcagatatggcggctcattaccaacttcctattctttgggcccgtggggtttaactttctgtttaatatgatttttttgtaccggtactgtcgaatgctggaagaaggatccttccggggtaggacggccgactttgtgttcatgttcctgttcggggggttcctcatgacccttttcgggctgtttgtcagcctcgttttcctgggccaggcatttacaataatgctagtctacgtatggtcgcgtagaaatccttatgtgagaatgaatttcttcggcctccttaacttccaagctccttttctcccatgggtgctcatggggttctcactgctcttgggcaattctatcatcgtggatctgctcgggatagccgtgggacatatttacttctttctggaggacgtattccccaaccaaccgggaggcatcaggatcctaaagacgcccagcatccttaaggccatttttgataccccggatgaggaccccaattataaccccctgcctgaagagagacctggcggtttcgcatggggagaaggccaaaggttaggcgggtag

SEQ ID NO: 189014 - DNA, 720 bp, Artificial Sequence
  derived and/or modified sequence
atggcctaccagagcctgcggctggagtacctgcagatcccccctgtgtcccgggcctacaccacagcctgtgtgctgaccacagctgctgtgcagctggagctgatcacccccttccagctgtacttcaaccctgagctgatcttcaagcacttccagatctggaggctcatcaccaacttcctgttcttcggccctgtgggcttcaacttcctgttcaacatgatcttcctgtaccgctactgcaggatgctggaggagggcagcttccggggccgcacagctgactttgtgttcatgttcctgtttggaggcttcctgatgaccctgtttggcctgtttgtgtccctggtgttcctgggccaggccttcaccatcatgctggtgtatgtgtggagcagaagaaacccctacgtgaggatgaacttcttcggcctgctgaacttccaggcccccttcctgccctgggtgctgatgggcttcagcctgctgctgggcaacagcatcatcgtggacctgctgggcattgctgtgggccacatctacttcttcctggaggatgtgttccccaaccagcccggcggcatccgcatcctgaagacccccagcatcctgaaggccatctttgacaccccagatgaggaccccaactacaaccccctgcctgaggagaggcctgggggctttgcctggggcgagggccagaggctgggcggctag

SEQ ID NO: 189015 - DNA, 720 bp, Artificial Sequence
  derived and/or modified sequence
atggcctaccagagcctgcggctggagtacctgcagatcccccccgtctccagggcctatacaaccgcctgcgttttgaccacagcagccgtgcagctggaactgattacaccttttcagctgtacttcaatccagagttgattttcaaacatttccaaatctggaggctgataaccaatttcctgtttttcggccctgttggctttaactttctgtttaacatgatctttttataccggtactgcagaatgcttgaagaaggaagtttcagaggaagaacagctgattttgttttcatgtttctgttcggtggattcttgatgacactcttcggtctgtttgtctcattggtgttcctgggccaagcatttactataatgctggtgtacgtgtggagccggcggaatccttacgtacgtatgaacttttttggactcctcaactttcaggcaccgttcctgccatgggtgctcatgggtttttcgctgctgttaggtaacagtatcatagtcgatcttttagggatcgccgtcggtcatatttactttttcttggaagacgtgttcccgaatcagccagggggcattcgtatccttaaaactccatcaatccttaaagccatcttcgatacacccgatgaagatcctaactataatcctctgcccgaagaacggcccggagggttcgcatggggagaggggcagaggctagggggctag

SEQ ID NO: 189016 - DNA, 720 bp, Artificial Sequence
  derived and/or modified sequence
atggcttatcagagcctgaggcttgaatatttacaaatccctccagtcagtagggcatacaccacagcctgtgttttaacaactgccgctgtgcagctggaacttattaccccgtttcaactgtattttaatcctgagttaatttttaagcatttccagatatggcgcctcatcacaaattttctcttttttggccctgtggggttcaactttctgttcaatatgattttcctctacagatattgtcggatgctggaggagggttcatttcgagggcgtacagcagactttgtgttcatgttcctcttcggtgggtttttgatgacactatttgggctattcgtgagtttagtgtttctcgggcaggcatttacgatcatgctcgtatacgtgtggtcccgccgaaatccttacgtgcgaatgaacttcttcggacttctgaactttcaagcaccttttctgccatgggtgctgatggggtttagtctcctacttgggaatagtatcatcgtagacctgctaggcatagccgtcggccatatttactttttcctggaagatgtatttcccaaccagcccggaggaattcggatcctgaagactccgtcaatcctaaaagcaatcttcgacacccctgatgaggaccctaactataatcctctgccagaggaacggccaggtgggttcgcctggggcgagggccaaaggttaggaggatag

SEQ ID NO: 189017 - DNA, 720 bp, Artificial Sequence
  derived and/or modified sequence
atggcatatcagtcactgagacttgagtatcttcagatcccacctgtatctagagcgtataccaccgcgtgtgtactaacgactgccgccgtgcagctagagctcattacaccttttcagctttatttcaaccctgagttaatcttcaaacacttccagatatggcgcctgataactaactttctcttctttggccccgtgggttttaatttcctcttcaatatgatcttcctttatcgttactgccgcatgctcgaggagggcagctttaggggaaggactgctgatttcgtctttatgttccttttcggtggtttcctgatgacactctttggcctgtttgtgtctctggtctttctaggtcaggcttttacaataatgctcgtatacgtttggtcccgcaggaatccttatgttagaatgaatttcttcggtttgctgaactttcaggcgccattcctgccttgggttctgatgggcttcagcctgctgttaggcaactcaatcatagtggacctgctaggaatcgctgtcggtcacatttatttctttctagaggatgtcttccctaaccaaccagggggaattaggatcttaaagactccttctatcttgaaagccatcttcgacactcccgatgaggatcccaattacaatccactgcccgaggaaagacccggaggatttgcctggggagaggggcagcggctgggcggctag

SEQ ID NO: 189018 - DNA, 720 bp, Artificial Sequence
  derived and/or modified sequence
atggcctaccagtctctccgcttggaatacctgcagatccctcccgtttcacgagcatacaccaccgcctgcgtcctcaccactgccgccgtccaactggaattgatcaccccatttcagctctattttaaccctgagctaatttttaagcacttccagatatggagactaattactaactttttgttcttcggacctgttggcttcaattttctttttaacatgattttcctatatcggtactgccgtatgctagaggaaggtagttttcgcgggcgtaccgccgattttgtatttatgttcctttttgggggcttccttatgacattgtttggactgtttgtgtccttagtatttctcggacaggcgtttaccataatgcttgtgtatgtctggtcccgtcgcaacccctacgtcagaatgaacttctttggattgctgaattttcaggccccatttcttccttgggtactcatgggatttagtctgctcttgggcaatagcatcatcgttgaccttctaggaatcgccgttggacatatttacttttttttggaagacgtttttcccaaccagcccgggggcatcagaatactgaaaacgccatctattctgaaggcaatttttgatacaccagacgaggatccaaattataacccgttgcctgaagagagacccggagggttcgcctggggagagggacagcggcttggaggctag

SEQ ID NO: 189019 - RNA, 720 nt, Artificial Sequence
  derived and/or modified sequence
auggcauaucagucacugagacuugaguaucuucagaucccaccuguaucuagagcguauaccaccgcguguguacuaacgacugccgccgugcagcuagagcucauuacaccuuuucagcuuuauuucaacccugaguuaaucuucaaacacuuccagauauggcgccugauaacuaacuuucucuucuuuggccccguggguuuuaauuuccucuucaauaugaucuuccuuuaucguuacugccgcaugcucgaggagggcagcuuuaggggaaggacugcugauuucgucuuuauguuccuuuucggugguuuccugaugacacucuuuggccuguuugugucucuggucuuucuaggucaggcuuuuacaauaaugcucguauacguuuggucccgcaggaauccuuauguuagaaugaauuucuucgguuugcugaacuuucaggcgccauuccugccuuggguucugaugggcuucagccugcuguuaggcaacucaaucauaguggaccugcuaggaaucgcugucggucacauuuauuucuuucuagaggaugucuucccuaaccaaccagggggaauuaggaucuuaaagacuccuucuaucuugaaagccaucuucgacacucccgaugaggaucccaauuacaauccacugcccgaggaaagacccggaggauuugccuggggagaggggcagcggcugggcggcuag

SEQ ID NO: 189020 - RNA, 720 nt, Artificial Sequence
  derived and/or modified sequence
auggccuaccagucucuccgcuuggaauaccugcagaucccucccguuucacgagcauacaccaccgccugcguccucaccacugccgccguccaacuggaauugaucaccccauuucagcucuauuuuaacccugagcuaauuuuuaagcacuuccagauauggagacuaauuacuaacuuuuuguucuucggaccuguuggcuucaauuuucuuuuuaacaugauuuuccuauaucgguacugccguaugcuagaggaagguaguuuucgcgggcguaccgccgauuuuguauuuauguuccuuuuugggggcuuccuuaugacauuguuuggacuguuuguguccuuaguauuucucggacaggcguuuaccauaaugcuuguguaugucuggucccgucgcaaccccuacgucagaaugaacuucuuuggauugcugaauuuucaggccccauuucuuccuuggguacucaugggauuuagucugcucuugggcaauagcaucaucguugaccuucuaggaaucgccguuggacauauuuacuuuuuuuuggaagacguuuuucccaaccagcccgggggcaucagaauacugaaaacgccaucuauucugaaggcaauuuuugauacaccagacgaggauccaaauuauaacccguugccugaagagagacccggaggguucgccuggggagagggacagcggcuuggaggcuag

SEQ ID NO: 189021 - protein, 275 aa, Artificial Sequence
  derived and/or modified sequence
MAEPASVAAESLAGSRARAARTVLGQVVLPGEELLLPEQEDAEGPGGAVERPLSLNARACSRVRVVCGPGLRRCGDRLLVTKCGRLRHKEPGSGSGGGVYWVDSQQKRYVPVKGDHVIGIVTAKSGDIFKVDVGGSEPASLSYLSFEGATKRNRPNVQVGDLIYGQFVVANKDMEPEMVCIDSCGRANGMGVIGQDGLLFKVTLGLIRKLLAPDCEIIQEVGKLYPLEIVFGMNGRIWVKAKTIQQTLILANILEACEHMTSDQRKQIFSRLAES

SEQ ID NO: 189022 - DNA, 828 bp, Artificial Sequence
  derived and/or modified sequence
atggccgagcccgccagcgtggccgccgagagcctggccggcagcagagccagagccgccagaaccgtgctgggccaggtggtgctgcccggcgaggagctgctgctgcccgagcaggaggacgccgagggccccggcggcgccgtggagagacccctgagcctgaacgccagagcctgcagcagagtgagagtggtgtgcggccccggcctgagaagatgcggcgacagactgctggtgaccaagtgcggcagactgagacacaaggagcccggcagcggcagcggcggcggcgtgtactgggtggacagccagcagaagagatacgtgcccgtgaagggcgaccacgtgatcggcatcgtgaccgccaagagcggcgacatcttcaaggtggacgtgggcggcagcgagcccgccagcctgagctacctgagcttcgagggcgccaccaagagaaacagacccaacgtgcaggtgggcgacctgatctacggccagttcgtggtggccaacaaggacatggagcccgagatggtgtgcatcgacagctgcggcagagccaacggcatgggcgtgatcggccaggacggcctgctgttcaaggtgaccctgggcctgatcagaaagctgctggcccccgactgcgagatcatccaggaggtgggcaagctgtaccccctggagatcgtgttcggcatgaacggcagaatctgggtgaaggccaagaccatccagcagaccctgatcctggccaacatcctggaggcctgcgagcacatgaccagcgaccagagaaagcagatcttcagcagactggccgagagctag

SEQ ID NO: 189023 - DNA, 828 bp, Artificial Sequence
  derived and/or modified sequence
atggctgaaccagcaagtgttgccgcggaatctctagccggctcccgcgctcgggcggctcgcaccgtgctgggacaggtcgtcctcccaggcgaggagttactccttccagagcaggaagacgccgaaggcccaggcggggccgtagaaaggcctctttcactcaacgcacgagcctgtagcagagtccgggtcgtatgtggacctggtctaagacggtgcggcgatcggttgttggtaacaaagtgcggcagactgaggcataaagagccagggtctggcagcggcggcggggtctactgggtagactcccagcaaaagcgctacgtgccagttaaaggcgaccacgtgatcggcatcgttacagccaaatctggtgatatatttaaggtcgacgtgggcggatctgaacctgcttccttatcttatttatctttcgagggggccaccaaacgcaaccgaccgaatgttcaggtcggcgatttgatctatggccagtttgtggtggctaataaggacatggagccagaaatggtttgcatcgactcttgcgggcgggcaaatgggatgggcgtcatcggtcaggacggcttactctttaaagtgacattaggactgattagaaaactgcttgctccagactgcgagataatccaggaggtgggcaagttataccctcttgagattgtttttggaatgaatggtcggatctgggtaaaagccaaaacaatccagcaaaccttgattttggcaaacattctggaagcctgcgagcatatgacctcagaccagagaaaacaaatcttctcccgtctcgcggaatcctag

SEQ ID NO: 189024 - DNA, 828 bp, Artificial Sequence
  derived and/or modified sequence
atggccgagcccgcctctgtggccgctgagagcctggccggcagccgggcccgggccgccaggacagtgctgggccaggtggtgctgcccggggaggagctgctgctgcctgagcaggaggatgctgagggccctggaggagctgtggagcggcccctgagcctgaatgcccgggcctgcagccgggtgcgggtggtgtgtggccctggcctgcggcgctgtggggaccggctgctggtgaccaagtgtggccgcctgcggcacaaggagcccggcagcggcagcggcggcggcgtgtactgggtggacagccagcagaagagatatgtgcctgtgaagggggaccacgtgattggcatcgtgacagccaagagcggggacatcttcaaggtggatgtgggcggcagcgagcccgccagcctgagctacctgagctttgagggcgccaccaagaggaaccggcccaacgtgcaggtgggggacctgatctacggccagtttgtggtggccaacaaggacatggagcctgagatggtgtgcatcgacagctgtggccgggccaacggcatgggcgtgattggccaggacggcctgctcttcaaggtgaccctgggcctcatcaggaagctgctggccccagactgtgagatcatccaggaggtgggcaagctgtaccccctggagatcgtgtttggcatgaatggccgcatctgggtgaaggccaagaccatccagcagaccctcatcctggccaacatcctggaggcctgtgagcacatgaccagtgaccagaggaagcagatcttcagccggctggccgagagctag

SEQ ID NO: 189025 - DNA, 828 bp, Artificial Sequence
  derived and/or modified sequence
atggccgagcccgccagcgtggccgccgagagcctggccggcagcagggccagggcggcaagaaccgtcttgggacaggtcgtactgccaggggaagagctattattacccgagcaggaggatgccgaaggtcccgggggcgcagtggaacgaccactctcactgaatgcgagagcctgcagccgcgtgcgcgtagtgtgtggccctgggctgcgtcgatgtggtgaccggctgctcgtcaccaagtgcggaagacttaggcacaaggagcccggatcgggctcaggcggcggcgtctattgggtggactcccagcaaaagaggtatgtcccggtaaaaggggaccatgtcattggcatagttaccgcgaagagtggcgatatcttcaaggttgacgtggggggatcggagccggcctccctgtcctatctgtccttcgagggcgcgaccaagcgcaataggccgaacgtccaggtcggcgacctcatttatggtcagttcgttgttgccaataaagacatggagcctgaaatggtttgtattgacagttgtggcagagctaatggtatgggagtgatcggacaggacggtctgctctttaaggttaccctcggacttatcaggaaattactcgctcccgattgtgaaatcatacaggaggtgggcaaactctaccctcttgagatcgttttcggtatgaacggaaggatctgggttaaggccaagacaatccagcagactttgatccttgcaaacatcttggaagcttgtgaacatatgacaagtgatcagcggaagcagatattttccagactcgccgagtcctag

SEQ ID NO: 189026 - DNA, 828 bp, Artificial Sequence
  derived and/or modified sequence
atggccgaaccggctagtgtggctgccgagtcccttgctggaagcagagctagagccgctaggaccgtgcttggccaggtggttctgcccggagaagagctacttttgcctgaacaggaggatgccgaaggcccaggaggcgcagtggagcgaccactctctctgaatgctcgcgcatgttctcgcgtcagggtagtgtgcggcccaggcctccgccgttgtggggaccggttgttggtgacaaagtgcggcagactgcgccataaagaaccgggaagtggtagcggtgggggagtgtattgggtggactcacagcagaaacgatatgtgccagttaagggcgaccatgtgatcggcatcgtcaccgccaaatccggggacattttcaaagtggatgttggcggaagcgagcccgcatccctttcctacctgtcattcgagggggcaactaagagaaaccggcctaacgtgcaagtcggcgatttgatttatggacagttcgtcgtggcaaacaaagatatggagcctgaaatggtctgtattgattcgtgtggacgagccaatgggatgggggtgatcgggcaagatgggttactctttaaggtaaccctgggccttatccgaaagctgttggcgcctgattgcgagatcatccaggaggtgggaaagctgtaccccctggaaatcgtgttcggaatgaacgggcgaatttgggtgaaggcaaagaccattcaacagaccctgatactcgccaatatattggaagcctgcgagcacatgacatctgaccaaagaaaacaaatcttctcaagacttgccgagagctag

SEQ ID NO: 189027 - DNA, 1568 bp, Artificial Sequence
  derived and/or modified sequence
ggtggagcccgcgatggccgaacctgcgtctgtcgcggctgaatctctcgcgggcagcagggcgcgcgctgcacgcacagtactaggtcaggtggtgctcccgggtgaggagctgctcctgccggaacaggaggacgcggaaggccctgggggtgcagtggagcgaccgttgagcctgaatgctagagcgtgctcgcgggtgcgcgttgtatgcggtccgggccttcggcgctgtggggaccgcctgctggtcaccaagtgcggccgcctccgtcacaaggagcccggcagtggcagcggcggcggtgtttactgggtggactctcagcagaagcggtatgttccagtaaaaggagaccatgtgattggcatagtgacagctaaatctggagatatattcaaagttgatgttggagggagtgagccagcttctttgtcttacttgtcatttgaaggtgcaactaaaagaaacagaccaaatgtgcaggttggagatctcatctatggccagtttgtggttgctaataaagacatggaaccagagatggtctgtattgacagctgtggacgagccaatggaatgggtgtcattggacaggatggtctgctttttaaagtgactctgggcttaattagaaagctattagctccagattgtgaaatcatacaggaagtgggaaaactctatccactggagatagtatttggaatgaatggaagaatatgggttaaggcaaaaaccatccagcagactttaattttggcaaacattttagaagcttgtgaacacatgacgtcagatcaaagaaaacagatcttctccagattggcagaaagttgatataggtggacttttttacaggtcagttgaggcaaaaaactatgggttttttcaggtgaacctcccccatttaaatactcagaagataaggtgtgaatgtatgtattattagagtccgaaagtatttttataagttactggttttcacccacgcttttgtgggagagaaaatcattgcaaaatcattttttttgttcggtacaataaagtttactaaaaaacagtattagggtttatttggagttaactcccttagtaattgctacagcttccataattaactggaggtcagcagtaaaataattttgtgattataacagtaagccaggttcaccagaggaaatgtggaatacctaagtataaagcagcaaagaaatgtcacctgtagtcccattattcagcgggtgagtatataacaacgaaatactttttcatttaccaagtattgtgttttgcatggattaactcctttattctaactgcagaagacacttatcctcataattgaaactgaggcacagaatttaacttggcctacattctctatattcatcaaattgaaattatagttattatagcttatatgccactttgtaatatacttttgtctacttcaaacagcatgatacatttcacaactttagtcacatatttcatgttacaggatatttttgagttttatcattatataaataacactatgaggatttctgaatccaaatctggc

SEQ ID NO: 189028 - protein, 314 aa, Artificial Sequence
  derived and/or modified sequence
MLVSGRRRLLTVLLQAQKWPFQPSRDMRLVQFRAPHLVGPHLGLETGNGGGVINLNAFDPTLPKTMTQFLEQGEATLSVARRALAAQLPVLPRSEVTFLAPVTRPDKVVCVGMNYVDHCKEQNVPVPKEPIIFSKFASSIVGPYDEVVLPPQSQEVDWEVELAVVIGKKGKHIKATDAMAHVAGFTVAHDVSARDWQMRRNGKQWLLGKTFDTFCPLGPALVTKDSVADPHNLKICCRVNGEVVQSGNTNQMVFKTEDLIAWVSQFVTFYPGDVILTGTPPGVGVFRKPPVFLKKGDEVQCEIEELGVIINKVV

SEQ ID NO: 189029 - DNA, 945 bp, Artificial Sequence
  derived and/or modified sequence
atgctcgttagcggtcgtcggaggctgctgacagtcctactccaggcacagaaatggcccttccagccaagcagggacatgcggctggttcagttcagagcaccccacctggtggggcctcatcttgggttggagactgggaatggtgggggggtgatcaacctgaatgcgtttgacccaaccctgcctaagacaatgacacagttcttagagcagggagaagctacgctctcagttgcgagacgtgcactggctgctcagctccccgtactgccacgtagtgaagtgacttttctcgcccctgtgactagacccgataaagtagtttgcgttggcatgaactacgtggaccactgtaaagaacagaatgttccggtccccaaagaacctatcattttctccaagtttgcctcaagcatcgttggaccgtacgacgaggtcgttcttcctcctcagtcccaggaagttgactgggaagtcgaacttgcagtcgtcatcggcaaaaaaggcaagcacatcaaagctacggacgctatggcacacgtcgccggtttcacggtggcgcatgacgtgagtgctcgggattggcaaatgcggagaaacgggaaacagtggttgttagggaaaacctttgatacattctgtcccttaggccctgccctggttactaaagattctgtcgctgatcctcataatctcaagatctgttgccgcgtgaacggtgaggtggtccaaagtggaaataccaatcagatggtattcaaaacagaagatcttatcgcatgggtgtctcaatttgtgacattttatcccggagacgtgattctgacaggcaccccccccggggtaggagtgttcagaaagccacccgttttcttgaagaaaggtgatgaagtgcagtgcgagattgaggaactgggagttatcatcaacaaagtggtgtag

SEQ ID NO: 189030 - DNA, 945 bp, Artificial Sequence
  derived and/or modified sequence
atgctggtgtctggaagaagaaggctgctgactgtgctgctgcaggcccagaagtggcccttccagcccagccgggacatgaggctggtgcagttccgggccccccacctggtgggcccccacctgggcctggagactggaaatggaggaggagtcatcaacctgaatgcctttgaccccaccctgcccaagaccatgacccagttcctggagcagggcgaggccaccctgtctgtggcccggcgggccctggccgcccagctgcctgtgctgcccaggtctgaggtgaccttcctggcccctgtgaccaggccagacaaggtggtgtgtgtgggcatgaactacgtggaccactgcaaggagcagaatgtgcctgtgcccaaggagcccatcatcttcagcaagtttgccagcagcatcgtgggcccctatgatgaggtggtgctgcccccccagagccaggaggtggactgggaggtggagctggccgtggtgattggcaagaagggcaagcacatcaaggccacagatgccatggcccacgtggccggcttcaccgtggcccatgatgtgtctgcccgggactggcagatgagaagaaatggcaagcagtggctgctgggcaagacctttgacaccttctgccccctgggccctgccctggtgaccaaggacagcgtggccgacccccacaacctgaagatctgctgccgggtgaatggagaggtggtgcagagcggcaacaccaaccagatggtgttcaagacagaagatctcatcgcctgggtgtcccagtttgtgaccttctacccaggagatgtgatcctgaccggcaccccacctggggtgggcgtcttcaggaagccccctgtgttcctgaagaagggagatgaggtgcagtgtgaaattgaggagctgggcgtcatcatcaacaaggtggtgtag

SEQ ID NO: 189031 - DNA, 945 bp, Artificial Sequence
  derived and/or modified sequence
atgctggtgagcggccggcggcggctgctgaccgtgctgctgcaggcacagaaatggccattccagccttccagggatatgcgactggtccagtttcgtgcacctcaccttgttggaccgcacttaggattagagactggtaatgggggaggtgtaattaacctcaatgctttcgacccgacactgccaaagacaatgactcaattccttgagcaaggcgaggcgacattgtcagtggccaggcgggccctggcggcccagctccccgtcctcccacgctctgaggtgacgtttttggcgcccgtgactcggcctgataaagtcgtttgcgtgggcatgaattatgtggaccactgtaaggagcagaacgttcctgtgcctaaagaacccataatctttagtaagttcgcttcaagcattgtgggcccatatgatgaagttgtcctccccccacagagtcaggaagtggactgggaagttgagctggcagtggtgataggcaagaaaggtaaacatatcaaggccactgacgctatggcacacgtggcaggatttactgtcgcgcatgatgtcagtgcgcgtgattggcagatgcggcggaacgggaaacagtggctgctgggtaagaccttcgacactttctgtccgctaggacccgcgctggtgacgaaggacagtgtggctgacccacataatctcaagatatgctgccgagtgaacggcgaggttgtccagtccggcaacactaaccaaatggtctttaaaaccgaggatctcattgcttgggtgagccagttcgtgaccttctaccccggcgacgtgatcctcacaggaacccctcctggtgtaggagtctttaggaagcctcccgtgttcctcaagaaaggcgacgaggtgcagtgcgagatagaagaattgggcgtgatcataaataaagtcgtgtag

SEQ ID NO: 189032 - DNA, 945 bp, Artificial Sequence
  derived and/or modified sequence
atgctggtatctggcagacggaggttgcttaccgtgttgctgcaggcccagaagtggccatttcagcctagcagggacatgcgcctggtacaattcagggcccctcacctggtgggccctcatctcgggttggagaccggcaacggaggaggagtcatcaacctgaacgcctttgaccccacactgcctaagacaatgacccagttcttggaacaaggtgaagctacgctcagtgtcgcaaggcgagcactcgccgctcagctcccagttttgccacggtccgaagtcaccttcttggctcctgtgacccgcccagataaagtcgtatgtgtgggaatgaactacgtggaccattgtaaagagcagaacgtgccagtcccaaaggaaccgatcattttttctaagtttgcctcctctattgtgggcccatatgatgaggtagtcctacctccacagagccaggaagttgattgggaggtcgagctagccgtggtgattgggaagaagggaaagcacatcaaggccacagatgccatggcacatgttgccggttttacggttgctcacgacgtttctgcccgtgattggcagatgaggagaaatggcaagcaatggctgctcggaaagactttcgacacattctgccccctagggcctgccctagtgaccaaagacagcgtggcagaccctcacaacctcaagatctgctgtagagtgaatggagaagtagtgcagagcggtaataccaatcagatggtgttcaagactgaagacctgattgcatgggtgagtcagtttgttaccttctaccctggggatgtgattctcacgggcacgcctcctggggtgggagtgttccgtaagcctcccgtgttcctaaagaaaggagatgaggtgcagtgtgagattgaggagctgggagtgattattaacaaagtcgtgtag

SEQ ID NO: 189033 - DNA, 945 bp, Artificial Sequence
  derived and/or modified sequence
atgctggtgagcggcagaagaagactgctgaccgtgctgctgcaggcccagaagtggcccttccagcccagcagagacatgagactggtgcagttcagagccccccacctggtgggcccccacctgggcctggagaccggcaacggcggcggcgtgatcaacctgaacgccttcgaccccaccctgcccaagaccatgacccagttcctggagcagggcgaggccaccctgagcgtggccagaagagccctggccgcccagctgcccgtgctgcccagaagcgaggtgaccttcctggcccccgtgaccagacccgacaaggtggtgtgcgtgggcatgaactacgtggaccactgcaaggagcagaacgtgcccgtgcccaaggagcccatcatcttcagcaagttcgccagcagcatcgtgggcccctacgacgaggtggtgctgcccccccagagccaggaggtggactgggaggtggagctggccgtggtgatcggcaagaagggcaagcacatcaaggccaccgacgccatggcccacgtggccggcttcaccgtggcccacgacgtgagcgccagagactggcagatgagaagaaacggcaagcagtggctgctgggcaagaccttcgacaccttctgccccctgggccccgccctggtgaccaaggacagcgtggccgacccccacaacctgaagatctgctgcagagtgaacggcgaggtggtgcagagcggcaacaccaaccagatggtgttcaagaccgaggacctgatcgcctgggtgagccagttcgtgaccttctaccccggcgacgtgatcctgaccggcaccccccccggcgtgggcgtgttcagaaagccccccgtgttcctgaagaagggcgacgaggtgcagtgcgagatcgaggagctgggcgtgatcatcaacaaggtggtgtag

SEQ ID NO: 189034 - DNA, 945 bp, Artificial Sequence
  derived and/or modified sequence
atgctcgtgagtggccgacgtcgtcttctgacagtcctgctccaggcccaaaaatggccctttcagccatctcgcgatatgaggctcgttcagttcagagccccacatctagtcgggccacacctgggtctggagacaggaaatggtggtggagtgattaatctcaatgccttcgacccaacactccccaagactatgacccagtttctagagcagggggaggcgacactgtccgtggcccggagggctctcgccgcacagctgccagtgttaccccgatccgaggttaccttccttgctcctgtcactcgaccagataaagtggtgtgcgtgggcatgaactacgttgatcactgcaaggaacagaacgtgcctgtgcctaaggaaccaataatctttagtaagttcgcctcgtcgattgttggtccatacgatgaggtggtgttgccacctcaaagtcaggaggtagattgggaggtcgagcttgctgtggtcatcggcaagaaaggaaagcacatcaaggcgaccgacgcaatggcccacgtcgccggtttcaccgttgcccacgacgtctccgccagagattggcagatgcggaggaacggcaagcagtggctactgggaaagacattcgacaccttctgcccactgggacccgccctcgttaccaaagattcagtagccgacccccacaacttaaagatatgttgtagagtcaacggagaggtggtacaatctggcaacaccaaccagatggtcttcaaaacagaggacctaatcgcatgggtgtcgcagtttgtgaccttctaccctggggacgtcattctgactggcacaccaccaggggttggcgtctttagaaaacctccagtgttcctcaaaaaaggcgatgaggtccagtgtgaaatcgaggagctaggcgtgatcattaataaagttgtgtag

SEQ ID NO: 189035 - DNA, 4757 bp, Artificial Sequence
  derived and/or modified sequence
ccggccgagtggccctgggttagcagctgctgcatttccccggctggctgcggtcactggtggcagtgctcaggcgcccgccgcccttgaccttcggccccgcgagctctaaccctacagcgcaggaagatcggccgccgcggccaggctctgatgctggtgtctggtagaagaaggttactcacagttctgctgcaggctcagaagtggccctttcaaccctccagagacatgagactagtgcagttccgggcaccccacctggtggggcctcacttgggcctggagacagggaatggtggaggggttatcaacctcaatgcctttgaccccacactcccgaagacgatgacgcagttcctagagcagggagaggccaccctctcagtggcaagaagagccctggctgcccagttgccagtcctaccacggtcggaggtaaccttcctggctccagtcacacgaccagataaggtggtgtgtgtgggcatgaattatgtggaccactgcaaagaacagaacgtgcccgtgcccaaggagcccatcatcttcagcaagtttgccagctccatcgtggggccctatgatgaggtggtcctcccaccacagagccaggaggtagattgggaagtggagctggccgtggtcattggaaagaaaggcaagcacatcaaggccacagatgctatggcccacgtggccggcttcactgtggctcatgacgtgagtgctcgtgactggcaaatgagacgtaatgggaaacaatggctgctgggaaaaaccttcgacaccttctgccctctgggccctgccttggtgaccaaggacagtgtagcagatccacacaacttaaagatctgctgccgagtgaatggggaagtggtccagagcggcaacaccaaccagatggtattcaagacagaggacctgatagcctgggtctcccagtttgttaccttttacccaggggatgtcatcctaactgggacccccccaggtgtcggtgtattcaggaaacctcctgtctttctcaagaagggggatgaagtccagtgtgagattgaagaactaggtgtcatcatcaacaaggtggtgtgatggctcctgcacaggccctgcacataggatgagggcatctgctcccactcagcctagcccagggaaaggcccagtgacaggtgtggacaggtgccagccctgcaagccgcctcttctcggtagaagggagaaggacagagctctcttcaataaattcgtcaggtcaaagcagcagctttgcttctgctgtttgtcttcttttgggctttgtttcatgggacaagttggggcattttgtgggactggggaagaagagagcaaatacacacacatatgccaaaaagatgctgctgggctggggaaaagacaattcgtgtcgtccccttgtttatcacatcaaagaagggaaaaagcaagagatggcaagggacaatcaagcctcaatgattatatttatagctaagggtttgcagcctcctctccatcttctggctctaggacacagctgtgttctggggctcagaagtctcagcacaggctccttctcacagttctagctacaagtgaactgccggatgaactgttctagtttttcctgattgtccaggctggcaaaagtaggggacaggtggagcctggggcctgcagggctcggcgtctgctgcagaacctgggccatggaagatgggccgtgagtgcactcaccacagggactgtgtccacatggcccaggggccaggcctgtcccccagaaacctgccttgagacctctgaccccttaggcctcagtgtttgagtgcaaatgctgcctcaaagcagccccaataccccacctagaaggatgagccagtgatttgggagaccaagaggcaggaaaccatcccaccttctccaacccatcaccacgtctattgctggaagacaccaagtaaatcccagggtcttaatgaggcaccatcaggccagccctgtggggtgatgggaacatagctgggtttccctgagccactctattggggtgggagcagggggacagaagatggtgacactggctcctctcacccctaggtctctgaaggtccagatagcactgatggcaagctttgggtctgcacactctggaaagaagagagaagtgaaggctctaggtagggaggacagggagacactgggcacaggcttctctcctcttgtttaaagaagcccagggagggatagatctccgactggacagaagactactctgcagcccgccttcctagagttgggttgtcactgtccggcagggggcagcagccaccagcaaacaccactgcctgcaggagcctgggctgactggttgggactcaccaaagatcccttcttcctgggcggtggcctgcaggaactggaacagctgttggagaggagaagaaaaagaagacatcaaaaagaaaatctagtgctgggtggatatagagtatgaagatgtggagctgggaaaacagaggatgtggtgggatggggaaggaaaggttgtggaaggcctgcaccccgtctcagttcctccactgcttcgtcccagattctgtttttgttttcctgaatcagacttagtctccctccattctcccgtcccctgtgtgcccccatcctggtcctgcctcactggacagcctctccgcggccttcctcctccctgctccagaattctacttggtgccccccaaccccactcgactcattgtccacctggcctctgaggccaggcaccctcattcccctctcccacccaccccacccaaggaagcccagcacagaccatctcatctcactccaccatcacttctttgccaaatgcatttccaaacaccctcatgagctttgctgatctctttgccatctctccctgccccactccgatggctcctcctgcctggtgaagactgccctgggtatcccagaactgaacctgcagcagccagcacagctgaccttggggcgataagcagccagggaaaggctttcttaaaaaaaaacaaaaaacaaaaccaataactcagtaagcagattaaacaaaggtagagacggagccctccacccctctcacacactcatcctcacacccagctataccacaccccacaaatgttgcttatgtttccttggtcattctgtccatcctcctgtctgtccaaagccaaggacactgctctactctaaattttttgtcccgaagcccccaaatactgcaaccctgacccaatgcacgaagccaccccaaaatacagcagaggacaccaggactttcattttccctcagtatggcccatcctttgggtatgccaactccatgtccaccaagcactgcatgtaggacagggcacagtttggaggccttggtccagccactgccccagacccaccttggctctctcctcactaacacccgagaagcccagacttcccagtgtttagcaacagattaaactctaagccaacaacaacagaacagggtggagtgagtggaaagcaaatgaaatgttaaaaaaaaaaaaaaagcaatacttgcattctcattagtaggaacatgtgagatgaagcatgttatgttattaggcattctcttgattcggtaaacacaagctgaataaatttataaatatcagcattaagcgagatttaacggggagctgtttatcttctgcctgtcaggcaggcggcaacactctccatgtatcactcgccagccgtgcagtcctcactctcttgcccaggtaagctggggaagagcctgctgccgcccagctctggttgtggaagggctggcaccaaggagctgcgagcttacctcaactcatctcacctcaccatgccggctgcgaggcggcccgtgcagtccgtgcgcaggaggtcacactcccatgctgcatcccagcccctccagaagcagagcatgacctgggtgactttgaggatgctatttaacctctctaagctaaagctcctcgactgcagcatcaacagatcagtgccgacctgttaaggccgtcgagagcatcaaatgctactgttcagcaggtgcctgacacatagtaggtccacaagcaaatgattttcctgcttgcatcatttctagcacagagctggaggaaatggcgaggtgcaggtggccgctgggccctgctgttctacatgggagcaagacagctgctaggtgaaggggaatgaccaggcagccacagggaggacatgtggcctcaggaagcctgggtgtgtatcctggttctgctaggaacacgtgtggggctttgtgtgggtgactctctggctccccaagcctccctttcctactgttatatccttaaagtgcctctgaggccaaagcctttgtggcaattgtcaaatgagtccatatgcagtgagtaccgtgttgagggaggacaaggtcaccaagagctgagaatgtttctccgactgatgagacctagatattgggtacatggaggtccccggtccctttgtgattcctgcagcctgttgcctccttgcctggaccccgcctcagctcagaaagccaattccctagattccaaaggccttcccagaccaattagcatgtcctgcagctgtcagctccctgtgcctagcctggacctcagctcatgtctagcacccagtctcccaaccccacacatattcacaaataaaagaaaataacaaatgacatgaattcttca

SEQ ID NO: 189036 - DNA, 1366 bp, Artificial Sequence
  derived and/or modified sequence
gatccggccgagtggccctgggttagcagctgctgcatttccccggctggctgcggtcactggtggcagtgctcaggcgcccgccgcccttgaccttcggccccgcgagctctaaccctacagcgcaggaagatcggccgccgcggccagcagagccaagcacagtgggaactttcagaaagcactggttgaaggaacgctggaatccctgggacttactgcgtagcatgtagtagttgctcctctagaaaagtttcaccttatgaagtatagcaggctctgatgctggtgtctggtagaagaaggttactcacagttctgctgcaggctcagaagtggccctttcaaccctccagagacatgagactagtgcagttccgggcaccccacctggtggggcctcacttgggcctggagacagggaatggtggaggggttatcaacctcaatgcctttgaccccacactcccgaagacgatgacgcagttcctagagcagggagaggccaccctctcagtggcaagaagagccctggctgcccagttgccagtcctaccacggtcggaggtaaccttcctggctccagtcacacgaccagataaggtggtgtgtgtgggcatgaattatgtggaccactgcaaagaacagaacgtgcccgtgcccaaggagcccatcatcttcagcaagtttgccagctccatcgtggggccctatgatgaggtggtcctcccaccacagagccaggaggtagattgggaagtggagctggccgtggtcattggaaagaaaggcaagcacatcaaggccacagatgctatggcccacgtggccggcttcactgtggctcatgacgtgagtgctcgtgactggcaaatgagacgtaatgggaaacaatggctgctgggaaaaaccttcgacaccttctgccctctgggccctgccttggtgaccaaggacagtgtagcagatccacacaacttaaagatctgctgccgagtgaatggggaagtggtccagagcggcaacaccaaccagatggtattcaagacagaggacctgatagcctgggtctcccagtttgttaccttttacccaggggatgtcatcctaactgggacccccccaggtgtcggtgtattcaggaaacctcctgtctttctcaagaagggggatgaagtccagtgtgagattgaagaactaggtgtcatcatcaacaaggtggtgtgatggctcctgcacaggccctgcacataggatgagggcatctgctcccactcagcctagcccagggaaaggcccagtgacaggtgtggacaggtgccagccctgcaagccgcctcttctcggtagaagggagaaggacaga

SEQ ID NO: 189037 - DNA, 945 bp, Artificial Sequence
  derived and/or modified sequence
atgctggtgagcggccggcggcggctgctgaccgtgctgctgcaggctcagaaatggccattccaaccctcccgcgatatgagactcgtgcagttccgagcaccgcacctcgttggaccacacttggggctggaaaccggcaacggaggcggcgttattaatttaaatgcctttgaccccactctgccaaagaccatgactcagttcttggagcagggagaagctacattgagcgtggcaaggcgcgccttggcagctcaactgcctgtgttaccacggtcagaggtgaccttcctggcccccgtaacccgccccgacaaagtcgtgtgcgtcggcatgaattacgtggaccattgcaaggagcagaatgtgccagttccaaaggaaccaatcatcttttctaagtttgccagcagcatcgttggtccatacgatgaagtggtactgcccccacaatcccaggaggtggattgggaggtggagttagcagtggtcattggcaagaaggggaagcatatcaaggccaccgacgcaatggcgcatgtcgccggctttaccgtggcacacgacgtgagcgccagggattggcagatgaggagaaatggtaagcaatggctgctggggaagacttttgataccttttgccccctcggacccgctttggtcactaaagactctgtggccgaccctcacaacctcaagatttgctgcagggttaacggggaggtggtgcaaagcggcaatacaaatcagatggtatttaaaacagaagacctgatagcatgggtttctcaatttgtaaccttttatcctggcgacgtcattctgactggcacacctcctggtgtgggagtattcagaaagcccccagtgtttctgaaaaagggcgacgaagttcagtgtgagatcgaggaattgggggttatcatcaataaggtcgtatag

SEQ ID NO: 189038 - DNA, 945 bp, Artificial Sequence
  derived and/or modified sequence
atgttggtgtccggcagaaggaggttactgaccgtcttgctgcaagcccaaaagtggcctttccagccaagcagggatatgagactggtgcagttccgagcaccccatctggtggggcctcatctgggccttgagactggaaacgggggaggggtaatcaacctgaatgcatttgatcccacactgcctaagacaatgacgcagttccttgaacagggagaagccaccctaagtgtggctaggcgagcactggccgctcaactaccagtgctgcctagaagtgaggtaacctttcttgccccagtgacccgacctgacaaagtggtttgcgtcggtatgaattacgttgatcactgcaaagagcaaaacgtccctgtgccgaaggaaccaataatcttctccaagttcgcgtcttcaatcgtaggaccctacgatgaagttgtgctgccccctcagtctcaggaagttgactgggaggtggagctcgcagtcgtaattggaaagaaaggcaagcacatcaaggcaactgacgccatggctcacgtcgccggattcaccgtggcacacgacgtctccgctcgggactggcagatgaggaggaatggcaaacagtggctgcttggcaagaccttcgacacattttgcccattgggaccggctctagtgacaaaggattcggtggcagacccacataatttgaaaatttgctgtcgggtgaacggcgaggtcgtgcagtcggggaataccaatcagatggtgtttaaaacagaagatctgatagcgtgggtgagccagttcgttactttttatccaggagacgtgatcctgacagggactccaccaggggtgggtgtgttcagaaagccacccgtgttcttgaaaaaaggagacgaggtccaatgcgaaatcgaggaactcggtgtgataattaacaaggtggtctag

SEQ ID NO: 189039 - protein, 194 aa, Artificial Sequence
  derived and/or modified sequence
MKIWTSEHVFDHPWETVTTAAMQKYPNPMNPSVVGVDVLDRHIDPSGKLHSHRLLSTEWGLPSIVKSLIGAARTKTYVQEHSVVDPVEKTMELKSTNISFTNMVSVDERLIYKPHPQDPEKTVLTQEAIITVKGVSLSSYLEGLMASTISSNASKGREAMEWVIHKLNAEIEELTASARGTIRTPMAAAAFAEK

SEQ ID NO: 189040 - DNA, 585 bp, Artificial Sequence
  derived and/or modified sequence
atgaagatctggaccagcgagcacgtgttcgaccacccctgggagaccgtgaccaccgccgccatgcagaagtaccccaaccccatgaaccccagcgtggtgggcgtggacgtgctggacagacacatcgaccccagcggcaagctgcacagccacagactgctgagcaccgagtggggcctgcccagcatcgtgaagagcctgatcggcgccgccagaaccaagacctacgtgcaggagcacagcgtggtggaccccgtggagaagaccatggagctgaagagcaccaacatcagcttcaccaacatggtgagcgtggacgagagactgatctacaagccccacccccaggaccccgagaagaccgtgctgacccaggaggccatcatcaccgtgaagggcgtgagcctgagcagctacctggagggcctgatggccagcaccatcagcagcaacgccagcaagggcagagaggccatggagtgggtgatccacaagctgaacgccgagatcgaggagctgaccgccagcgccagaggcaccatcagaacccccatggccgccgccgccttcgccgagaagtag

SEQ ID NO: 189041 - DNA, 585 bp, Artificial Sequence
  derived and/or modified sequence
atgaagatctggacttccgaacatgttttcgaccatccatgggaaactgtcacgacggctgcaatgcagaagtacccgaacccgatgaatccatcagtcgtgggagttgatgtgctggatcggcacatcgacccatcgggaaagctgcattctcatcggctgctgtcaacagaatggggactccccagcattgtgaagagtctcatcggagcagcacgtactaaaacctatgtccaagaacacagcgtcgtcgacccggtcgaaaaaaccatggagttgaagtccaccaacataagcttcactaatatggtgtcagtcgacgagcgcttaatctacaagccacaccctcaggatcctgagaagaccgtgctgactcaggaggcgatcattacggtcaagggcgtcagcttgtcaagctaccttgagggactcatggcgtcaaccatttccagtaacgccagtaaaggtagagaagcaatggagtgggtgatccataagcttaacgcagaaatagaggaattaacagcttctgctaggggtactatacggacccctatggccgcagccgcttttgctgagaagtag

SEQ ID NO: 189042 - DNA, 585 bp, Artificial Sequence
  derived and/or modified sequence
atgaagatctggaccagcgagcacgtgtttgaccacccctgggagaccgtgaccacagctgccatgcagaagtaccccaaccccatgaaccccagcgtggtgggcgtggatgtgctggacagacacatcgaccccagcggcaagctgcacagccaccggctgctgagcacagagtggggcctgcccagcatcgtgaagagcctgattggagctgcccggaccaagacctacgtgcaggagcacagcgtggtggaccctgtggagaagaccatggagctgaagagcaccaacatctccttcaccaacatggtgtctgtggatgagcggctcatctacaagccccacccccaggaccctgagaagacagtgctgacccaggaggccatcatcaccgtgaagggcgtgtccctgagcagctacctggagggcctgatggccagcaccatcagcagcaatgccagcaagggccgggaggccatggagtgggtgatccacaagctgaatgctgagattgaggagctgacagccagcgcccggggcaccatccgcacccccatggctgctgctgcctttgctgagaagtag

SEQ ID NO: 189043 - DNA, 585 bp, Artificial Sequence
  derived and/or modified sequence
atgaagatctggaccagcgagcacgtgttcgaccacccctgggagacagtgaccactgccgctatgcagaagtaccctaaccctatgaacccttctgtagttggagtggacgtgctcgaccgccacatcgatcccagcggtaaactgcattctcacaggctgctgtccacagaatggggtctcccctctatcgtgaagtcattaattggtgcagcgcgcaccaaaacctatgttcaggagcattccgttgtggaccctgttgagaaaaccatggaactcaaatcgaccaacatttcattcactaacatggtgagcgtggatgaacggctaatctacaaaccccacccacaggatcccgagaaaaccgtacttacccaggaggccatcataactgtaaaaggcgtttcactgtcttcctatctggagggacttatggcaagcaccattagttcaaatgcctccaaaggtcgcgaagcgatggagtgggttatccacaagctgaacgctgagatcgaggaacttacggcttctgccaggggcactattcggactcctatggccgccgccgccttcgccgaaaagtag

SEQ ID NO: 189044 - DNA, 585 bp, Artificial Sequence
  derived and/or modified sequence
atgaagatttggacaagcgaacatgtctttgaccatccctgggaaactgtgactactgcggctatgcagaagtatccgaatcccatgaacccgtctgtggtgggggtcgacgtcctcgataggcacattgaccctagtggaaagctgcactcccatcggctgctgtcaacagagtgggggctgccttccatcgtgaagagtctgatcggagctgcccgaacaaagacttacgtccaggagcactccgtggtggaccctgtggagaagactatggagctgaaaagtactaatataagcttcactaatatggtcagcgtcgacgaacggctgatttacaaaccacacccgcaggatcctgagaagacagtcttaacgcaggaggcaatcatcaccgtgaaaggcgtctctctttcatcgtacctggagggactcatggcttccaccatatcttccaacgcctcaaagggacgtgaagccatggagtgggtgattcacaaattgaacgccgagatcgaagagctcactgcttctgccaggggaaccatccggacacctatggcggcagctgcctttgccgagaagtag

SEQ ID NO: 189045 - DNA, 2626 bp, Artificial Sequence
  derived and/or modified sequence
aaaacccgggccgggatagggcgtggggccgcgcgtctggacgtccctcgcgtcgggcccgacagcgcctgcgcactgcgccgccggctggggtgctgggggcggggcaggggcaggtgtagcctctgtgcctcgttgtcccctggcgctacccggacatctctcagggtgccggcaccatgaagatctggacttcggagcacgtctttgaccacccgtgggaaactgttacaacagctgcaatgcagaaatacccaaaccctatgaacccaagtgtggttggagttgatgtgttggacagacatatagatccctctggaaagttgcacagccacagacttctcagcacagagtggggactgccttccattgtgaagtctcttattggtgcagcaagaacgaaaacatatgtgcaagaacattctgtagttgatcctgtagagaaaacaatggaacttaaatctactaatatttcatttacaaacatggtttcagtagatgagagacttatatacaaaccacatcctcaggatccagaaaaaactgttttgacacaagaagccataattaccgtgaaaggagttagcctcagcagttaccttgaaggactgatggcaagtacgatatcctcaaatgctagtaaaggccgagaagcaatggaatgggtaatacataaattaaatgctgagattgaagaactgacagcctcagcaagaggaaccataaggactccaatggcagcagcagcgtttgcagagaagtgatcgtgacagttggtagacaacatcgggtactccaggtctctccaaactgactatatatttatttgttattttaaaaatacaactatattttgggtagtttttttttttttttttttgataagttggtgtaaggctatgtgacttgatcaaaacagatgcagggcctctaaataaaagggatcatctgaaattaatgttgtttgaaattactatctgattttgagggttccagtatttctgtgaaaattcaacaagaactccttggaaactggtattgatattcagtctccttaaggtagatttttcaagcttttcatacattggaactccacctgactttggaccaaccccagaacagagcagagccacctcctatagacgcccattgccctgctgctgtacacttcagcagcttgcacaagggagctcacttaaaaggagaaattgtgtagttttaaaatatattttgtgtaaaataccttactatgctataaaccaccattaaaaaccagtgttttgatttggtacttaaatatttttggagtgaaaattatcactaaagtaacatgactccaacaaaagtatggtttcattataaaagagtactgtattgatttgcccaagttttgtaacttagtaaaggtattaacttccttggatttgtactttgtgatttagtatgctgtatcgtgggctggttatgttaactgaaaaaaataaagtcattacctgagttttgcagtgctctaacttaaacagaagaacagctgttcacatcttttagcattttacatttgcctaacttaaaaattgccatgtgtcaaaatcatggttttgtaattgctaaggcatgatatgtcaggttatttgaatataattactttttgaagtaattgtgaccacaaaacatcttttttacatgaaggagctgtgtatcatttgaaattactcaaatgatgtcttgctctgaggcataaatcccaggtacttagtgtttttaataatatggtgccactgcaggatttgggggcggtggggaagaacaagcataatggtagggggaggcttggcctgaaactaaccactgagtgaattgcactgcaggttttacttaacgggaattccttatttgggatgtcaagagggcagctgcaaactgaaaaacaatccagtaaatgtactttgttttatgtattgtagcaggcaattaactactaaataatagctttgacatttgcaattgttgcatagagactatttttgctagaagatgattagctcttgcctttattttacagtgcttagtgtgataaacttctagtcatgtttcctatccaagagaccagttaatatatgtacataaaccacagaaatagtataacacactatttttaaattatcgttttcctacttaaattttgtttagcttaagacttcttaggacatttgtaaaagcaggttaaatttaataaggtttctgatttttttttgtaaccggagatagtttttacaagtgaaataacatttcagctaaataaaacatcgctaaataattgatatttgatgaaaatctgctttgtataatttctgtaaattatccttgttctgaaaaaggtgtaatgccctaatatttttaaatccttatcctttgattttttaaaaactgacctattgataaaactataaattttcattttccagtgcagttagttacctttttaaacataaatgcacaacaagcaaatgaatttaagagaactaaactggaataagtgttcataaatgaaacccttggactatttaataaagttgaaatgtgaattaaggaaaacttttgttaataaaaactttcttttaagtga

SEQ ID NO: 189046 - protein, 154 aa, Artificial Sequence
  derived and/or modified sequence
MAPPVRYCIPGERLCNLEEGSPGSGTYTRHGYIFSSLAGCLMKSSENGALPVVSVVRETESQLLPDVGAIVTCKVEIYKSFRPGDIVLAKVISLGDAQSNYLLTTAENELGVVVAHSESGIQMVPISWCEMQCPKTHTKEFRKVARVQPEFLQT

SEQ ID NO: 189047 - protein, 178 aa, Artificial Sequence
  derived and/or modified sequence
MAPPVRYCIPGERLCNLEEGSPGSGTYTRHGYIFSSLAGCLMKSSENGALPVVSVVRETESQLLPDVGAIVTCKVSSINSRFAKVHILYVGSMPLKNSFRGTIRKEDVRATEKDKISLGDAQSNYLLTTAENELGVVVAHSESGIQMVPISWCEMQCPKTHTKEFRKVARVQPEFLQT

SEQ ID NO: 189048 - protein, 195 aa, Artificial Sequence
  derived and/or modified sequence
MAPPVRYCIPGERLCNLEEGSPGSGTYTRHGYIFSSLAGCLMKSSENGALPVVSVVRETESQLLPDVGAIVTCKVSSINSRFAKVHILYVGSMPLKNSFRGTIRKEDVRATEKDKVEIYKSFRPGDIVLAKVISLGDAQSNYLLTTAENELGVVVAHSESGIQMVPISWCEMQCPKTHTKEFRKVARVQPEFLQT

SEQ ID NO: 189049 - DNA, 465 bp, Artificial Sequence
  derived and/or modified sequence
atggccccccccgtgagatactgcatccccggcgagagactgtgcaacctggaggagggcagccccggcagcggcacctacaccagacacggctacatcttcagcagcctggccggctgcctgatgaagagcagcgagaacggcgccctgcccgtggtgagcgtggtgagagagaccgagagccagctgctgcccgacgtgggcgccatcgtgacctgcaaggtggagatctacaagagcttcagacccggcgacatcgtgctggccaaggtgatcagcctgggcgacgcccagagcaactacctgctgaccaccgccgagaacgagctgggcgtggtggtggcccacagcgagagcggcatccagatggtgcccatcagctggtgcgagatgcagtgccccaagacccacaccaaggagttcagaaaggtggccagagtgcagcccgagttcctgcagacctag

SEQ ID NO: 189050 - DNA, 537 bp, Artificial Sequence
  derived and/or modified sequence
atggccccccccgtgagatactgcatccccggcgagagactgtgcaacctggaggagggcagccccggcagcggcacctacaccagacacggctacatcttcagcagcctggccggctgcctgatgaagagcagcgagaacggcgccctgcccgtggtgagcgtggtgagagagaccgagagccagctgctgcccgacgtgggcgccatcgtgacctgcaaggtgagcagcatcaacagcagattcgccaaggtgcacatcctgtacgtgggcagcatgcccctgaagaacagcttcagaggcaccatcagaaaggaggacgtgagagccaccgagaaggacaagatcagcctgggcgacgcccagagcaactacctgctgaccaccgccgagaacgagctgggcgtggtggtggcccacagcgagagcggcatccagatggtgcccatcagctggtgcgagatgcagtgccccaagacccacaccaaggagttcagaaaggtggccagagtgcagcccgagttcctgcagacctag

SEQ ID NO: 189051 - DNA, 588 bp, Artificial Sequence
  derived and/or modified sequence
atggccccccccgtgagatactgcatccccggcgagagactgtgcaacctggaggagggcagccccggcagcggcacctacaccagacacggctacatcttcagcagcctggccggctgcctgatgaagagcagcgagaacggcgccctgcccgtggtgagcgtggtgagagagaccgagagccagctgctgcccgacgtgggcgccatcgtgacctgcaaggtgagcagcatcaacagcagattcgccaaggtgcacatcctgtacgtgggcagcatgcccctgaagaacagcttcagaggcaccatcagaaaggaggacgtgagagccaccgagaaggacaaggtggagatctacaagagcttcagacccggcgacatcgtgctggccaaggtgatcagcctgggcgacgcccagagcaactacctgctgaccaccgccgagaacgagctgggcgtggtggtggcccacagcgagagcggcatccagatggtgcccatcagctggtgcgagatgcagtgccccaagacccacaccaaggagttcagaaaggtggccagagtgcagcccgagttcctgcagacctag

SEQ ID NO: 189052 - DNA, 465 bp, Artificial Sequence
  derived and/or modified sequence
atggctcctcccgttagatactgcatcccaggagaacggctttgtaacctggaggagggatccccggggtcaggaacttacacacgccacggctatatattctcatccctcgcaggctgtctcatgaagagcagcgaaaacggggcattgccagtggtctctgtggttagggagacagagtctcagctgttgcccgacgttggcgccatcgtgacttgcaaggtggagatatacaaatctttcaggccgggagacattgtgttggctaaggtaatttccctgggagacgcccaatccaactacctgttaactaccgctgaaaacgagcttggcgtagttgtcgctcactcggagtccggcattcaaatggtgcccatcagttggtgtgaaatgcagtgccctaagacacatacaaaggaatttcgtaaggtggcacgggtgcaaccagaattcttgcaaacctag

SEQ ID NO: 189053 - DNA, 537 bp, Artificial Sequence
  derived and/or modified sequence
atggctcctcccgtacggtattgcattccaggtgagaggctgtgcaacttagaggaaggatctcctggatctggaacatacacacgccatgggtatatcttcagtagcctggcaggttgtctgatgaagagctctgaaaacggggctttgcctgtggtctccgtcgtgcgggaaacagagagtcagctcctcccagatgtcggagctatagtgacctgtaaggtgtccagtatcaattcacgtttcgccaaagtccacatcctttacgtcgggtcaatgcctctgaagaatagttttagaggaaccattcgtaaggaggatgttcgagcaaccgaaaaagacaagatttctctgggtgacgcccagagtaactatcttctgacgacagcagagaacgagttgggagtagtggtggcccacagtgaatctggaattcagatggtgcccataagctggtgcgaaatgcagtgtccaaaaacacacacaaaggagtttcgtaaagtggcccgcgtccagccagaattcctgcagacctag

SEQ ID NO: 189054 - DNA, 588 bp, Artificial Sequence
  derived and/or modified sequence
atggccccccctgtgcgatactgcatcccgggcgaacggctgtgtaacctagaggagggcagccctggctctggcacgtatactcgccacggctacatatttagctcactggcggggtgcttaatgaagagctccgagaacggagccctgccagtcgtctcagtggtcagggaaaccgagtctcagctgttacccgatgtcggcgcaattgtgacctgcaaggtgagctcaatcaacagccgctttgccaaagttcacatcctttacgtgggatccatgcctctcaagaattccttcagaggcacaatccgcaaggaagacgtacgggctaccgagaaagacaaagtggaaatttataagtcattccgcccgggagacatcgtcctggcaaaggtcatatctctgggggatgctcagagcaactatcttttgactactgcggaaaatgagctaggcgtggtcgtcgcccattctgaatccggcatccagatggtgccaatatcatggtgtgaaatgcaatgtccaaaaactcataccaaagagtttcggaaagtggctcgcgtccagccagaattcctgcaaacttag

SEQ ID NO: 189055 - DNA, 498 bp, Artificial Sequence
  derived and/or modified sequence
gttttcatcctggttttgggacagcggcaatcatggcgccacctgtgagatactgcatccccggcgaacgtctgtgtaacttggaggagggcagcccgggcagcggcacctacacccgccacggctacatcttttcgtcgcttgccggctgtctgatgaagagcagcgagaatggcgcgcttccagtggtgtctgtagtgagagaaacagagtcccagttactgccagatgtgggagctattgtaacctgtaaggttgaaatttataagagtttccgcccaggtgacattgtcttggccaaagtgatctccttaggtgatgcacagtccaactacctgctaaccaccgccgagaacgagctgggagtggtggtagcccacagtgagtcaggtatccagatggttcccatcagctggtgtgagatgcagtgccctaagacccacactaaagaattccggaaagtagcccgagtacaacccgaattcttgcagacctaag

SEQ ID NO: 189056 - DNA, 739 bp, Artificial Sequence
  derived and/or modified sequence
catggcgccacctgtgagatactgcatccccggcgaacgtctgtgtaacttggaggagggcagcccgggcagcggcacctacacccgccacggctacatcttttcgtcgcttgccggctgtctgatgaagagcagcgagaatggcgcgcttccagtggtgtctgtagtgagagaaacagagtcccagttactgccagatgtgggagctattgtaacctgtaaggtctctagcatcaattcacgctttgccaaagtacacatcctgtatgtggggtccatgcctcttaagaactcttttcgaggaactatccgcaaggaagatgtccgagcaactgaaaaagacaagatctccttaggtgatgcacagtccaactacctgctaaccaccgccgagaacgagctgggagtggtggtagcccacagtgagtcaggtatccagatggttcccatcagctggtgtgagatgcagtgccctaagacccacactaaagaattccggaaagtagcccgagtacaacccgaattcttgcagacctaagaagccactttttaccctatggaagggggtaagctgttcctgagtataacaccaagatgctgctgtctttattcaaacacctggcgtcggccaacagccacttccagaaaaatcttccagtttacgctgtagatggaacatgtttctgtgaacctatcagtggatttcattctcttgagtaataaatcttatcttttcaag

SEQ ID NO: 189057 - DNA, 923 bp, Artificial Sequence
  derived and/or modified sequence
gttttcatcctggttttgggacagcggcaatcatggcgccacctgtgagatactgcatccccggcgaacgtctgtgtaacttggaggagggcagcccgggcagcggcacctacacccgccacggctacatcttttcgtcgcttgccggctgtctgatgaagagcagcgagaatggcgcgcttccagtggtgtctgtagtgagagaaacagagtcccagttactgccagatgtgggagctattgtaacctgtaaggtctctagcatcaattcacgctttgccaaagtacacatcctgtatgtggggtccatgcctcttaagaactcttttcgaggaactatccgcaaggaagatgtccgagcaactgaaaaagacaaggttgaaatttataagagtttccgcccaggtgacattgtcttggccaaagtgatctccttaggtgatgcacagtccaactacctgctaaccaccgccgagaacgagctgggagtggtggtagcccacagtgagtcaggtatccagatggttcccatcagctggtgtgagatgcagtgccctaagacccacactaaagaattccggaaagtagcccgagtacaacccgaattcttgcagacctaagaagccactttttaccctatggaagggggtaagctgttcctgagtataacaccaagatgctgctgtctttattcaaacacctggcgtcggccaacagccacttccagaaaaatcttccagtttacgctgtagatggaacatgtttctgtgaacctatcagtggatttcattctcttgagtaataaatcttatcttttcaaggcaccaacaaacaaaactgtgatattggaaatagcctatccctcctgacagtccttataaatacatattttttgctatgataaaacttttttactaaaagga

SEQ ID NO: 189058 - DNA, 465 bp, Artificial Sequence
  derived and/or modified sequence
atggcccctcctgtgcgctactgcatccctggagagcggctgtgcaacctggaggagggcagccctggcagcggcacctacaccaggcatggctacatcttcagcagcctggccggctgcctgatgaagagcagtgaaaatggagccctgcctgtggtgtctgtggtgcgggagacagagagccagctgctgcctgatgtgggcgccatcgtgacctgcaaggtggagatctacaagagcttccggcctggggacatcgtgctggccaaggtgatcagcctgggagatgcccagagcaactacctgctgaccacagcagaaaatgagctgggcgtggtggtggcccacagcgagagcggcatccagatggtgcccatctcctggtgtgagatgcagtgccccaagacccacaccaaggagttcaggaaggtggcccgggtgcagcctgagttcctgcagacctag

SEQ ID NO: 189059 - DNA, 537 bp, Artificial Sequence
  derived and/or modified sequence
atggcccctcctgtgcgctactgcatccctggagagcggctgtgcaacctggaggagggcagccctggcagcggcacctacaccaggcatggctacatcttcagcagcctggccggctgcctgatgaagagcagtgaaaatggagccctgcctgtggtgtctgtggtgcgggagacagagagccagctgctgcctgatgtgggcgccatcgtgacctgcaaggtgagcagcatcaacagcagatttgccaaggtgcacatcctgtatgtgggctccatgcccctgaagaacagcttccggggcaccatcaggaaggaggatgtgcgggccacagagaaggacaagatcagcctgggagatgcccagagcaactacctgctgaccacagcagaaaatgagctgggcgtggtggtggcccacagcgagagcggcatccagatggtgcccatctcctggtgtgagatgcagtgccccaagacccacaccaaggagttcaggaaggtggcccgggtgcagcctgagttcctgcagacctag

SEQ ID NO: 189060 - DNA, 588 bp, Artificial Sequence
  derived and/or modified sequence
atggcccctcctgtgcgctactgcatccctggagagcggctgtgcaacctggaggagggcagccctggcagcggcacctacaccaggcatggctacatcttcagcagcctggccggctgcctgatgaagagcagtgaaaatggagccctgcctgtggtgtctgtggtgcgggagacagagagccagctgctgcctgatgtgggcgccatcgtgacctgcaaggtgagcagcatcaacagcagatttgccaaggtgcacatcctgtatgtgggctccatgcccctgaagaacagcttccggggcaccatcaggaaggaggatgtgcgggccacagagaaggacaaggtggagatctacaagagcttccggcctggggacatcgtgctggccaaggtgatcagcctgggagatgcccagagcaactacctgctgaccacagcagaaaatgagctgggcgtggtggtggcccacagcgagagcggcatccagatggtgcccatctcctggtgtgagatgcagtgccccaagacccacaccaaggagttcaggaaggtggcccgggtgcagcctgagttcctgcagacctag

SEQ ID NO: 189061 - DNA, 465 bp, Artificial Sequence
  derived and/or modified sequence
atggccccccccgtgcggtactgcatccccggcgagcggctgtgcaacctggaggaaggcagtccggggtctggcacctacacccggcatgggtatattttcagtagcttagcaggttgccttatgaagtctagcgagaacggagctctgccagtcgtcagtgtggtgcgtgaaaccgaatcccagctcctgcctgatgtcggggccatagtcacttgcaaggttgaaatttataaatcctttcgccccggggatatcgtcctggccaaagtcatctctctaggcgatgcgcaatcaaactatctgttgacaacagccgaaaatgagctgggcgtggtcgtggctcactccgagagcggcatccagatggtaccaatctcttggtgtgagatgcaatgtcctaagactcatacaaaagaatttcgcaaagtggcacgggtccagccggagtttcttcagacatag

SEQ ID NO: 189062 - DNA, 537 bp, Artificial Sequence
  derived and/or modified sequence
atggccccccccgtgcggtactgcatccccggcgagcggctgtgcaacctggaggagggcagccccggctccggcacgtacactaggcacgggtatatcttttcaagcctggctggctgtctgatgaagagtagcgaaaacggcgcattaccagtggtgagcgtagtacgggaaactgagagtcaactgcttcccgatgtgggggcaatagtcacctgcaaggtttcttctataaacagcagattcgctaaagtgcacattttgtacgtcggctcaatgccactgaaaaactccttccgcggcactatccggaaagaggacgtccgggccacagaaaaggataaaattagcttaggtgatgcgcagtccaactacttacttacaacggcagaaaatgagctcggcgttgtcgtggcccacagtgagtcaggtattcaaatggtccctatatcttggtgtgagatgcagtgtcctaaaacacataccaaggagttccgaaaagtggcccgtgtccagcctgaattcctgcagacgtag

SEQ ID NO: 189063 - DNA, 588 bp, Artificial Sequence
  derived and/or modified sequence
atggccccccccgtgcggtactgcatccccggcgagcggctgtgcaacctcgaggaaggttccccaggctctgggacctacacgaggcacggatacatattttcctcattggcaggttgcttgatgaagtctagcgaaaacggcgcccttcctgtggtttccgttgtaagagagactgaatcgcagcttctccctgacgttggggccatcgtgacatgcaaggtttcatccatcaactcacggttcgcgaaggtccacattttgtacgtggggagtatgccgttgaaaaattcattccggggcactattagaaaagaggacgtgagggctaccgaaaaggacaaggtcgaaatttacaagtcgtttcgcccaggggacattgttctggccaaggtgatatccttaggagatgcccaaagcaattacctcctgactaccgcagaaaatgaactgggtgtcgtagttgcacactccgaaagcggcatacagatggttcccatctcctggtgcgagatgcaatgtccaaagacacacaccaaggaatttaggaaagtggccagggttcagcctgaattccttcagacctag

SEQ ID NO: 189064 - DNA, 465 bp, Artificial Sequence
  derived and/or modified sequence
atggccccacccgtccgttactgcatccctggtgagagactctgtaacctcgaggaaggttccccaggttcgggaacatacacaagacacggctatatctttagctctctggctgggtgcctcatgaagtcttcggaaaatggcgcattgcctgttgtcagcgtcgtgcgtgagaccgagtcacaactcctgcctgatgtcggggcaattgtgacgtgtaaggtggagatttataagtcctttagaccaggcgatatagtgctcgcaaaggtcatctccctcggggatgcccagtctaattatttgcttaccaccgccgagaacgaattgggagtcgtcgtagcccacagcgaatccggcatccaaatggtgcccatatcatggtgcgaaatgcagtgtcccaagactcacaccaaggaatttcgaaaggtggccagggtgcagccagagtttctacagacttag

SEQ ID NO: 189065 - DNA, 537 bp, Artificial Sequence
  derived and/or modified sequence
atggcacctcctgtgagatattgcattccaggcgagaggctgtgtaatctagaggagggaagtcctggtagcggcacatatacgagacatggatacattttttcaagtctcgcaggctgtcttatgaagagcagtgaaaatggagcacttcccgtcgtgagtgtggtacgtgaaacagaaagtcagctgttgcctgacgtgggagccattgtgacatgtaaagtgtcctctattaattcccgctttgctaaggtgcatatcctgtatgtggggtccatgccactgaaaaactcatttagaggcaccatcaggaaggaagatgttagggctacagaaaaggacaaaatctccctgggcgacgcacaatctaattatcttctgacaactgccgaaaatgagctcggcgtggtcgtagcccacagcgaatccggaatccagatggtgcccatcagttggtgcgagatgcagtgccccaaaacccatacaaaagaatttaggaaagtggcacgcgtccaacctgagttcctccagacatag

SEQ ID NO: 189066 - DNA, 588 bp, Artificial Sequence
  derived and/or modified sequence
atggcgcctcctgtgcggtattgtatccctggggagagactgtgcaacttagaggaaggttcacctggtagcgggacttacacacgccacggctatattttttcctcacttgccggatgcctcatgaaatcttccgagaatggggctctgcccgtggttagcgttgtgagggagactgaaagccagctccttccagatgttggcgcaattgtgacctgtaaagtctcttcgattaacagcagatttgctaaggtccacattctttatgtaggaagtatgccactcaagaactcctttagggggacaattcgaaaggaagatgtacgagcaacagagaaagacaaggtggagatctacaagagttttagacctggggacatcgttctcgcaaaagtgattagcctgggagacgctcagtccaactacctcctgacaacagcggagaatgaactgggcgtggtcgttgcccactcggagagtggaattcagatggtgccaataagctggtgcgaaatgcaatgcccgaagacacacaccaaagagtttcggaaggtagccagggtacagcccgagtttctccaaacatag

SEQ ID NO: 189067 - protein, 125 aa, Artificial Sequence
  derived and/or modified sequence
MAMQAAKRANIRLPPEVNRILYIRNLPYKITAEEMYDIFGKYGPIRQIRVGNTPETRGTAYVVYEDIFDAKNACDHLSGFNVCNRYLVVLYYNANRAFQKMDTKKKEEQLKLLKEKYGINTDPPK

SEQ ID NO: 189068 - DNA, 770 bp, Artificial Sequence
  derived and/or modified sequence
gagtctcgctcaggctcggttttaccccggagtctattcgaagggggctgctacgtcagcgcgtctcagcgtaagacggcgctattccgctgtaacagcttccggcgggtcctggatgttgatgtcctgcatctaacgcggtgtaacccccgaagccgagcgagctccggaggaatttcagtatctgctacggtaacttcatcagcccgccaagatggcgatgcaagcggccaagagggcgaacattcgacttccacctgaagtaaatcggatattgtatataagaaatttgccatacaaaatcacagctgaagaaatgtatgatatatttgggaaatatggacctattcgtcaaatcagagtggggaacacacctgaaactagaggaacagcttatgtggtctatgaggacatctttgatgccaagaatgcatgtgatcacctatcgggattcaatgtttgtaacagataccttgtggttttgtactataatgccaacagggcatttcagaagatggacacaaagaagaaggaggaacagttgaagcttctcaaggagaaatatggcatcaacacagatccaccaaaataaatgttttctacattttcatttggactaaatcccacgaatgacaactaccacctttttttcctttttaattaatactaaatattgtgatttcttatttgaggttcaaaatgacctgcttgaaactttgatacatattggaatacattatgttaataaacttgtagctttttgtgaaaca

SEQ ID NO: 189069 - DNA, 378 bp, Artificial Sequence
  derived and/or modified sequence
atggctatgcaggccgccaaaagggctaacatccgcctaccacccgaagtgaaccgcatcctgtatatcaggaacttaccatacaagataaccgcggaagaaatgtatgacatctttggaaagtatgggcccattcggcagatcagggtgggtaacacaccagagaccagggggaccgcatatgtcgtatatgaagacatcttcgacgccaagaatgcatgtgatcacttgagcggttttaacgtgtgtaacaggtacctcgtcgtgttatattataacgccaatagagcattccaaaaaatggacacgaaaaagaaagaggagcagctgaaactgctaaaagaaaagtacgggattaacactgacccaccaaagtag

SEQ ID NO: 189070 - DNA, 378 bp, Artificial Sequence
  derived and/or modified sequence
atggccatgcaggccgccaagagggccaacatccggctgcccccagaggtgaaccgcatcctgtacatccggaacctgccctacaagatcacagctgaggagatgtatgacatctttgggaagtatggccccatccggcagatccgggtgggcaacaccccagagacccggggcacagcctacgtggtgtatgaggacatctttgatgccaagaatgcctgtgaccacctgagcggcttcaacgtgtgcaaccgctacctggtggtgctgtactacaatgccaacagagccttccagaagatggacaccaagaagaaggaggagcagctgaagctgctgaaggagaagtatggcatcaacacagatcctcccaagtag

SEQ ID NO: 189071 - DNA, 378 bp, Artificial Sequence
  derived and/or modified sequence
atggccatgcaggccgccaagcgggccaacatccggctgccccccgaagtcaatcggatcctgtatatcagaaacctgccctacaagataacagccgaggagatgtacgacatctttgggaaatacggccctatcagacagatccgggttggtaacacacccgagacacgggggaccgcctatgtcgtttacgaagatatcttcgacgccaaaaacgcttgcgatcatctgagcggtttcaatgtgtgcaatcgctatctggtggtcctctattataatgcgaacagagcgttccagaagatggacacgaagaaaaaagaggagcagctgaagctgctgaaagaaaaatatggcatcaacaccgaccctcccaagtag

SEQ ID NO: 189072 - DNA, 378 bp, Artificial Sequence
  derived and/or modified sequence
atggccatgcaggccgcaaagcgcgcaaacataaggctgcctccggaggtcaatcgaatactttacatcaggaacctcccctacaagatcaccgccgaagagatgtacgatatcttcgggaagtatgggcctattcgacaaattagagtgggcaatacaccagagaccaggggaaccgcgtacgtggtgtacgaagacatattcgatgcaaagaacgcctgcgaccacctcagcggcttcaacgtgtgcaatcggtacctggtggtgctgtattacaatgccaaccgagctttccagaagatggacacgaaaaaaaaggaggaacagctgaagcttctgaaagaaaagtatggaattaacacagacccgcctaaatag

SEQ ID NO: 189073 - DNA, 378 bp, Artificial Sequence
  derived and/or modified sequence
atggccatgcaggccgccaagagagccaacatcagactgccccccgaggtgaacagaatcctgtacatcagaaacctgccctacaagatcaccgccgaggagatgtacgacatcttcggcaagtacggccccatcagacagatcagagtgggcaacacccccgagaccagaggcaccgcctacgtggtgtacgaggacatcttcgacgccaagaacgcctgcgaccacctgagcggcttcaacgtgtgcaacagatacctggtggtgctgtactacaacgccaacagagccttccagaagatggacaccaagaagaaggaggagcagctgaagctgctgaaggagaagtacggcatcaacaccgacccccccaagtag

SEQ ID NO: 189074 - protein, 192 aa, Artificial Sequence [sequence omitted]

SEQ ID NO: 189075 - DNA, 579 bp, Artificial Sequence
  derived and/or modified sequence
atgagtaaactgggaagagctgcgcggggtctgcggaagccagaagtcggtggggtgatccgggccattgtcagagcagggcttgctatgccaggcccccctttggggcctgtgctgggccagcggggggtgtccatcaatcaattttgcaaggagttcaatgagaggaccaaggacatcaaagagggcatcccactacctaccaagatcctggtaaaacctgatcgtaccttcgaaattaagattgggcaacccaccgtttcttacttcctgaaagctgccgccgggatagaaaagggcgctaggcagacgggcaaggaagtcgccgggctggtgaccctgaagcacgtctacgaaattgctcgaattaaagcgcaggatgaggctttcgcacttcaggatgtaccattaagctccgtggtgcgctctatcattggttccgccagatccctcggaattagagtggtgaaggatctttcttccgaagaactggccgcttttcagaaagagcgcgcgatttttctggcagcccagaaagaggctgacctggcagcgcaagaggaagccgccaaaaaatag

SEQ ID NO: 189076 - DNA, 579 bp, Artificial Sequence
  derived and/or modified sequence
atgagcaagctgggccgggccgcccggggcctgaggaagccagaggtgggcggcgtcatccgggccatcgtgcgggccggcctggccatgcctggcccccccctgggccctgtgctgggccagaggggcgtgtccatcaaccagttctgcaaggagttcaatgaaagaaccaaggacatcaaggagggcatccccctgcccaccaagatcctggtgaagccagacaggacctttgagatcaagattggccagcccaccgtgtcctacttcctgaaggctgctgctggcattgaaaaaggagcccggcagacaggcaaggaggtggccggcctggtgaccctgaagcacgtgtatgagatcgcccgcatcaaggcccaggatgaggcctttgccctgcaggatgtgcccctgagctctgtggtgcgcagcatcatcggcagcgcccggagcctgggcatccgggtggtgaaggacctgagcagcgaggagctggccgccttccagaaggagcgggccatcttcctggccgcccagaaggaggccgacctggccgcccaggaggaggccgccaagaagtag

SEQ ID NO: 189077 - DNA, 1605 bp, Artificial Sequence
  derived and/or modified sequence
gtgaggacccttgacctctggcccaagatggtggcgcccagagcttcgctcttgctgctcccctgaggtgaactgaagccagcagccccgcatcatgtcaaagctcggccgggccgcccggggcctcaggaagcccgaggtcggcggtgtgatccgggcgatcgtgcgggcaggcctggccatgcccgggcccccactaggcccagtgctgggtcagagaggcgtttccatcaaccagttttgcaaggagttcaatgagaggacaaaggacatcaaggaaggcattcctctgcctaccaagattttagtgaagcctgacaggacatttgaaattaagattggacagcccactgtttcctacttcctgaaggcagcagctgggattgaaaagggggcccggcaaacagggaaagaggtggcaggcctggtgaccttgaagcatgtgtatgagattgcccgcatcaaagctcaggatgaggcatttgccctgcaggatgtacccctgtcgtctgttgtccgctccatcatcgggtctgcccgttctctgggcattcgcgtggtgaaggacctcagttcagaagagcttgcagctttccagaaggaacgagccatcttcctggctgctcagaaggaggcagatttggctgcccaagaagaagctgccaagaagtgacccttgccccaccaactcccagatttcaaaggaggtagttgcaaaagctgtgcccaaggggaggaaggaggtcacaccaatatgatgatggttttcatgactttgaatgatatatttttgtacatctagctgtatcgaggcatcaggcctgaataaacatcctttcttacccactgtcatcttctatcttgggacctcagggaagggaaccagtactggtggtagccaatatgggcagacattaggaaattggggtcttcatactgcttctcagatgtgcaaactgaggttcagccaagcaaagtaacttgcccaggtccttttttttcttttttaagttataattttgttttattgcccaggttctgaattggtgccagaggtaggaatagaacccaggccttctcatttgaaatcctgtgttcttcccctccccagggtgggaactatggttgctagggctgaggtgtattgcttacttcttccatcaaaaatctcttttatctctgaacaacttgccacctctgcagaaacaagtccctgtggagatctcagttcagccccaggcagggttactacatggagtacccagatcccaggggctacttcaggcccttctactaagctcctgaccctggctctgggtcagatgttggctgaacatgaactattgtagggctgacagctacagaccacagaaagagcaaagcttcagtaggttcctgcctgatggagaagtcctcgggaagcccttggccttctatttcctcattgtcctttcagagaagagagcaggagttgggggagaaaggagattcgcatttactgaccatctgttatgtgctagacacttcattttacactgagaaaatatggaaagcatagataaacacctaaaagaaaataaaaacctcatgttatcccaccaccca

SEQ ID NO: 189078 - DNA, 579 bp, Artificial Sequence
  derived and/or modified sequence
atgagcaagctgggccgggccgcccggggcctgcggaagcccgaggttggtggagttatccgcgccattgtgagggctggactggctatgcccggaccgccactcggacctgtgctcggccaacgaggggtttcaattaatcaattctgcaaagaatttaatgagcgtaccaaggacatcaaagaaggaatccctctccccacaaaaattctggtgaaaccagaccggacattcgaaatcaaaatcgggcagccaacggtgtcctatttcctgaaggcggccgctgggattgaaaagggcgctcggcagactggtaaggaggtagcaggcctagtgactctgaagcacgtatacgaaatcgctcgcattaaagcacaggatgaagcgtttgccctgcaagacgtgcccctatcatccgtggtgcggtctatcatcggctctgcccgcagtctcggaataagggtggtcaaggacctgagctcagaagagctggctgcatttcaaaaagagagggccattttcctcgcggcacagaaggaggctgacctcgcagcccaggaagaagccgccaagaagtag

SEQ ID NO: 189079 - DNA, 579 bp, Artificial Sequence
  derived and/or modified sequence
atgtccaaactggggagagctgcaaggggactgcgcaagcctgaagtcggaggcgtcattcgtgccatcgtgagggctggcctggcaatgcccggtccacccctaggtcccgtgctggggcaacgaggagtgagtataaatcaattctgtaaagagtttaatgaaagaaccaaggacatcaaagaaggcatcccgctgccaaccaagatcctggttaagccagaccggacttttgaaattaagatcggccagccaaccgtgtcatacttccttaaggccgctgcaggaattgagaaaggcgctcgccaaactggaaaggaagttgctggccttgtaacattgaagcatgtgtatgaaatagcgaggatcaaggcacaagatgaagcattcgcactgcaagatgttccgcttagttccgttgtgcgcagcatcatcgggtctgccaggagtttgggcatccgtgtggtcaaggacttgtctagtgaggagctcgctgctttccagaaggagcgagctatatttcttgccgcacagaaggaggctgacctggcagcccaggaggaggcagcgaagaagtag

SEQ ID NO: 189080 - DNA, 579 bp, Artificial Sequence
  derived and/or modified sequence
atgagcaagctgggcagagccgccagaggcctgagaaagcccgaggtgggcggcgtgatcagagccatcgtgagagccggcctggccatgcccggcccccccctgggccccgtgctgggccagagaggcgtgagcatcaaccagttctgcaaggagttcaacgagagaaccaaggacatcaaggagggcatccccctgcccaccaagatcctggtgaagcccgacagaaccttcgagatcaagatcggccagcccaccgtgagctacttcctgaaggccgccgccggcatcgagaagggcgccagacagaccggcaaggaggtggccggcctggtgaccctgaagcacgtgtacgagatcgccagaatcaaggcccaggacgaggccttcgccctgcaggacgtgcccctgagcagcgtggtgagaagcatcatcggcagcgccagaagcctgggcatcagagtggtgaaggacctgagcagcgaggagctggccgccttccagaaggagagagccatcttcctggccgcccagaaggaggccgacctggccgcccaggaggaggccgccaagaagtag

SEQ ID NO: 189081 - protein, 238 aa, Artificial Sequence
  derived and/or modified sequence
MADPDPRYPRSSIEDDFNYGSSVASATVHIRMAFLRKVYSILSLQVLLTTVTSTVFLYFESVRTFVHESPALILLFALGSLGLIFALILNRHKYPLNLYLLFGFTLLEALTVAVVVTFYDVYIILQAFILTTTVFFGLTVYTLQSKKDFSKFGAGLFALLWILCLSGFLKFFFYSEIMELVLAAAGALLFCGFIIYDTHSLMHKLSPEEYVLAAISLYLDIINLFLHLLRFLEAVNKK

SEQ ID NO: 189082 - protein, 211 aa, Artificial Sequence
  derived and/or modified sequence
MADPDPRYPRSSIEDDFNYGSSVASATVHIRMAFLRKVYSILSLQVLLTTVTSTVFLYFESVRTFVHESPALILLFALGSLGLIFALILNRHKYPLNLYLLFGFTLLEALTVAVVVTFYDVYIILQAFILTTTVFFGLTVYTLQSKKDFSKFGAGQSALLVDIVPVRILEVFFYSEIMELVLAAAGALLFCGFIIYDTHSLMHKLSPKSTY

SEQ ID NO: 189083 - protein, 168 aa, Artificial Sequence
  derived and/or modified sequence
MADPDPRYPRSSIEDDFNYGSSVASATVHIRMAFLRKVYSILSLQVLLTTVTSTVFLYFESVRTFVHESPALILLFALGSLGLIFALILNRHKYPLNLYLLFGFTLLEALTVAVVVTFYDVYIILQAFILTTTVFFGLTVYTLQSKKDFSKFGAGRCRSPSFLWIHHL

SEQ ID NO: 189084 - DNA, 717 bp, Artificial Sequence
  derived and/or modified sequence
atggccgaccccgaccccagataccccagaagcagcatcgaggacgacttcaactacggcagcagcgtggccagcgccaccgtgcacatcagaatggccttcctgagaaaggtgtacagcatcctgagcctgcaggtgctgctgaccaccgtgaccagcaccgtgttcctgtacttcgagagcgtgagaaccttcgtgcacgagagccccgccctgatcctgctgttcgccctgggcagcctgggcctgatcttcgccctgatcctgaacagacacaagtaccccctgaacctgtacctgctgttcggcttcaccctgctggaggccctgaccgtggccgtggtggtgaccttctacgacgtgtacatcatcctgcaggccttcatcctgaccaccaccgtgttcttcggcctgaccgtgtacaccctgcagagcaagaaggacttcagcaagttcggcgccggcctgttcgccctgctgtggatcctgtgcctgagcggcttcctgaagttcttcttctacagcgagatcatggagctggtgctggccgccgccggcgccctgctgttctgcggcttcatcatctacgacacccacagcctgatgcacaagctgagccccgaggagtacgtgctggccgccatcagcctgtacctggacatcatcaacctgttcctgcacctgctgagattcctggaggccgtgaacaagaagtag

SEQ ID NO: 189085 - DNA, 636 bp, Artificial Sequence
  derived and/or modified sequence
atggccgaccccgaccccagataccccagaagcagcatcgaggacgacttcaactacggcagcagcgtggccagcgccaccgtgcacatcagaatggccttcctgagaaaggtgtacagcatcctgagcctgcaggtgctgctgaccaccgtgaccagcaccgtgttcctgtacttcgagagcgtgagaaccttcgtgcacgagagccccgccctgatcctgctgttcgccctgggcagcctgggcctgatcttcgccctgatcctgaacagacacaagtaccccctgaacctgtacctgctgttcggcttcaccctgctggaggccctgaccgtggccgtggtggtgaccttctacgacgtgtacatcatcctgcaggccttcatcctgaccaccaccgtgttcttcggcctgaccgtgtacaccctgcagagcaagaaggacttcagcaagttcggcgccggccagagcgccctgctggtggacatcgtgcccgtgagaatcctggaggtgttcttctacagcgagatcatggagctggtgctggccgccgccggcgccctgctgttctgcggcttcatcatctacgacacccacagcctgatgcacaagctgagccccaagagcacctactag

SEQ ID NO: 189086 - DNA, 717 bp, Artificial Sequence
  derived and/or modified sequence
atggctgaccccgacccaaggtatcctaggtcctcgattgaagacgactttaactatgggtcatctgtcgcatcagcaacagttcatatccggatggcttttctccgcaaggtctacagcatcctttctctgcaagtactgctcacaaccgtaacgtcaaccgtctttttgtacttcgaatcagtccggacattcgtccacgagagccctgctttgatcctgctgttcgccctggggtcgctgggcctgatcttcgccctaattctgaatcggcacaagtaccccttgaacttgtatttactgtttggctttacgttattggaggcattgacagtggcagtggtcgtgacattctatgacgtttacattattttacaggctttcatcctgacgaccactgttttttttggtttgacggtttataccctgcagagcaaaaaagacttctcgaagtttggggctggactcttcgctctgctttggatcttgtgtctgtccggattcctaaagttctttttctattcagaaatcatggaactcgtgttggctgccgccggtgcactacttttctgcggcttcataatatatgacacgcacagcctgatgcacaagctgagcccagaagaatatgtgctcgctgctatatctttgtacctggatattattaatctgtttctgcatctcttgagattcctcgaggctgtcaacaaaaagtag

SEQ ID NO: 189087 - DNA, 636 bp, Artificial Sequence
  derived and/or modified sequence
atggctgatcccgatcctaggtatccccggtcttctattgaggatgattttaattacggctccagcgtcgcaagcgccacggtgcatattcgaatggcatttttacggaaagtttattctatcctcagtctgcaagtgcttttaactacggtgacatctaccgtattcctgtacttcgagtctgtgcgtacgtttgtccacgagtctccagctttaatcctgctgttcgctctgggctctctggggttgatatttgcgctcattctgaaccgccataaatacccactcaacttgtaccttctcttcgggtttaccctcctggaagccctgaccgttgcggtggtagtcaccttctacgacgtgtatattatcctgcaggccttcatcttaactaccacagtcttttttggactcaccgtctacaccctgcagtctaagaaggactttagcaagtttggtgccggtcagtcagctcttctcgtggatattgtgccagttaggattctcgaagtgtttttctattcagagatcatggagctggtgttagcagccgcaggcgcactgcttttttgtgggtttatcatttatgacactcactccttgatgcataagctctccccaaagagcacatactag

SEQ ID NO: 189088 - DNA, 717 bp, Artificial Sequence
  derived and/or modified sequence
atggctgaccctgacccccgctaccccaggagcagcattgaagatgacttcaactacggcagctctgtggccagcgccaccgtgcacatccgcatggccttcctgaggaaggtgtacagcatcctgagcctgcaggtgctgctgaccaccgtgaccagcaccgtcttcctgtactttgaatctgtgaggacctttgtgcatgagagccctgccctgatcctgctgtttgccctgggcagcctgggcctcatctttgccctgatcctgaacagacacaagtaccccctgaacctgtacctgctgtttggcttcaccctgctggaggccctgactgtggccgtggtggtgaccttctatgatgtgtacatcatcctgcaggccttcatcctgaccaccaccgtcttcttcggcctgactgtgtacaccctgcagagcaagaaggacttcagcaagtttggagctggcctgtttgccctgctgtggatcctgtgcctgagcggcttcctgaagttcttcttctacagcgagatcatggagctggtgctggccgctgctggggccctgctcttctgtggcttcatcatctatgacacccacagcctgatgcacaagctgagccctgaggagtatgtgctggccgccatcagcctgtacctggacatcatcaacctcttcctgcacctgctgcgcttcctggaggccgtgaacaagaagtag

SEQ ID NO: 189089 - DNA, 636 bp, Artificial Sequence
  derived and/or modified sequence
atggctgaccctgacccccgctaccccaggagcagcattgaagatgacttcaactacggcagctctgtggccagcgccaccgtgcacatccgcatggccttcctgaggaaggtgtacagcatcctgagcctgcaggtgctgctgaccaccgtgaccagcaccgtcttcctgtactttgaatctgtgaggacctttgtgcatgagagccctgccctgatcctgctgtttgccctgggcagcctgggcctcatctttgccctgatcctgaacagacacaagtaccccctgaacctgtacctgctgtttggcttcaccctgctggaggccctgactgtggccgtggtggtgaccttctatgatgtgtacatcatcctgcaggccttcatcctgaccaccaccgtcttcttcggcctgactgtgtacaccctgcagagcaagaaggacttcagcaagtttggagctggccagagcgccctgctggtggacatcgtgcctgtgcgcatcctggaggtgttcttctacagcgagatcatggagctggtgctggccgctgctggggccctgctcttctgtggcttcatcatctatgacacccacagcctgatgcacaagctgagccccaagagcacctactag

SEQ ID NO: 189090 - DNA, 717 bp, Artificial Sequence
  derived and/or modified sequence
atggccgaccccgacccccggtacccccggagcagcatcgaggacgatttcaattacggaagctccgtggcaagcgcaacagtacacatccggatggcctttcttagaaaagtttactcaattctgtcattgcaagttctgttgacaacagtcaccagcactgtgttcctgtacttcgagagcgtgagaacctttgtgcacgaatccccggccttaatcctgctctttgctttggggtcgctaggcttgatcttcgcccttatactgaatcggcataagtatcctctgaacttgtatttactgttcgggttcacactcctggaagccctgactgtggcagttgtcgtaaccttttatgacgtgtacataatcttacaggccttcatacttacgactactgtgttcttcggacttactgtctacacactgcagtcaaaaaaagatttctccaagtttggcgcaggcctgttcgcactgctgtggattttgtgtttgtctggctttctgaaatttttcttttattctgaaatcatggaactggtgcttgcagccgcgggcgccctgctcttttgcggattcataatttacgatacccactccctgatgcacaaattgagccctgaggagtacgtgctcgctgcaatcagtttatatcttgatataatcaatttattccttcacctgctacggtttcttgaggccgtgaacaaaaaatag

SEQ ID NO: 189091 - DNA, 636 bp, Artificial Sequence
  derived and/or modified sequence
atggccgaccccgacccccggtacccccggagcagcatcgaggacgactttaattacggttcatccgtcgctagtgccacagttcacattaggatggctttcctccgcaaggtgtattccattctgtccctccaggtgcttctgactaccgtcacgtccactgtttttctgtattttgagagcgtacgaaccttcgtccatgagtctccagctctgatcttgttgttcgccctcggctcattaggactcatttttgctttgatactcaaccgccacaaataccccctgaacttatatcttttgttcgggttcactctgttggaagctctgaccgtagccgtcgtggtcaccttttatgacgtgtacattattttgcaagcttttattctgactactacagtgttttttggcctcacagtgtatacactgcagagcaagaaagacttcagtaagtttggcgcaggacagagtgccctgctggtcgatatcgtcccagtaaggatactggaagtctttttttattcggagattatggagctcgtgctggcagcggccggtgcactgctgttttgtggcttcatcatttacgatactcattctcttatgcacaagctaagtcccaaatcaacatactag

SEQ ID NO: 189092 - DNA, 717 bp, Artificial Sequence
  derived and/or modified sequence
atggcggatcccgaccctagataccccagaagctctatcgaagacgattttaactacggatccagtgtagcttccgctactgtgcatataagaatggcgtttctaaggaaagtgtactcgatcctaagtcttcaggttttactgacaaccgtgacttctactgtgtttctgtatttcgagagcgtcagaacattcgtgcatgaatcaccagctctgattcttctatttgccctgggaagtctagggcttattttcgccttgatactgaatcggcacaagtacccgctaaacctgtacctgttattcggatttaccctgttggaggccttgacggtcgccgtggtagtcacattttatgacgtctatatcatactgcaagcctttatcctgactacaacggtgtttttcggattgaccgtctacacgctccagagcaagaaagatttctctaaatttggcgctggacttttcgccctcctgtggattctttgcctctctggatttctcaaattcttcttttactctgaaataatggaacttgtgctagcagcggcaggcgctctgttgttttgcggttttataatctacgatacacactctctgatgcacaaactctcccctgaagagtatgtcttggcagccatctcgttatacctcgatatcataaacctgttcttacacctcctaagattcctagaagctgttaataaaaagtag

SEQ ID NO: 189093 - DNA, 636 bp, Artificial Sequence
  derived and/or modified sequence
atggcagatccagatccccgatatcccaggtcaagcatcgaggatgatttcaattacggctcctccgtggcttccgcgaccgtccacatccgtatggcatttcttcgaaaggtttactccatcctgtcactgcaggtgctactcaccaccgtgacatccacagtgttcctgtattttgagtcggtgagaacgttcgtccacgagagtccagccttgatcctgctgtttgcgctcggcagccttggtcttatctttgctctcattttgaacaggcataagtatcctctgaatctgtatcttctctttgggttcacgctgttagaggcccttacagtggccgttgtagtgaccttctatgacgtttatataattctgcaggcattcatactcactaccacagtgtttttcggcctaacagtttataccctccaaagtaagaaggactttagcaaattcggggcaggacagtccgcactattagtcgacatagtccccgtgcggatcctggaggtgttcttctattctgaaatcatggagctggtgctggcagctgccggagctcttttattctgcgggtttattatttacgatacccactctttgatgcacaaattgagtcctaaaagtacctactag

SEQ ID NO: 189094 - DNA, 2952 bp, Artificial Sequence
  derived and/or modified sequence
ctcgctcggtgttcgcccgccgacgccgcacggcttgctggggctgggctcttcctcgcggaagtggggaggaggcggttgcggttagtggaccgggaccggtaggggtgctgttgccatcatggctgaccccgacccccggtaccctcgctcctcgatcgaggacgacttcaactatggcagcagcgtggcctccgccaccgtgcacatccgaatggcctttctgagaaaagtctacagcattctttctctgcaggttctcttaactacagtgacttcaacagtttttttatactttgagtctgtacggacatttgtacatgagagtcctgccttaattttgctgtttgccctcggatctctgggtttgatttttgcgttgattttaaacagacataagtatccccttaacctgtacctactttttggatttacgctgttggaagctctgactgtggcagttgttgttactttctatgatgtatatattattctgcaagctttcatactgactactacagtattttttggtttgactgtgtatactctacaatctaagaaggatttcagcaaatttggagcagggctgtttgctcttttgtggatattgtgcctgtcaggattcttgaagttttttttttatagtgagataatggagttggtcttagccgctgcaggagcccttcttttctgtggattcatcatctatgacacacactcactgatgcataaactgtcacctgaagagtacgtattagctgccatcagcctctacttggatatcatcaatctattcctgcacctgttacggtttctggaagcagttaataaaaagtaattaaaagtatctcagctcaactgaagaacaacaaaaaaaatttaatgagaaaaaaggattaaagtaattggaagcagtatatagaaactgtttcattaagtaataaagtttgaaacaatgattaaatactgttacaatctttatttgtatcatatgtaattttgagagctttaaaatcttactattctttatgatacctcatttctaaatccttgatttaggatctcagttaagagctatcaaaattctattaaaaatgcttttctggctgggcacagtggctcacgcctgtaatcccaccactttgggagaccgaggcaggtggatcacgaggtcaagaggttgagaccatcctggccaacatggtgaaaccccgtctctactaaaaatacaaaaattagctggatgtggtggcacacacctgtagtcccagctagtcaagaggctgaggccagagaatcgcttgaacctgggaggtggaggttgcattgagccaagatcacgccactgcattccagcctggtgacagagcgagactcagtctcaaaaaaaaaaaaaaaatttttcttcctaaattagccacgcatagcagttcgtttgcaattcaaaaataattttatgagtagataagaatatcagtttaccgttgtctagtgattttatctaaattttccctgaattattaagtaatattgatttggctttgattctgaagtagtagagtctttaccattataaactgtaaatctctttttgcttaaaaggaaaaaaatgtaaaagataaattccacagagaattattcagtattacattaaaatgttaatgactttttattttaaattgtactaacattaaaagttggcctgaaagtcagatattatgacaaaatttgacattaattgtttttaaagtatagatttcatttgaaattatagaatggtaatgtggttagaggacaccaaagatactgggtcatcagccattaagtatatctatttcaaaattaaaatatttgggaagtattgtcttatggtttcatttgtgttggtccacacagcatgttaggtcagtgtaccagtaaccaatgaaattttgtcaaattccctcactgtactagtttgttaggctgccataacaaagttctacagcttgggtggcttcaacaagaaatttgttttcccacagttctggaggctaaaagtccaagatcaaggtgttagcagggttggtttcctttgaggcctttctctttgatttgtagatggccatcttctccctgtgtctttaaatggccttccctctgtacttgtctgtgcccaaatttcttcttcttatgaggacaccagtcatactggattagggcccacactgaggacctcatttttccttaattatctctttcaaaacctatctccaaatacagtcacattctgaagtgctgggattaggatttcttcatgtgaattttggggggactacaactcagcccataacaccccctaagtatttcccagctattaagttgaaataaacttgtagtatcaatttaagcttgcatgatttgtagatgtaaatttgactttattatcattaactgttgaattatcaagtgtatgatgcagtgcaatcaagtttaacagcatggtgggtaagagcatctagattagaatcattgcagtccaaccaggtgcttaagtgacatttggcgaattatttatccttccttaggtcttctgcctcatcttcataatgggaataatgatgtctagcttattgggctgttataaggattaaatgagatagataaataaactaaactaagtgcttaattaatgtcagctgatggtattaataccattttctttttttttttttttttttttttttaatttatttttttattgataattcttggttgtttctcacagagggggatttggcagggtcatgggacaatagtggagggaaggtcagcagataaacaagtgaacaaaggtctctggttttcctaggcagaggaccctgcagccttccgcagtgtttgtgtccctgattacttgagattagggattggtgatgactcttaacgagcatgctgccttcaagcatctgt

SEQ ID NO: 189095 - DNA, 854 bp, Artificial Sequence
  derived and/or modified sequence
gctgttgccatcatggctgaccccgacccccggtaccctcgctcctcgatcgaggacgacttcaactatggcagcagcgtggcctccgccaccgtgcacatccgaatggcctttctgagaaaagtctacagcattctttctctgcaggttctcttaactacagtgacttcaacagtttttttatactttgagtctgtacggacatttgtacatgagagtcctgccttaattttgctgtttgccctcggatctctgggtttgatttttgcgttgattttaaacagacataagtatccccttaacctgtacctactttttggatttacgctgttggaagctctgactgtggcagttgttgttactttctatgatgtatatattattctgcaagctttcatactgactactacagtattttttggtttgactgtgtatactctacaatctaagaaggatttcagcaaatttggagcagggcagagtgctcttttggtggatattgtgcctgtcaggattcttgaagtttttttttatagtgagataatggagttggtcttagccgctgcaggagcccttcttttctgtggattcatcatctatgacacacactcactgatgcataaactgtcacctaagagtacgtattagctgccatcagcctctacttggatatcatcaatctattcctgcacctgttacggtttctggaagcagttaataaaaagtaattaaaagtatctcagctcaactgaagaacaacaaaaaaaatttaatgagaaaaaaggattaaagtaattggaagcagtatatagaaactgtttcattaagtaataaagtttgaaacaatgattaaa

SEQ ID NO: 189096 - protein, 166 aa, Artificial Sequence
  derived and/or modified sequence
MAAIPPDSWQPPNVYLETSMGIIVLELYWKHAPKTCKNFAELARRGYYNGTKFHRIIKDFMIQGGDPTGTGRGGASIYGKQFEDELHPDLKFTGAGILAMANAGPDTNGSQFFVTLAPTQWLDGKHTIFGRVCQGIGMVNRVGMVETNSQDRPVDDVKIIKAYPSG

SEQ ID NO: 189097 - DNA, 501 bp, Artificial Sequence
  derived and/or modified sequence
atggcagccatcccccctgatagttggcagcctccaaacgtgtacttagagacgtccatgggtatcattgtactcgaactgtattggaaacatgcgcctaaaacctgcaagaatttcgccgagctggctagacgtggatactacaacggaaccaagtttcatagaatcattaaagatttcatgatccaagggggcgatcccactggcaccgggcgtggaggcgcttctatctacggaaagcagtttgaggatgaactgcacccagatctgaaattcacaggagccggaattctggcaatggctaatgcaggcccagacactaatggcagccagttttttgtgacgctagcacccacacagtggctcgatggcaagcataccatctttggtagggtttgtcagggaattgggatggtgaatagagtgggcatggtggaaaccaacagtcaggaccgacctgtggacgacgtgaaaataataaaggcatacccatccggatag

SEQ ID NO: 189098 - DNA, 501 bp, Artificial Sequence
  derived and/or modified sequence
atggccgccatccccccagacagctggcagcccccaaatgtgtacctggagacctccatgggcatcatcgtgctggagctgtactggaagcacgcccccaagacctgcaagaactttgctgagctggcccggcggggctactacaacggcaccaagttccaccgcatcatcaaggacttcatgatccagggcggggaccccaccggcaccggccggggcggggccagcatctacggcaagcagtttgaagatgagctgcacccagacctgaagttcaccggggccggcatcctggccatggccaatgccggccctgacaccaacggcagccagttctttgtgaccctggcccccacccagtggctggatggcaagcacaccatcttcggccgggtgtgccagggcatcggcatggtgaacagagtgggcatggtggagaccaacagccaggacaggcctgtggatgatgtgaagatcatcaaggcctaccccagcggctag

SEQ ID NO: 189099 - DNA, 501 bp, Artificial Sequence
  derived and/or modified sequence
atggccgccatcccccccgacagctggcagccccccaacgtgtacctggagacgagcatgggtataatagtcctagagctgtattggaagcacgctcctaagacgtgcaaaaatttcgcagagctagcacgtaggggctattataacggaactaagtttcacagaatcatcaaagacttcatgatacagggtggggatccaactggaaccggaaggggaggcgctagcatctacggcaaacagtttgaggacgaactgcaccctgacctgaaattcacaggggccggaatcctcgccatggctaatgccggacccgatactaatgggtcccaattctttgttaccctggctcccactcagtggttggacggcaaacacactatctttggtcgggtctgccagggcatcggcatggttaatcgcgtgggcatggtagagacaaatagccaagatcgccctgtagacgacgtgaagattattaaggcctacccatctgggtag

SEQ ID NO: 189100 - DNA, 1739 bp, Artificial Sequence
  derived and/or modified sequence
cggtatcgccacttggagaccaccgcgaatgaagtttgcattttcctctgttcttgagcccagcttcttctcgtctcccaccccagcttcccggcattggaagaagggaccgtcctcttccttgtcttggccacccaaatcctggtatcgaaagggttgaacggaccggaagtgtgcagcagcgacgggtccccagctaatcgacgccggaagtagcaattactagacaagcattccgccgccggcttcgctatggcggcaattcccccagattcctggcagccacccaacgtttacttggagaccagcatgggaatcattgtgctggagctgtactggaagcatgctccaaagacctgtaagaactttgctgagttggctcgtcgaggttactacaatggcacaaaattccacagaattatcaaagacttcatgatccaaggaggtgacccaacagggacaggtcgaggtggtgcatctatctatggcaaacagtttgaagatgaacttcatccagacttgaaattcacgggggctggaattctcgcaatggccaatgcggggccagataccaatggcagccagttctttgtgaccctcgcccccacccagtggcttgacggcaaacacaccatttttggccgagtgtgtcagggcataggaatggtgaatcgcgtgggaatggtagaaacaaactcccaggaccgccctgtggacgacgtgaagatcattaaggcatacccttctgggtagacttgctaccctcttgagcagctcttctgagatggccccagtgaaccagcttctagatgacatagaatgacatgtaatgctaaattcattttggctttgcaagtcatgaagcttaggaggcctggcatcttgggtgagttagagatggaagtacattttaataggatgcttcttttctcttcccccagtgcctaggttgccagagcatttgcacaaatgcccctgtttatcaataggtgactacttactacacatgaaccataatgctgcttcttgtgcatgtctgctctgatatacgtcgaacaatgtagcagccactgtcatttctcagtggttttgcctaaccaaacttcttcctaaggagatttatattctggcctacacagcagtccttgatggctgacagccacagaattccaaaccaagtagtgtctgtcagccctcttaactctgtgcacgccctatttcagtcttttacatttgttcttctagggaatgtatgcatctctatatatattttccctctcaaaaccagaacatcaacagtgctgtttctgacacttcagacatcccacgcaaagccacattgaatttttgccaaatgaaaaacacatccaacaatcaagtttctaagaaggtgtcaagtggggaataataataatgtataataatcaagaaattagtttattaaaaggaagcagaagcattgaccattttttcccagagaagaggagaaatctgtagtgagcaaaggacagaccatgaatcctccttgagaagtagtactctcagaaaggagaagcgccactcaagttcttttaacccaagactttagagaaattaggtccaagatttttatatgttcagttgtttatgtataaaaataactttctggattttgtggggaggagcaggagaggaaggaagttaatacctatgtaatacatagaaacttccacaataaaatgccattgatggttgaaatt

SEQ ID NO: 189101 - DNA, 501 bp, Artificial Sequence
  derived and/or modified sequence
atggcagccatcccaccagattcatggcagcctcccaatgtttacctggaaaccagcatgggcatcatcgtgttagagctgtactggaaacatgcccctaagacatgcaagaacttcgcggagttggcaagaagaggctattataatggcaccaagtttcacaggattatcaaggactttatgatccagggcggtgatcccaccggcaccggacggggaggggcttccatctacgggaagcagtttgaagacgaactccatcccgaccttaagttcaccggagcgggtatacttgccatggccaacgcagggccagatacaaatgggtctcagtttttcgttactctggcccctacacagtggttggacggcaagcacaccatcttcgggagagtgtgtcaagggatcgggatggttaatagggtgggtatggtagagacaaactcacaggataggcccgttgatgatgtcaaaatcataaaagcctatccttccggttag

SEQ ID NO: 189102 - DNA, 501 bp, Artificial Sequence
  derived and/or modified sequence
atggccgccatcccccccgacagctggcagccccccaacgtgtacctggagaccagcatgggcatcatcgtgctggagctgtactggaagcacgcccccaagacctgcaagaacttcgccgagctggccagaagaggctactacaacggcaccaagttccacagaatcatcaaggacttcatgatccagggcggcgaccccaccggcaccggcagaggcggcgccagcatctacggcaagcagttcgaggacgagctgcaccccgacctgaagttcaccggcgccggcatcctggccatggccaacgccggccccgacaccaacggcagccagttcttcgtgaccctggcccccacccagtggctggacggcaagcacaccatcttcggcagagtgtgccagggcatcggcatggtgaacagagtgggcatggtggagaccaacagccaggacagacccgtggacgacgtgaagatcatcaaggcctaccccagcggctag

SEQ ID NO: 189103 - protein, 170 aa, Artificial Sequence
  derived and/or modified sequence
MASVSSATFSGHGARSLLQFLRLVGQLKRVPRTGWVYRNVQRPESVSDHMYRMAVMAMVIKDDRLNKDREAMKQITQLLPEDLRKELYELWEEYETQSSAEAKFVKQLDQCEMILQASEYEDLEHKPGRLQDFYDSTAGKFNHPEIVQLVSELEAERSTNIAAAASEPHS

SEQ ID NO: 189104 - protein, 204 aa, Artificial Sequence
  derived and/or modified sequence
MASVSSATFSGHGARSLLQFLRLVGQLKRVPRTGWVYRNVQRPESVSDHMYRMAVMAMVIKDDRLNKDRCVRLALVHDMAECIVGDIAPADNIPKEEKHRREEEAMKQITQLLPEDLRKELYELWEEYETQSSAEAKFVKQLDQCEMILQASEYEDLEHKPGRLQDFYDSTAGKFNHPEIVQLVSELEAERSTNIAAAASEPHS

SEQ ID NO: 189105 - DNA, 513 bp, Artificial Sequence
  derived and/or modified sequence
atggccagcgtgagcagcgccaccttcagcggccacggcgccagaagcctgctgcagttcctgagactggtgggccagctgaagagagtgcccagaaccggctgggtgtacagaaacgtgcagagacccgagagcgtgagcgaccacatgtacagaatggccgtgatggccatggtgatcaaggacgacagactgaacaaggacagagaggccatgaagcagatcacccagctgctgcccgaggacctgagaaaggagctgtacgagctgtgggaggagtacgagacccagagcagcgccgaggccaagttcgtgaagcagctggaccagtgcgagatgatcctgcaggccagcgagtacgaggacctggagcacaagcccggcagactgcaggacttctacgacagcaccgccggcaagttcaaccaccccgagatcgtgcagctggtgagcgagctggaggccgagagaagcaccaacatcgccgccgccgccagcgagccccacagctag

SEQ ID NO: 189106 - DNA, 615 bp, Artificial Sequence
  derived and/or modified sequence
atggccagcgtgagcagcgccaccttcagcggccacggcgccagaagcctgctgcagttcctgagactggtgggccagctgaagagagtgcccagaaccggctgggtgtacagaaacgtgcagagacccgagagcgtgagcgaccacatgtacagaatggccgtgatggccatggtgatcaaggacgacagactgaacaaggacagatgcgtgagactggccctggtgcacgacatggccgagtgcatcgtgggcgacatcgcccccgccgacaacatccccaaggaggagaagcacagaagagaggaggaggccatgaagcagatcacccagctgctgcccgaggacctgagaaaggagctgtacgagctgtgggaggagtacgagacccagagcagcgccgaggccaagttcgtgaagcagctggaccagtgcgagatgatcctgcaggccagcgagtacgaggacctggagcacaagcccggcagactgcaggacttctacgacagcaccgccggcaagttcaaccaccccgagatcgtgcagctggtgagcgagctggaggccgagagaagcaccaacatcgccgccgccgccagcgagccccacagctag

SEQ ID NO: 189107 - DNA, 513 bp, Artificial Sequence
  derived and/or modified sequence
atggctagcgtatcgtccgccactttctctggacacggagccaggtctctgctgcaatttctcagactggtcggacagctgaagagggtacccaggaccgggtgggtatacaggaatgtccagaggcctgaatcagtcagcgaccacatgtataggatggccgtgatggctatggttatcaaggatgaccggttaaacaaagacagagaggccatgaaacagatcacccagttgctccctgaagatctcagaaaggaactgtacgagctgtgggaggaatatgaaactcagagttctgccgaagccaagtttgtgaaacaactggatcagtgtgaaatgatacttcaagcgtctgaatatgaggaccttgagcacaagccggggaggctgcaggacttttatgattcaacagctggaaagttcaatcaccccgaaatcgtccaactagttagtgagctggaagccgaacggtcgacgaacatcgccgccgccgccagtgaaccccactcatag

SEQ ID NO: 189108 - DNA, 615 bp, Artificial Sequence
  derived and/or modified sequence
atggcctccgtctcatctgctacttttagcggacatggcgcaaggtcgctgttgcagtttttgcggctggtgggccagctgaagcgtgtgcctcgtacaggctgggtttatcgcaacgtccagagacctgaatctgtaagtgaccatatgtacagaatggcagtgatggctatggtgatcaaagacgaccggctgaacaaagacaggtgtgtcaggctagccctggtgcacgatatggctgaatgtatcgtgggcgatatagccccggccgataacatccccaaagaggagaaacaccgcagagaggaggaggctatgaagcagatcactcagcttctccctgaggatttgcgtaaagaactttacgaactgtgggaagagtacgaaacacagtccagtgccgaggccaaattcgtaaagcaactcgaccagtgtgaaatgattctccaggctagcgagtatgaggacctcgagcacaaacccggtcgcctccaggacttttatgattccacagcagggaagtttaatcacccagaaattgtgcagctggtaagcgaactcgaagcagagagatccaccaacatcgctgctgccgcttccgagccgcattcctag

SEQ ID NO: 189109 - DNA, 1351 bp, Artificial Sequence
  derived and/or modified sequence
cttcgccgcggcctgctccgcccagccggggtcggtggccgcatggcttcggtctcctctgcgaccttctcgggccacggggctcggtccctactgcagttcctgcggctggtagggcagctcaagagagtcccacgaactggctgggtatacagaaatgtccagaggccggagagcgtttcagatcacatgtaccggatggcagttatggctatggtgatcaaagatgaccgtcttaacaaagaccgggaagctatgaagcagataacccagctcctaccagaggacctcagaaaggagctctatgaactttgggaagagtacgagacccaatctagtgcagaagccaaatttgtgaagcagctagaccaatgtgaaatgattcttcaagcatctgaatatgaagaccttgaacacaaacctgggagactgcaagacttctatgattccacagcaggaaaattcaatcaccctgagatagtccagcttgtttctgaacttgaggcagaaagaagcactaacatagctgcagctgccagtgagccacactcctgagacactctctaaattgctgcactcctgtaacaaacattatttttccatttcattgtattgtgttttgccattgttggtctgttgatttccctagatgtgagtctgtttgttttcaattgtctgaacttcagcaagaaatgtgatacaacttgggcactaaaagaagccacagaacaggaagcggtcatgaaagtgccatggatgaacactggaggtggcagtgcctgtttatgaactaaataaataaatattaaacacctaaaatattagaatatttattggagatttaaaatcatcttattctgacttaattaccgatatccccgaaggctaggttcattgaataatagaaaatttcattatgattgcttttaagaacagattcttcagctgatttagtgataagaatccagaaaagaaaatgtactagtgatgtattctctccccagatgaaattgctgccttattcagatttactctcttgagccagattttgaatttcactgcagactgcttcagacttctaatcataggcttgtaaacctactaataggctctgcccctcttcccaatactttttgtcatttagagatataaaccggggcatataaaaatgcaacttgtattcctttgtatatttttccctgtctgacttataaatcttgagacctttattgtaaaagcatgtatcatcaggtgagaaatataaataggaactggggtcattgagcctcaggtagggaatatatcaacccgatttcttcctctcttttcccttttataggataaataatcc

SEQ ID NO: 189110 - DNA, 1615 bp, Artificial Sequence
  derived and/or modified sequence
gaagtgggggaggaggaggaggagttggaaggggaggaggaagagggggagcaggaagaggggcagaaggaagaagaagagggggaggagaaagagatagaagagtaagaggagggggaagaaagacaaggggaaggggaggaggaggaggacggggaggagcttcgccgcggcctgctccgcccagccggggtcggtggccgcatggcttcggtctcctctgcgaccttctcgggccacggggctcggtccctactgcagttcctgcggctggtagggcagctcaagagagtcccacgaactggctgggtatacagaaatgtccagaggccggagagcgtttcagatcacatgtaccggatggcagttatggctatggtgatcaaagatgaccgtcttaacaaagaccgatgtgtacgcctagccctggttcatgatatggcagaatgcatcgttggggacatagcaccagcagataacatccccaaagaagaaaaacataggcgagaagaggaagctatgaagcagataacccagctcctaccagaggacctcagaaaggagctctatgaactttgggaagagtacgagacccaatctagtgcagaagccaaatttgtgaagcagctagaccaatgtgaaatgattcttcaagcatctgaatatgaagaccttgaacacaaacctgggagactgcaagacttctatgattccacagcaggaaaattcaatcaccctgagatagtccagcttgtttctgaacttgaggcagaaagaagcactaacatagctgcagctgccagtgagccacactcctgagacactctctaaattgctgcactcctgtaacaaacattatttttccatttcattgtattgtgttttgccattgttggtctgttgatttccctagatgtgagtctgtttgttttcaattgtctgaacttcagcaagaaatgtgatacaacttgggcactaaaagaagccacagaacaggaagcggtcatgaaagtgccatggatgaacactggaggtggcagtgcctgtttatgaactaaataaataaatattaaacacctaaaatattagaatatttattggagatttaaaatcatcttattctgacttaattaccgatatccccgaaggctaggttcattgaataatagaaaatttcattatgattgcttttaagaacagattcttcagctgatttagtgataagaatccagaaaagaaaatgtactagtgatgtattctctccccagatgaaattgctgccttattcagatttactctcttgagccagattttgaatttcactgcagactgcttcagacttctaatcataggcttgtaaacctactaataggctctgcccctcttcccaatactttttgtcatttagagatataaaccggggcatataaaaatgcaacttgtattcctttgtatatttttccctgtctgacttataaatcttgagacctttattgtaaaagcatgtatcatcaggtgagaaatataaataggaactggggtcattgagcctcaggtagggaatatatcaacccgatttcttcctctcttttcccttttataggataaataatcc

SEQ ID NO: 189111 - DNA, 513 bp, Artificial Sequence
  derived and/or modified sequence
atggcctctgtgagcagcgccaccttcagcggccacggggcccggagcctgctgcagttcctgcggctggtgggccagctgaagagggtgcccaggacaggctgggtgtacagaaatgtgcagaggcctgagagcgtgtctgaccacatgtacaggatggctgtgatggccatggtgatcaaggatgaccggctgaacaaggaccgggaggccatgaagcagatcacccagctgctgcctgaggacctgaggaaggagctgtatgagctgtgggaggagtatgagacccagagcagcgctgaggccaagtttgtgaagcagctggaccagtgtgagatgatcctgcaggcctctgaatatgaggacctggagcacaagccaggccgcctgcaggacttctatgacagcacagctgggaagttcaaccaccctgagatcgtgcagctggtgtctgagctggaggccgagaggagcaccaacattgctgctgctgccagcgagccccacagctag

SEQ ID NO: 189112 - DNA, 615 bp, Artificial Sequence
  derived and/or modified sequence
atggcctctgtgagcagcgccaccttcagcggccacggggcccggagcctgctgcagttcctgcggctggtgggccagctgaagagggtgcccaggacaggctgggtgtacagaaatgtgcagaggcctgagagcgtgtctgaccacatgtacaggatggctgtgatggccatggtgatcaaggatgaccggctgaacaaggacagatgtgtgcggctggccctggtgcatgacatggctgaatgtattgtgggggacatcgccccagctgacaacatccccaaggaggagaagcaccggcgggaggaggaggccatgaagcagatcacccagctgctgcctgaggacctgaggaaggagctgtatgagctgtgggaggagtatgagacccagagcagcgctgaggccaagtttgtgaagcagctggaccagtgtgagatgatcctgcaggcctctgaatatgaggacctggagcacaagccaggccgcctgcaggacttctatgacagcacagctgggaagttcaaccaccctgagatcgtgcagctggtgtctgagctggaggccgagaggagcaccaacattgctgctgctgccagcgagccccacagctag

SEQ ID NO: 189113 - DNA, 513 bp, Artificial Sequence
  derived and/or modified sequence
atggccagcgtgagcagcgccaccttcagcggccacggcgcccggtcactgctccagtttctgagactggtgggccaactgaagcgagttccacggacagggtgggtataccgcaacgtacagagacctgagtctgtctccgaccatatgtatcgaatggcagttatggcgatggtgattaaggacgatcgactcaacaaggatcgggaagctatgaaacagatcacccagcttttacccgaagatctgcgcaaggaactgtatgagctgtgggaggagtacgagactcagtcctccgctgaagccaagttcgtgaaacaattagatcagtgcgagatgatcctgcaagcctcggaatatgaggacctggagcacaagcccggaagactccaggacttttatgactctactgctggcaagttcaaccatcccgagatagtccagcttgtttccgagctggaagccgagcgaagcacgaatattgccgctgctgcatctgaacctcacagttag

SEQ ID NO: 189114 - DNA, 615 bp, Artificial Sequence
  derived and/or modified sequence
atggccagcgtgagcagcgccaccttcagcggccacggcgcccggagcctgctgcagtttctgagactggtgggacagctcaaaagggtccccagaaccggttgggtgtataggaacgtacagagacccgaaagcgtctctgatcatatgtataggatggcagtgatggcaatggtcataaaagacgaccgcctcaacaaggatcgttgcgtcagactagccttggtgcatgacatggctgagtgtattgtgggcgacattgcacccgccgataatatacccaaagaggaaaagcatagacgagaggaggaggccatgaaacagatcacgcagctcctgccagaagaccttagaaaggagctgtatgaactgtgggaggaatacgagacacaaagcagcgctgaggctaagttcgtgaaacagctggatcagtgtgagatgatccttcaggcatccgaatatgaggatttggagcacaagcccggcaggctccaggatttttacgacagtacagccggcaaatttaaccacccggagattgtccagctggtctccgaactggaggccgaacggtctactaatatcgcagctgcagcctctgagccccattcctag

SEQ ID NO: 189115 - DNA, 513 bp, Artificial Sequence
  derived and/or modified sequence
atggcctcagtgtccagcgcaacgtttagtggtcatggggctcgctcgctgcttcagtttctgaggctcgtcggacagctcaagcgagtccctaggacaggctgggtgtaccgaaatgtgcagcggccagagagcgtgtctgaccacatgtacagaatggctgtaatggcaatggtgatcaaggacgacagactgaataaggacagggaggcgatgaagcagattactcaacttctgcctgaggacctgcggaaagaactgtacgagctatgggaggagtatgaaacccagtcatctgccgaggccaaatttgttaaacagctggaccagtgcgagatgattcttcaggccagcgaatatgaggacttggaacataaaccagggaggcttcaggacttttatgactccacagccggaaaattcaaccatcctgaaatcgtgcaactggtctccgaactggaagcagaaagatctacaaatattgccgcagcggcatctgaaccacacagttag

SEQ ID NO: 189116 - DNA, 615 bp, Artificial Sequence
  derived and/or modified sequence
atggcctcagtaagttccgctaccttcagcgggcacggcgcaagaagtctcctccagttcctcagactggtggggcagttaaaaagggtcccaagaaccggttgggtgtacaggaatgttcagaggccagagtccgtgagtgatcacatgtaccggatggccgtgatggccatggtgatcaaagatgaccgtctgaataaggaccggtgcgtcagactcgcattagtgcacgatatggctgagtgtattgtgggcgatattgcacctgctgacaacattcccaaggaggagaaacataggcgtgaggaggaggcaatgaaacagatcacccaactcctgcctgaagacctccggaaagagctctacgagctgtgggaggaatacgaaacccagagcagtgccgaagctaagtttgttaaacaactggaccaatgcgagatgattctccaggcgtcagagtacgaggacctagaacataagcccggtagacttcaagacttctatgatagcaccgccggtaagtttaaccatccagagatagtgcagctggtgagcgaactcgaggcagagcggtcgaccaacattgccgctgcggcatccgaaccccatagctag

SEQ ID NO: 189117 - DNA, 513 bp, Artificial Sequence
  derived and/or modified sequence
atggcatcagttagttcagccacgttcagtggccacggtgctaggtctctgctacagtttctccgcctggtaggacagctgaagagagttcctcgaaccggatgggtgtatcgtaacgtccagaggcctgaatccgtgagtgatcatatgtaccggatggcagtcatggctatggtcattaaggacgataggcttaataaggacagagaggcaatgaagcagatcacacagctgctaccagaggatcttagaaaagagttgtatgagctctgggaagaatatgagactcaaagctccgcagaggctaaatttgtgaaacaactggaccagtgcgagatgatcctgcaggcctcggagtatgaagacttggagcataaaccaggccggctgcaggatttttacgattcaacagccggtaagttcaatcaccctgagatcgtgcaactggtgagcgagcttgaagcagaaaggagtacgaatattgctgctgccgcttcagagccacacagctag

SEQ ID NO: 189118 - DNA, 1513 bp, Artificial Sequence
  derived and/or modified sequence
gaagtgggggaggaggaggaggagttggaaggggaggaggaagagggggagcaggaagaggggcagaaggaagaagaagagggggaggagaaagagatagaagagtaagaggagggggaagaaagacaaggggaaggggaggaggaggaggacggggaggagcttcgccgcggcctgctccgcccagccggggtcggtggccgcatggcttcggtctcctctgcgaccttctcgggccacggggctcggtccctactgcagttcctgcggctggtagggcagctcaagagagtcccacgaactggctgggtatacagaaatgtccagaggccggagagcgtttcagatcacatgtaccggatggcagttatggctatggtgatcaaagatgaccgtcttaacaaagaccgagaagctatgaagcagataacccagctcctaccagaggacctcagaaaggagctctatgaactttgggaagagtacgagacccaatctagtgcagaagccaaatttgtgaagcagctagaccaatgtgaaatgattcttcaagcatctgaatatgaagaccttgaacacaaacctgggagactgcaagacttctatgattccacagcaggaaaattcaatcaccctgagatagtccagcttgtttctgaacttgaggcagaaagaagcactaacatagctgcagctgccagtgagccacactcctgagacactctctaaattgctgcactcctgtaacaaacattatttttccatttcattgtattgtgttttgccattgttggtctgttgatttccctagatgtgagtctgtttgttttcaattgtctgaacttcagcaagaaatgtgatacaacttgggcactaaaagaagccacagaacaggaagcggtcatgaaagtgccatggatgaacactggaggtggcagtgcctgtttatgaactaaataaataaatattaaacacctaaaatattagaatatttattggagatttaaaatcatcttattctgacttaattaccgatatccccgaaggctaggttcattgaataatagaaaatttcattatgattgcttttaagaacagattcttcagctgatttagtgataagaatccagaaaagaaaatgtactagtgatgtattctctccccagatgaaattgctgccttattcagatttactctcttgagccagattttgaatttcactgcagactgcttcagacttctaatcataggcttgtaaacctactaataggctctgcccctcttcccaatactttttgtcatttagagatataaaccggggcatataaaaatgcaacttgtattcctttgtatatttttccctgtctgacttataaatcttgagacctttattgtaaaagcatgtatcatcaggtgagaaatataaataggaactggggtcattgagcctcaggtagggaatatatcaacccgatttcttcctctcttttcccttttataggataaataatcc

SEQ ID NO: 189119 - DNA, 513 bp, Artificial Sequence
  derived and/or modified sequence
atggccagcgtgagcagcgccaccttcagcggccacggcgcccggagccttctgcagttcctgcggctggttgggcagctgaaacgggtgccacggaccgggtgggtgtatcggaacgtccaaagaccagagtccgtgtctgatcacatgtaccgaatggctgtgatggccatggttattaaggacgaccgcctcaacaaagatcgcgaggccatgaagcaaattacgcagctgctgccagaggaccttcggaaggaactctacgaactgtgggaggaatatgaaacacagtcgtctgcagaggcaaaatttgtaaaacagttagaccagtgtgagatgatactgcaggcttcagaatacgaagatttggaacacaagccgggtcgcctgcaggatttctacgattcaacggcaggcaagtttaaccacccagagatcgtgcagctagtgtccgaactagaagcagaacgcagtaccaatattgcggccgccgcctcagagccccacagttag

SEQ ID NO: 189120 - DNA, 513 bp, Artificial Sequence
  derived and/or modified sequence
atggcaagtgtcagctccgccacattctccggacacggcgcaaggagtctcctccaattcttgaggttggtggggcagttgaaacgggtgcccagaaccggatgggtgtatcgcaatgtccagaggcctgagtctgtgagcgatcacatgtaccgcatggccgttatggccatggttatcaaggacgatcgcctgaataaagaccgggaggccatgaagcaaattacgcagctgctaccagaggatctccgaaaagaactgtacgaactctgggaggagtatgagacccagtcaagtgcagaagctaagtttgtgaagcagctggatcagtgtgagatgattttgcaagcatctgagtacgaggatctggagcacaagcctggtcgattacaggatttttacgacagcacagcgggtaagttcaatcaccccgagattgtgcaactcgtgagtgaattagaggccgagagatctaccaacattgcggctgccgcaagcgaaccccattcctag

SEQ ID NO: 189121 - protein, 77 aa, Artificial Sequence
  derived and/or modified sequence
MLKIRLKRCGRKKQTSFKIVVMNNLDKRDGQAIEELGFMNPRTKEKYLNINKINHYLRLGAKPTKTVFDLLNKAKII

SEQ ID NO: 189122 - protein, 77 aa, Artificial Sequence
  derived and/or modified sequence
MVKLRLKRYGRKGQVTYRIVAMNNLSRRDGKAIEELGFYNPRTNESSLNIANIKRRIEQGAQPTNTVRYILAKANIL

SEQ ID NO: 189123 - protein, 85 aa, Artificial Sequence
  derived and/or modified sequence
MVKLRLKRCGRKQQAVYRIVAIDVRSRREGRDLRKVGFYDPIKNQTCLNVPAILYFLEKGAQPTRTVYDILRKAEFFKEKERTLS

SEQ ID NO: 189124 - protein, 85 aa, Artificial Sequence
  derived and/or modified sequence
MVKLRLKRCGRKQQAIYRIVAIDVRSRREGRDLRKVGFYDPIKNQTCLNVPAILYFLEKGAQPTRTVYDILRKAEFFKDKERTLS

SEQ ID NO: 189125 - protein, 79 aa, Artificial Sequence
  derived and/or modified sequence
MLKLRLKRSGRKKQPSYRLVVMENTTRRDGRPVEQVGYYNTITKESYFDVIKIKKWLNYGAKPTQTVLNLLKKAKIIDQ

SEQ ID NO: 189126 - protein, 82 aa, Artificial Sequence
  derived and/or modified sequence
MVKLRLKRYGRKQQPSYRIVAMDSRSKRDGKAIEELGFYNPITNETRIDIAKILKRLKQGAQTTRTVKNILNEAQIIAKENS

SEQ ID NO: 189127 - protein, 88 aa, Artificial Sequence
  derived and/or modified sequence
MVKLRLKRCGRKQRAVYRIVAIDVRSRREGRDLRKVGFYDPITNQTYLNLPAILDFLKKGAQPTRTVHDISKKAGIFTELNLNKTKLN

SEQ ID NO: 189128 - protein, 88 aa, Artificial Sequence
  derived and/or modified sequence
MVKLRLKRCGRKQRAVYRIVAIDVRSRREGKDLQKVGFYDPIKNQTYLNVPAILYFLEKGAQPTETVQDILKKAEVFKELRLNQPKFN

SEQ ID NO: 189129 - protein, 85 aa, Artificial Sequence
  derived and/or modified sequence
MVKLRLKRCGRKQRAVYRIVAIDVRSRREGKDLRKVGFYDPIKNQTYLNVPAILYFLEKGAQPTGTVQDILKKAEVFKELRPNQS

SEQ ID NO: 189130 - protein, 89 aa, Artificial Sequence
  derived and/or modified sequence
AVKIRLKRMGAKKSPFYRIVVADSRSPRDGRFIETVGTYNPVAKPAEVKIDEELALKWLQTGAKPSDTVRNLFSSQGIMEKFHNAKQGK

SEQ ID NO: 189131 - protein, 82 aa, Artificial Sequence [sequence omitted]

SEQ ID NO: 189132 - protein, 82 aa, Artificial Sequence
  derived and/or modified sequence
MVTIRLSRGGAKKRPFYQIVVADSRSPRDGRFIERVGFFNPIAQGNAERLRINLERVNHWVAQGASLSDRVASLVKEAQKAA

SEQ ID NO: 189133 - protein, 76 aa, Artificial Sequence
  derived and/or modified sequence
MTVIRLTRIGRKKKPFYRVVVTDSRKRRDGGWIESIGYYNPLSEPKDIKIDKERLNYWKGVGAKMSERVEKLSQKA

SEQ ID NO: 189134 - protein, 89 aa, Artificial Sequence
  derived and/or modified sequence
MRMGRVHYPLYRIVAVDSRVKRNGKYIALIGHLNPALKENKCKLDETVALDWLNKGAIPTDTVRSLFSESGLWKKFIESKNKKETSPKK

SEQ ID NO: 189135 - protein, 88 aa, Artificial Sequence
  derived and/or modified sequence
MRMGRVHYPTYRIVAVDSRVKRDGKYIALIGHLNPALKENKCKIDEAVALEWLNKGAKPTDTVRSLFSQTGLWKKFVESKKKPVAKSK

SEQ ID NO: 189136 - protein, 82 aa, Artificial Sequence
  derived and/or modified sequence
MVTIRLARHGAKKRPFYQVVVTDSRNARNGRFIERVGFFNPIASEKEEGTRLDLDRIAHWVGQGATISDRVAALIKEVKKAA

SEQ ID NO: 189137 - protein, 82 aa, Artificial Sequence
  derived and/or modified sequence
MIKLRLKRFGKKREVSYRIVAMHSTTRRDGRPLEELGFYNPRTDETRLDVPAIVKRLKEGAQPTDTVRSILTKAQVFEQLKA

SEQ ID NO: 189138 - protein, 99 aa, Artificial Sequence
  derived and/or modified sequence
MVHLTTLLCKAYRGGHLTIRLALGGCTNRPFYRIVAAHNKCPRDGRFVEQLGSYDPLPNSHGEKLVALNLDRIRHWIGCGAHLSKPMEKLLGLKYSHVF

SEQ ID NO: 189139 - protein, 137 aa, Artificial Sequence
  derived and/or modified sequence
MVHLTTLLCKAYRGGHLTIRLALGGCTNRPFYRIVAAHNKCPRDGRFVEQLGSYDPLPNSHGEKLVALNLDRIRHWIGCGAHLSKPMEKLLGLAGFFPLHPMMITNAERLRRKRAREVLLASQKTDAEATDTEATET

SEQ ID NO: 189140 - protein, 123 aa, Artificial Sequence
  derived and/or modified sequence
MVHLTTLLCKAYRGGHLTIRLALGGCTNRPFYRIVAAHNKCPRDGRFVEQLGSYDPLPNSHGEKLVALNLDRIRHWIGCGAHLSKPMEKLLGKTDARFPEQGEERPEQHHFPEDLAPARGRGL

SEQ ID NO: 189141 - DNA, 300 bp, Artificial Sequence
  derived and/or modified sequence
atggtccaccttacgacactcctgtgcaaagcctaccgcggcgggcacctaaccatccggctcgccctcggtggctgtactaaccgaccgttctatagaatcgttgccgcccataacaagtgtccaagagacgggaggttcgtcgagcagttggggagctacgaccccttgcctaactcacacggcgagaagctggtcgccctaaatctagataggatccgacactggatcggttgcggtgcgcatttatccaagccgatggagaagctcctcggcctgaaatattctcacgtcttctag

SEQ ID NO: 189142 - DNA, 414 bp, Artificial Sequence
  derived and/or modified sequence
atggtccatcttactacacttctctgtaaggcatatcggggcggccacttgacgatcagactggcactggggggttgtacgaatcggcccttttacaggatagtcgccgcccacaataagtgccccagggatggcagatttgtggaacagctgggttcctacgacccgctcccaaattcccacggagaaaaactggttgccttaaatttggatagaattcgccactggattggatgtggagcccatcttagtaaacccatggaaaagctcttaggcctcgccggatttttccctttgcatccaatgatgataactaacgctgaaaggctccgcagaaaaagagcccgtgaggtgttactggcaagccagaagactgacgccgaagctaccgatactgaggctacagagacctag

SEQ ID NO: 189143 - DNA, 372 bp, Artificial Sequence
  derived and/or modified sequence
atggtgcatctcacaaccctcttatgcaaagcgtaccggggtgggcatttgacaatccgactggcactgggcggatgtacaaaccgcccattttatagaattgttgcagctcacaataaatgccccagagatgggcgatttgtggaacaactgggatcatatgaccccctgccaaattcgcacggggagaagctggtggctctgaatctggaccggattaggcattggattggttgtggcgcccacctgagcaagcctatggagaaactgttgggaaaaacggacgcaaggttccccgagcaaggagaggagcgcccagaacagcatcatttcccagaggaccttgctcctgccagaggtcggggcctgtag

SEQ ID NO: 189144 - DNA, 300 bp, Artificial Sequence
  derived and/or modified sequence
atggtgcacctgaccaccctgctgtgcaaggcctaccggggcggccacctgaccatccggctggccctgggcggctgcaccaaccggcccttctaccgcatcgtggccgcccacaacaagtgccccagagatggccgctttgtggagcagctgggcagctatgaccccctgcccaacagccatggagagaagctggtggccctgaacctggaccgcatccgccactggattggctgtggggcccacctgagcaagcccatggagaagctgctgggcctgaagtacagccacgtgttctag

SEQ ID NO: 189145 - DNA, 414 bp, Artificial Sequence
  derived and/or modified sequence
atggtgcacctgaccaccctgctgtgcaaggcctaccggggcggccacctgaccatccggctggccctgggcggctgcaccaaccggcccttctaccgcatcgtggccgcccacaacaagtgccccagagatggccgctttgtggagcagctgggcagctatgaccccctgcccaacagccatggagagaagctggtggccctgaacctggaccgcatccgccactggattggctgtggggcccacctgagcaagcccatggagaagctgctgggcctggccggcttcttccccctgcaccccatgatgatcaccaatgctgagcggctgcggaggaagagggcccgggaggtgctgctggccagccagaagacagatgctgaggccacagacacagaggccacagagacctag

SEQ ID NO: 189146 - DNA, 372 bp, Artificial Sequence
  derived and/or modified sequence
atggtgcacctgaccaccctgctgtgcaaggcctaccggggcggccacctgaccatccggctggccctgggcggctgcaccaaccggcccttctaccgcatcgtggccgcccacaacaagtgccccagagatggccgctttgtggagcagctgggcagctatgaccccctgcccaacagccatggagagaagctggtggccctgaacctggaccgcatccgccactggattggctgtggggcccacctgagcaagcccatggagaagctgctgggcaagacagatgcccgcttccctgagcagggcgaggagaggcctgagcagcaccacttccctgaggacctggccccagcccggggccggggcctgtag

SEQ ID NO: 189147 - DNA, 866 bp, Artificial Sequence
  derived and/or modified sequence
attgtgggaagtatagggcggcaagcggaggaggcgtggcgagcggatcatccgcttccggagtcgaggttttcgggcttgtaccgcttggcggtgcggcctggtgtcggcttgcaggttctttctgtgtttgttctctgccctgccaaggccgtagagctggtgcgtgcgggtagcggggctctccgaggagccgcacgccggcggcaccatggtccacctcactactctcctctgcaaggcctaccgtgggggccacttaaccatccgccttgccctgggtggctgcaccaatcggccgttctaccgcattgtggctgctcacaacaagtgtcccagggatggccgtttcgtagagcagctgggctcctatgatccattgcccaacagtcatggagaaaaactcgttgccctcaacctagacaggatccgtcattggattggctgcggggcccacctctctaagcctatggaaaagcttctgggtctcaagtattcccatgtgttttaaaagcctgaagtcagtgagatgaaattcaacatcaagaatttgaagtaacttgtaaggaaaaataatataaagataccattggggcagtggctcacacctgtaatctcagcactttgggaggctgaggtggaaggatcacttgaagccagagtttgagaccagcctgtgcaacacagcaagaccccgtctctacaaaaacttaaaaaattagctggctgtggtgttgctcacccatagttccagctactcgggaagctgaggcagtaagatcacttgagcccaggaggccgatgctgcagtgaactgtgattgttccactacagtccagcctgggtgacagagaaaagaaaaagaa

SEQ ID NO: 189148 - DNA, 2634 bp, Artificial Sequence
  derived and/or modified sequence
attgtgggaagtatagggcggcaagcggaggaggcgtggcgagcggatcatccgcttccggagtcgaggttttcgggcttgtaccgcttggcggtgcggcctggtgtcggcttgcaggttctttctgtgtttgttctctgccctgccaaggccgtagagctggtgcgtgcgggtagcggggctctccgaggagccgcacgccggcggcaccatggtccacctcactactctcctctgcaaggcctaccgtgggggccacttaaccatccgccttgccctgggtggctgcaccaatcggccgttctaccgcattgtggctgctcacaacaagtgtcccagggatggccgtttcgtagagcagctgggctcctatgatccattgcccaacagtcatggagaaaaactcgttgccctcaacctagacaggatccgtcattggattggctgcggggcccacctctctaagcctatggaaaagcttctgggtcttgctggctttttccctctgcatcctatgatgatcacaaatgctgagagactgcgaaggaaacgggcacgtgaagtcctgttagcttctcagaaaacagatgcagaagctacagatacagaggctacagaaacataaatgagctgactttagtgagcatagcagtgggaacaaggtcaaggtccttttgaaacactgcagcgatcttaattttgttagatttggagttcaataaatggagtatcctgagttgcccttgctcttctggcctggcctgcacagggcccagggagagatttgttcttgtgtgacttagagctgggtgtgggtactaattagcttttttcgactttgtcttgggatagacagtggctatgggaggattggacttttgagttgggctctgggtctcttggacaactttacaatttactggcttccaagacttcctgcttcaaaacccccagccagactattcatggcccattcagatcttcatgttcatcccacaagtgcaagaacagttaacctttcttaattgatttttgtaattggaggtttatattgtcttgcctaatgcatattctctttttttttttttttttgagacggagtcttgttctgttgccaggctggagtgcggtggtgcaatctcagctcactgcaatctccacctcctgggttcaagaggttctcctgcctcagcctcctgagtagccggggagctacaagcatgcaccaccacacccagctaattttttttttttttttgagaggagtctcgctctgtcgcccaggcttgagtgcagtggcgcgatctcggctcactgcaagctctgtctcctgggttcatgccattctcctgcttcagcctcccgagtagtcccaggagtagctgggactacaggtgcccaccaccacacccagctaatttttttgtatttttagtagagatggggtttcaccatgttatccaggatggttttgatctcctgacctcgtgatccgcccgccttggcctcccaaaagtgctgggattataggcgtgagccaccgcccgggcaaatttttgtatttttagtagagatggggtttcaccgtgttggccaggatggtctcaatctgaccttgtgatctgcccacctcggcctcccaaagtgctaggattactggcgtgagccaccactcctagccttaatgcatattcttaaatatacaaaggtagatttgttatgaaaattgctttggggctctaataacctaccttttaagaatgagaaactgctgggcttaagggagttcagtatgaatcaagattgaaccattcaaatgtggctgtgatttctgcatatatcatagatgggatccttctgagaatactggaatagggaattaggacaccaagccaattcagctgtgaaccttattcttgtacttttctttcttgctggtaattttatggagcaggttaagaaggctgctctgtgttaggataaactgtataccaataatgttgacaacctgtaatgagtgttgcattttacttcttgtatcttttccttcctaccttgatgccagtaatctataagggatctttatagtttgaatgtatttgaataacttcagtatactttagttctacttttttatttgactcacaaccattcttaggtctcaagtattcccatgtgttttaaaagcctgaagtcagtgagatgaaattcaacatcaagaatttgaagtaacttgtaaggaaaaataatataaagataccattggggcagtggctcacacctgtaatctcagcactttgggaggctgaggtggaaggatcacttgaagccagagtttgagaccagcctgtgcaacacagcaagaccccgtctctacaaaaacttaaaaaattagctggctgtggtgttgctcacccatagttccagctactcgggaagctgaggcagtaagatcacttgagcccaggaggccgatgctgcagtgaactgtgattgttccactacagtccagcctgggtgacagagaaaagaaaaagaaaacattacataatttggctagagcataataatttgattttctggtttttgaaaatttgagttgcaataaaaggatatttcagtgtgcgatttcaa

SEQ ID NO: 189149 - DNA, 996 bp, Artificial Sequence
  derived and/or modified sequence
agtcgaggttttcgggcttgtaccgcttggcggtgcggcctggtgtcggcttgcaggttctttctgtgtttgttctctgccctgccaaggccgtagagctggtgcgtgcgggtagcggggctctccgaggagccgcacgccggcggcaccatggtccacctcactactctcctctgcaaggcctaccgtgggggccacttaaccatccgccttgccctgggtggctgcaccaatcggccgttctaccgcattgtggctgctcacaacaagtgtcccagggatggccgtttcgtagagcagctgggctcctatgatccattgcccaacagtcatggagaaaaactcgttgccctcaacctagacaggatccgtcattggattggctgcggggcccacctctctaagcctatggaaaagcttctgggtaagacggacgccagatttccagagcaaggggaggagagacccgagcaacatcacttccctgaagacctagctcctgcgcgcggccggggactgtgactccacatgccggcgttacttacccgggcccgcgcctgactcgccacacctcattttgcggccgccgtaaagcgcggatgcgcggcgtggccacgccccttcagtgcttgtgacgcaggcgccctgggctttttgggcgcgaaaaagaagcagtcctgggttgtacccggcgcagctgggagcggctgcttcctccggggtcgtatctccgcccggcatggggctgctggacctttgcgaggaagtgttcggcaccgccgacctttaccgggtgctgggcgtgcgacgcgaggcctccgacggcgaggtccgacgaggctaccacaaggtgtccctgcaggtacacccggaccgggtgggtgagggcgacaaggaggacgccacccgccgcttccagatcctgggaaaagtctattccgttctcagtgacagagaacagagagcagtgtacgatgagcagggaacagtggacga

SEQ ID NO: 189150 - DNA, 300 bp, Artificial Sequence
  derived and/or modified sequence
atggtgcacctgaccaccctgctgtgcaaggcctaccggggcggccacctgaccattagactggccctgggggggtgcaccaaccgtcccttctatcggattgttgctgctcacaacaagtgccccagggacggtcgttttgtggagcagctcggatcctatgatccacttcccaattcacacggtgagaaactcgtggcgctgaatctggatagaatacgccactggatcggatgcggcgctcacctgtccaaaccgatggagaagctcctgggacttaagtacagccacgtcttctag

SEQ ID NO: 189151 - DNA, 414 bp, Artificial Sequence
  derived and/or modified sequence
atggtgcacctgaccaccctgctgtgcaaggcctaccggggcggccatctgacaatacgtcttgcgttgggaggatgtacaaatagacctttctatcgcatcgtcgccgctcataataaatgcccacgagacgggagattcgtagagcagctcgggtcttatgatcctttgcccaattcccatggagagaaacttgtcgcgcttaacctcgatcgcattcgccattggataggctgtggagctcacctgagtaagccaatggaaaagctgctagggctggccgggttcttccccctgcaccctatgatgatcacgaacgcggagagattgcggcggaaacgcgcacgtgaggtgctactggcctcacaaaagaccgatgcagaagcaacagatacagaggccacagagacatag

SEQ ID NO: 189152 - DNA, 372 bp, Artificial Sequence
  derived and/or modified sequence
atggtgcacctgaccaccctgctgtgcaaggcctaccggggcggccacttgactattagattagctctcgggggatgtaccaacagacctttctatcgcattgtggccgcacacaacaaatgccctagagacggtcggtttgtggaacaactggggagctatgacccactccctaattcccacggcgaaaagcttgttgctcttaatctggatcggatccgccattggatcgggtgcggtgcccacctgagcaagcccatggaaaaactcctgggcaagaccgacgcacgtttccccgagcagggggaagaaagacccgagcagcaccattttccagaggacttggcccctgcccgcggaaggggcctgtag

SEQ ID NO: 189153 - DNA, 300 bp, Artificial Sequence
  derived and/or modified sequence
atggttcacctgaccactctgctctgtaaggcctataggggaggacacctgaccattcgcctagctctgggcggatgcacgaacagacccttttacaggatcgttgctgcccataataaatgcccacgtgacgggaggtttgttgagcagctcggttcgtacgaccctctgcctaattcccatggggagaaattagtagctctcaacttagaccgcattaggcattggattggctgtggggctcatcttagtaaacctatggagaagctgctcgggctcaaatacagccacgtgttttag

SEQ ID NO: 189154 - DNA, 414 bp, Artificial Sequence
  derived and/or modified sequence
atggtgcacctcactaccctgctgtgcaaagcgtaccggggagggcacctgaccattaggctggctctcgggggatgcaccaatagacctttctataggatcgtagctgctcataataaatgcccacgggacgggagattcgtggagcagctggggtcttatgatcccctgcctaactcacatggggaaaagctcgttgccctgaacctcgatcggatccgccactggatcggctgcggcgcacacttaagcaagcctatggaaaagctgctaggcctggccggattcttccctctccatccgatgatgattaccaacgcagagcggcttcgacgtaagcgcgctcgggaggtgttgctcgcttctcagaaaactgacgccgaggcaactgatactgaggccacagaaacctag

SEQ ID NO: 189155 - DNA, 372 bp, Artificial Sequence
  derived and/or modified sequence
atggtgcatttaacaactctcctctgcaaagcctatcgcggtggccacctgaccatacggctggcactgggtgggtgtactaatagacctttctatcggattgtagctgctcataataagtgcccacgagatggtagattcgtcgaacagctaggctcgtacgatcctttgcctaactcacacggggaaaagttagttgcattgaacctcgaccggattcgacactggatcggttgtggggcacacctgtcaaaaccaatggaaaagctcctgggaaagacggatgccagatttcctgagcagggcgaggagaggcctgaacaacatcactttccagaggatttagcaccagctcgcggaaggggcctgtag

SEQ ID NO: 189156 - DNA, 300 bp, Artificial Sequence
  derived and/or modified sequence
atggtgcacctgaccaccctgctgtgcaaggcctacagaggcggccacctgaccatcagactggccctgggcggctgcaccaacagacccttctacagaatcgtggccgcccacaacaagtgccccagagacggcagattcgtggagcagctgggcagctacgaccccctgcccaacagccacggcgagaagctggtggccctgaacctggacagaatcagacactggatcggctgcggcgcccacctgagcaagcccatggagaagctgctgggcctgaagtacagccacgtgttctag

SEQ ID NO: 189157 - DNA, 414 bp, Artificial Sequence
  derived and/or modified sequence
atggtgcacctgaccaccctgctgtgcaaggcctacagaggcggccacctgaccatcagactggccctgggcggctgcaccaacagacccttctacagaatcgtggccgcccacaacaagtgccccagagacggcagattcgtggagcagctgggcagctacgaccccctgcccaacagccacggcgagaagctggtggccctgaacctggacagaatcagacactggatcggctgcggcgcccacctgagcaagcccatggagaagctgctgggcctggccggcttcttccccctgcaccccatgatgatcaccaacgccgagagactgagaagaaagagagccagagaggtgctgctggccagccagaagaccgacgccgaggccaccgacaccgaggccaccgagacctag

SEQ ID NO: 189158 - DNA, 372 bp, Artificial Sequence
  derived and/or modified sequence
atggtgcacctgaccaccctgctgtgcaaggcctacagaggcggccacctgaccatcagactggccctgggcggctgcaccaacagacccttctacagaatcgtggccgcccacaacaagtgccccagagacggcagattcgtggagcagctgggcagctacgaccccctgcccaacagccacggcgagaagctggtggccctgaacctggacagaatcagacactggatcggctgcggcgcccacctgagcaagcccatggagaagctgctgggcaagaccgacgccagattccccgagcagggcgaggagagacccgagcagcaccacttccccgaggacctggcccccgccagaggcagaggcctgtag

SEQ ID NO: 189159 - protein, 165 aa, Artificial Sequence
  derived and/or modified sequence
MNPRDKQVSRFSPLKDVYTWVALAGIQRSGSPGRTRSAARRMESNTSSSLENLATAPVNQIQETISDNCVVIFSKTSCSYCTMAKKLFHDMNVNYKVVELDLLEYGNQFQDALYKMTGERTVPRIFVNGTFIGGATDTHRLHKEGKLLPLVHQCYLKKSKRKEFQ

SEQ ID NO: 189160 - DNA, 498 bp, Artificial Sequence
  derived and/or modified sequence
atgaacccgcgggataagcaagtaagccggttttcgccactgaaagatgtgtacacctgggtggcacttgccggtatccagagatccggctctccggggcggacgcgctcagccgcccgccgcatggagagtaatacctctagtagtctggaaaatttggctaccgctcccgtgaatcaaatccaagagactatctcggacaactgtgtcgtcatcttctccaagacttcgtgttcatattgtacgatggccaaaaaacttttccacgacatgaatgtgaactataaagttgttgaactggatctgcttgaatacggaaatcaattccaagacgctctgtataagatgacaggtgaacggaccgttccccgcatctttgtgaacggaacattcatcggcggggccactgacacgcatcgattgcataaagagggaaaacttctgcccctcgtgcatcaatgctaccttaaaaagagcaaacgaaaagaatttcagtag

SEQ ID NO: 189161 - DNA, 1131 bp, Artificial Sequence
  derived and/or modified sequence
aaggctattattaccaccactgagtggcttaaataatcctgtcaacagcaatcgcccatttccaaagccatggtgaaacatctctgtgctaatttcttttgttttgtttcctaattttttttttttggcaggtggtgggaaataatctttgtcttctttggagtaaaccttcaacaccggattttttcttttaattatggatgtaaaccccaatatccccataatttacattgggtctcgaccaattgcctaattataagaggatatatttaggctcttatttcatccacacaaaaacttgtgtaacaggtagttggaaacatctgaggcaccactttgattctgttttggatggtcatgttttttctcctccgtttccccagcatgtctgccaccatcctcatgcactgcttccaagtgcctgggagcctttatgagcgtccctaaacctaaaagaatccagaggcggggctcggatgaaccctcgagataagcaagtgagccgcttctcccctctaaaggatgtttacacgtgggtggcactcgctggaatccagcgctcgggcagccctgggaggacgcgctcagctgcgaggaggatggagagcaatacatcatcatctttggagaatttagcgacggcgcctgtgaaccagatccaagaaacaatttctgataattgtgtggtgattttctcaaaaacatcctgttcttactgtacaatggcaaaaaagcttttccatgacatgaatgttaactataaagtggtggaactggacctgcttgaatatggaaaccagttccaagatgctctttacaaaatgactggtgaaagaactgttccaagaatatttgtcaatggtacttttattggaggtgcaactgacactcataggcttcacaaagaaggaaaattgctcccactagttcatcagtgttatttaaaaaaaagtaagaggaaagaatttcagtgatgtttatactaataagtttgctagtacagtgtcagttatttaaagtggtaatgcccgataatgtcttttaaatgtttgaggatgttttaaatacatgcattgtcttcacgaagaagatgtaaaaataatgaacaataaattgcggtggaaacctctt

SEQ ID NO: 189162 - DNA, 498 bp, Artificial Sequence
  derived and/or modified sequence
atgaacccccgggacaagcaggtgagccgcttcagccccctgaaggatgtgtacacctgggtggccctggccggcatccagaggagcggcagccctggccgcaccaggtctgctgcccggaggatggagagcaacaccagcagcagcctggagaacctggccacagcccctgtgaaccagatccaggagaccatcagtgacaactgtgtggtgatcttcagcaagaccagctgcagctactgcaccatggccaagaagctgttccatgacatgaatgtgaactacaaggtggtggagctggacctgctggagtatggcaaccagttccaggatgccctgtacaagatgactggagagaggacagtgccccgcatctttgtgaatggcaccttcatcggcggggccacagacacccaccggctgcacaaggagggcaagctgctgcccctggtgcaccagtgctacctgaagaagagcaagaggaaggagttccagtag

SEQ ID NO: 189163 - DNA, 498 bp, Artificial Sequence
  derived and/or modified sequence
atgaacccccgggacaagcaggtgagccggttcagccccctgaaggatgtttacacgtgggttgccctcgccggcatccagcgtagcggaagccctggacgcacgcggagcgccgcaagacgaatggagagcaatacaagttcctccctcgaaaatttggcgaccgccccggtgaatcagattcaggagacgattagtgacaattgtgtggttattttctccaaaacgtcatgctcctattgcactatggccaagaaactcttccatgatatgaatgttaactacaaggtcgtggagctcgacttattagaatacggcaaccagttccaggacgctctgtataaaatgacaggcgagcgtaccgttccaaggatttttgtgaacggcacattcatcgggggcgcaaccgatacccataggctacacaaggaggggaaactgcttccactggtgcaccagtgctacttgaagaagtctaaacgcaaggagttccaatag

SEQ ID NO: 189164 - DNA, 498 bp, Artificial Sequence
  derived and/or modified sequence
atgaacccaagagataagcaggtcagtcgcttttcccccctgaaagacgtttatacgtgggtggccctggccggaattcagaggtcaggatcacctggacgcacccgctcagccgcacgcaggatggagagtaatacttccagcagtttagaaaaccttgccaccgcgccagtgaatcaaatccaggagactattagcgacaattgcgtggtcatcttctcaaaaactagctgcagctactgtacgatggccaagaagctatttcatgacatgaacgtgaattataaggtggtggagctggacctgctggagtatggcaaccagtttcaagacgccttgtacaagatgacgggggagcgtacagtacctagaatcttcgttaatggaacctttattggcggagcaaccgatacccacaggttgcacaaggaaggcaagctattgccattggtacatcaatgctatctcaagaaaagcaaacggaaagagttccaatag

SEQ ID NO: 189165 - DNA, 498 bp, Artificial Sequence
  derived and/or modified sequence
atgaaccccagagacaagcaggtgagcagattcagccccctgaaggacgtgtacacctgggtggccctggccggcatccagagaagcggcagccccggcagaaccagaagcgccgccagaagaatggagagcaacaccagcagcagcctggagaacctggccaccgcccccgtgaaccagatccaggagaccatcagcgacaactgcgtggtgatcttcagcaagaccagctgcagctactgcaccatggccaagaagctgttccacgacatgaacgtgaactacaaggtggtggagctggacctgctggagtacggcaaccagttccaggacgccctgtacaagatgaccggcgagagaaccgtgcccagaatcttcgtgaacggcaccttcatcggcggcgccaccgacacccacagactgcacaaggagggcaagctgctgcccctggtgcaccagtgctacctgaagaagagcaagagaaaggagttccagtag

SEQ ID NO: 189166 - protein, 152 aa, Artificial Sequence
  derived and/or modified sequence
MEAVLNELVSVEDLLKFEKKFQSEKAAGSVSKSTQFEYAWCLVRSKYNDDIRKGIVLLEELLPKGSKEEQRDYVFYLAVGNYRLKEYEKALKYVRGLLQTEPQNNQAKELERLIDKAMKKDGLVGMAIVGGMALGVAGLAGLIGLAVSKSKS

SEQ ID NO: 189167 - DNA, 734 bp, Artificial Sequence
  derived and/or modified sequence
agtggttctccgcccctgccactgggccatggagactgtggcacagtagactgtagtgtgaggctcgcgggggcagtggccatggaggccgtgctgaacgagctggtgtctgtggaggacctgctgaagtttgaaaagaaatttcagtctgagaaggcagcaggctcggtgtccaagagcacgcagtttgagtacgcctggtgcctggtgcggagcaagtacaatgatgacatccgtaaaggcatcgtgctgctcgaggagctgctgcccaaagggagcaaggaggaacagcgggattacgtcttctacctggccgtggggaactaccggctcaaggaatacgagaaggccttaaagtacgtccgcgggttgctgcagacagagccccagaacaaccaggccaaggaactggagcggctcattgacaaggccatgaagaaagatggactcgtgggcatggccatcgtgggaggcatggccctgggtgtggcgggactggccggactcatcggacttgctgtgtccaagtccaaatcctgaaggagacgcgggagcccacggagaacgctccaggagggcctgtccatcctcgctgtcctttccctgttctccccctgccccccgtctctatcctctgtggccttcagctaatttctgctcccctgagattcgtccttcagccccatcatgtgctttgggatgagtgtaaataaaacggggctgtggcttgggaa

SEQ ID NO: 189168 - DNA, 459 bp, Artificial Sequence
  derived and/or modified sequence
atggaagccgttctgaacgagcttgtgtccgtggaagacttgctaaaatttgaaaaaaagttccaatctgaaaaagccgccggcagcgtgagtaagtctactcagtttgaatatgcatggtgtttggtgcgcagcaagtataacgatgacataaggaagggcattgtgcttttggaagaacttctccctaaggggtcgaaggaagagcagcgggactatgtgttctatctggcagtgggcaactatcgattaaaagaatatgaaaaagccctgaaatacgtccgcggactgctgcagacggagccacagaacaatcaggccaaggagttggagcggctgatagataaggccatgaagaaagatgggctggtcggtatggctatcgtcggaggcatggccttgggggtcgccggtcttgctggtctaataggtctcgctgtgagcaaaagtaagtcctag

SEQ ID NO: 189169 - DNA, 459 bp, Artificial Sequence
  derived and/or modified sequence
atggaggccgtgctgaatgagctggtgtctgtggaggacctgctgaagtttgagaagaagttccagagcgagaaggctgctggctctgtgtccaagagcacccagtttgaatatgcctggtgcctggtgcgcagcaagtacaatgatgacatcagaaaaggaattgtgctgctggaggagctgctgcccaagggcagcaaggaggagcagagggactatgtgttctacctggccgtgggcaactaccgcctgaaggagtatgagaaggccctgaagtatgtgcggggcctgctgcagacagagccccagaacaaccaggccaaggagctggagcggctgattgacaaggccatgaagaaggatggcctggtgggcatggccatcgtgggcggcatggccctgggcgtggccggcctggccggcctgattggcctggccgtgtccaagagcaagagctag

SEQ ID NO: 189170 - DNA, 459 bp, Artificial Sequence
  derived and/or modified sequence
atggaggccgtgctgaacgagctggtgagcgtggaggacctgctgaagtttgagaagaagttccaatctgagaaggcggctggttctgtgtccaagagcacccagttcgagtatgcctggtgcctcgtgcgttccaagtataacgacgacatccgcaagggtatcgtccttctcgaggagctgcttcctaaaggatcaaaagaagagcaacgggactatgtcttctacctggccgtgggaaactatcgcctgaaggagtacgagaaagctttaaagtatgttagaggcctactccaaactgagccccagaataatcaggctaaggagctggagcgcctgatcgataaagcaatgaaaaaggacgggctcgtggggatggctatagttggtggaatggctctcggggtggcgggattggccggattgattggtttggccgtctctaaatccaagtcttag

SEQ ID NO: 189171 - DNA, 459 bp, Artificial Sequence
  derived and/or modified sequence
atggaagctgttctgaatgagctcgtcagtgtggaggatttattgaaatttgagaaaaagtttcaaagcgagaaggccgctgggagcgttagcaagtctactcagtttgagtatgcttggtgcctggtgcgatctaaatacaacgatgacattagaaagggaattgtgttgttagaggaactgctccctaagggctccaaagaagagcagagggattatgtcttttatctggctgtgggtaactaccggctgaaggagtacgaaaaagcccttaagtatgttagaggactactgcaaaccgagccacagaataaccaggctaaagagctggaacggctcatcgacaaggctatgaaaaaggatggactcgtgggcatggccattgtcggtggcatggcactgggagtcgccggtttggcaggtctgatcggactcgccgtttccaagagtaaaagctag

SEQ ID NO: 189172 - DNA, 459 bp, Artificial Sequence
  derived and/or modified sequence
atggaggccgtgctgaacgagctggtgagcgtggaggacctgctgaagttcgagaagaagttccagagcgagaaggccgccggcagcgtgagcaagagcacccagttcgagtacgcctggtgcctggtgagaagcaagtacaacgacgacatcagaaagggcatcgtgctgctggaggagctgctgcccaagggcagcaaggaggagcagagagactacgtgttctacctggccgtgggcaactacagactgaaggagtacgagaaggccctgaagtacgtgagaggcctgctgcagaccgagccccagaacaaccaggccaaggagctggagagactgatcgacaaggccatgaagaaggacggcctggtgggcatggccatcgtgggcggcatggccctgggcgtggccggcctggccggcctgatcggcctggccgtgagcaagagcaagagctag

SEQ ID NO: 189173 - protein, 125 aa, Artificial Sequence
  derived and/or modified sequence
MAKYLAQIIVMGVQVVGRAFARALRQEFAASRAAADARGRAGHRSAAASNLSGLSLQEAQQILNVSKLSPEEVQKNYEHLFKVNDKSVGGSFYLQSKVVRAKERLDEELKIQAQEDREKGQMPHT

SEQ ID NO: 189174 - DNA, 378 bp, Artificial Sequence
  derived and/or modified sequence
atggccaagtacctcgcacagatcatcgtgatgggggttcaagtagtgggacgtgcttttgctagagccctccgtcaagagttcgctgcctcaagggcagcagccgacgcacgtgggagagccggccaccgctcagcggccgccagcaatctcagcggcctgagtttgcaggaagcacagcagattctgaatgtcagcaaactgtctcccgaggaggtccagaagaactacgaacacttgtttaaggtcaacgacaaatccgttggtggatcgttttacctccaaagcaaagtggtacgcgcaaaagagagactcgatgaggagttaaagattcaggctcaggaggatagggagaaagggcagatgccccatacctag

SEQ ID NO: 189175 - DNA, 378 bp, Artificial Sequence
  derived and/or modified sequence
atggccaagtacctggcccagatcatcgtgatgggcgtgcaggtggtgggccgggcctttgcccgggccctgcggcaggagtttgctgccagcagagctgctgctgatgcccggggccgggccggccacaggtctgctgctgccagcaacctgagcggcctgagcctgcaggaggcccagcagatcctgaatgtgtccaagctgagccctgaggaggtgcagaagaactatgagcacctgttcaaggtgaatgacaagtctgtgggcggcagcttctacctgcagagcaaggtggtgcgggccaaggagcggctggatgaggagctgaagatccaggcccaggaggaccgggagaagggccagatgccccacacctag

SEQ ID NO: 189176 - DNA, 378 bp, Artificial Sequence
  derived and/or modified sequence
atggccaagtacctggcccagatcatcgtgatgggcgtgcaggtggtgggacgtgctttcgccagggccttacgtcaggagtttgctgcgtccagggctgccgccgatgcacgcggacgcgccggccacaggtctgcagccgccagtaacctatcagggctgtcccttcaagaagcccagcagatcctgaatgtgtcaaaactcagtcccgaagaagtgcagaaaaattacgagcacctatttaaggtgaatgataagtcagttggtggctccttctacctgcagagtaaggttgtgcgggcaaaggaacgcctcgatgaagaactgaaaatccaggctcaggaggatcgagagaaagggcagatgccccacacgtag

SEQ ID NO: 189177 - DNA, 584 bp, Artificial Sequence
  derived and/or modified sequence
ggcaatgcgcatgcccagcgccgtatcgcgcacgcgctctctgcggctttccttgacctctgacccgccgaccacgcttgatccccggccgcggggccaggaagtcggagtttgagccccggaggcagagcggctgccatggccaagtacctggcccagatcattgtgatgggcgtgcaggtggtgggcagggcctttgcacgggccttgcggcaggagtttgcagccagccgggccgcagctgatgcccgaggacgcgctggacaccggtctgcagccgcttccaacctctccggcctcagcctccaggaggcacagcagattctcaacgtgtccaagctgagccctgaggaggtccagaagaactatgaacacttatttaaggtgaatgataaatccgtgggtggctccttctacctgcagtcaaaggtggtccgcgcaaaggagcgcctggatgaggaactcaaaatccaggcccaggaggacagagaaaaagggcagatgccccatacgtgactgctcggctccccccgcccaccccgccgcctctaatttatagcttggtaataaatttcttttctgca

SEQ ID NO: 189178 - DNA, 378 bp, Artificial Sequence
  derived and/or modified sequence
atggccaaatacctcgcacagataattgttatgggagtccaggtggtgggaagagctttcgcgagagctctgaggcaggagtttgccgctagcagagccgcagctgatgcacgcggtcgggctggacaccgctcagcagccgcatcaaacctgagcggtttgtccttgcaagaagcccagcagatccttaacgtgagtaaactgtctccagaggaggtgcagaagaattacgaacatcttttcaaggtgaacgacaaaagcgtgggaggctccttttatctacagtccaaggtggtaagagctaaagagcgactagatgaggagttgaaaatacaagcccaggaggaccgggagaagggtcagatgccccatacttag

SEQ ID NO: 189179 - DNA, 378 bp, Artificial Sequence
  derived and/or modified sequence
atggccaagtacctggcccagatcatcgtgatgggcgtgcaggtggtgggcagagccttcgccagagccctgagacaggagttcgccgccagcagagccgccgccgacgccagaggcagagccggccacagaagcgccgccgccagcaacctgagcggcctgagcctgcaggaggcccagcagatcctgaacgtgagcaagctgagccccgaggaggtgcagaagaactacgagcacctgttcaaggtgaacgacaagagcgtgggcggcagcttctacctgcagagcaaggtggtgagagccaaggagagactggacgaggagctgaagatccaggcccaggaggacagagagaagggccagatgccccacacctag

SEQ ID NO: 189180 - protein, 190 aa, Artificial Sequence
  derived and/or modified sequence
MAGSRLETVGSIFSRTRDLVRAGVLKEKPLWFDVYDAFPPLREPVFQRPRVRYGKAKAPIQDIWYHEDRIRAKFYSVYGSGQRAFDLFNPNFKSTCQRFVEKYTELQKLGETDEEKLFVETGKALLAEGVILRRVGEARTQHGGSHVSRKSEHLSVRPQTALEENETQKEVPQDQHLEAPADQSKGLLPP

SEQ ID NO: 189181 - DNA, 573 bp, Artificial Sequence
  derived and/or modified sequence
atggccggctccagattggagacagtcggcagtatattctcacgcacaagggacctggttcgcgctggtgtgcttaaggaaaaacccctgtggtttgacgtctacgacgcctttcccccactgagggagcctgtcttccagcgcccccgggttaggtacggcaaagccaaagctccaatccaggatatctggtatcacgaggatcgcatccgggctaagttttattcagtgtacggttccgggcaacgggcgtttgacctctttaatccaaattttaagtccacttgccagaggttcgtggagaaatacactgaattacagaagctcggagaaaccgacgaggaaaagctgttcgtggaaaccggaaaggcactgctagccgagggcgtgatcctccggcgggtgggtgaggctcggacccagcacggcgggtcccatgttagtcgaaagtccgaacacctgagcgttcgcccccagacagccctcgaagagaacgaaactcaaaaggaagtgccccaggatcaacacctggaggctccggccgaccagtccaaaggactcttacccccttag

SEQ ID NO: 189182 - DNA, 573 bp, Artificial Sequence
  derived and/or modified sequence
atggccggcagccggctggagaccgtgggcagcatcttcagcaggacccgggacctggtgcgggccggcgtgctgaaggagaagcccctgtggtttgatgtgtatgatgccttcccccccctgcgggagcccgtcttccagaggccccgggtgcgctatggcaaggccaaggcccccatccaggacatctggtaccatgaagatcgcatccgggccaagttctacagcgtgtatggcagcggccagagggcctttgacctcttcaaccccaacttcaagagcacctgccagagatttgtggagaagtacacagagctgcagaagctgggggagacagatgaggagaagctgtttgtggagaccgggaaggccctgctggccgagggcgtcatcctgcggcgggtgggggaggcccggacccagcacggcggcagccacgtgtccaggaagtctgagcacctgtctgtgcggccccagacagccctggaggagaatgagacccagaaggaggtgccccaggaccagcacctggaggccccagctgaccagagcaagggcctgctgcccccatag

SEQ ID NO: 189183 - DNA, 903 bp, Artificial Sequence
  derived and/or modified sequence
tagtcacgctcggtaccaggcgcagatcatggcaggcagccggctggaaaccgtagggagcatcttctctcggactcgggacctggttcgggccggggtgctgaaggagaagcccctgtggtttgacgtatatgacgcctttcccccgctgagggagcccgtcttccaaaggcctcgagtgcgatatggcaaagccaaagctcccatccaagacatctggtaccacgaggatcggattagagcgaagttttattcagtgtatgggtctggtcaaagagcttttgatctattcaatccaaacttcaagtctacctgtcaacggtttgtggagaagtacactgagctacagaaacttggagaaacagatgaagagaagttatttgtggaaacagggaaggctttattggcagaaggtgtcattttaagacgagtaggcgaagcaaggactcaacacggaggtagtcacgtttcccggaaatccgaacacttgagtgtcagaccacagactgcgttggaagaaaacgagactcagaaagaagttccacaggaccagcatttggaggcacctgcagaccagtcgaaaggtctcttgcctccctgaaggacctgtatactgtgtatgctggcattcacactctactcactggctgaatgttgagctatttttaaacagttgaactgtgtaaatgtttcttgatctctaaggtattatgtttgccttctcttagttatttctgggttgtcacaaagctcagtatcatggtttgacagaagcagttatgtgaacttttatgttaggacattactaaataaagaattccctagctgcttataaagtaaatttactttgaattgtaaataacatgaagaaacctttataaagattgttcaaatgggactcaa

SEQ ID NO: 189184 - DNA, 573 bp, Artificial Sequence
  derived and/or modified sequence
atggccggcagccggctggagaccgtgggcagcatcttcagccggacccgcgacttggtgagagccggtgtcttaaaggagaaacctctgtggtttgatgtgtacgatgcgttccccccgctacgagagcctgtttttcaacgtccgagagttcgttacggaaaggcgaaagcacctatacaggacatctggtaccacgaagacagaataagggctaaattctactcagtttacggctcaggtcaaagggcttttgatctattcaacccaaactttaagtcaacctgtcagcggtttgttgaaaagtatactgagctccagaagctgggtgagactgatgaggaaaagctgttcgttgagaccggaaaggcattgctcgccgagggtgtgatcctccggcgggtaggcgaggctagaacgcaacacggcgggagtcacgtctctcgcaaaagtgaacacttgagcgtaaggccacagactgcacttgaggaaaatgagactcagaaagaagttccccaagaccagcatttagaagctcccgccgatcagtccaagggactgctgccgccatag

SEQ ID NO: 189185 - DNA, 573 bp, Artificial Sequence
  derived and/or modified sequence
atggcagggtcaagactggagacagtgggctccatcttctcccgcactcgagacctagttcgcgcaggggtgctcaaagagaaacctctttggtttgatgtctacgatgcattcccccctcttcgcgagccggtgttccagcgccctcgagtgagatacggcaaggctaaagcccctattcaggatatctggtatcacgaggatagaataagagccaagttttatagtgtctatggatcagggcagagagcgttcgacttatttaatcctaattttaaaagtacctgtcaaagattcgtcgagaagtataccgagttgcagaaactgggggaaaccgatgaggagaaattattcgtggagactggcaaagctctactagcagagggtgtcatactcagaagagtgggcgaagcgagaactcagcacggagggtctcacgtgtcgcgcaagtctgaacatctcagcgttagaccccagacggcccttgaagaaaacgagacacagaaggaggtgcctcaggaccaacatctggaagcccctgctgaccaatcgaaaggattgctccccccatag

SEQ ID NO: 189186 - DNA, 573 bp, Artificial Sequence
  derived and/or modified sequence
atggccggcagcagactggagaccgtgggcagcatcttcagcagaaccagagacctggtgagagccggcgtgctgaaggagaagcccctgtggttcgacgtgtacgacgccttcccccccctgagagagcccgtgttccagagacccagagtgagatacggcaaggccaaggcccccatccaggacatctggtaccacgaggacagaatcagagccaagttctacagcgtgtacggcagcggccagagagccttcgacctgttcaaccccaacttcaagagcacctgccagagattcgtggagaagtacaccgagctgcagaagctgggcgagaccgacgaggagaagctgttcgtggagaccggcaaggccctgctggccgagggcgtgatcctgagaagagtgggcgaggccagaacccagcacggcggcagccacgtgagcagaaagagcgagcacctgagcgtgagaccccagaccgccctggaggagaacgagacccagaaggaggtgccccaggaccagcacctggaggcccccgccgaccagagcaagggcctgctgcccccctag

SEQ ID NO: 189187 - protein, 138 aa, Artificial Sequence
  derived and/or modified sequence
MISLTDTQKIGMGLTGFGVFFLFFGMILFFDKALLAIGNVLFVAGLAFVIGLERTFRFFFQKHKMKATGFFLGGVFVVLIGWPLIGMIFEIYGFFLLFRGFFPVVVGFIRRVPVLGSLLNLPGIRSFVDKVGESNNMV

SEQ ID NO: 189188 - DNA, 2976 bp, Artificial Sequence
  derived and/or modified sequence
agacgtggcggctctcgcctgggctgtttcccggcttcatttctcccgactcagcttcccaccctgggctttccgaggtgctgtcgccgctgtccccaccactgcagccatgatctccttaacggacacgcagaaaattggaatgggattaacaggatttggagtgtttttcctgttctttggaatgattctcttttttgacaaagcactactggctattggaaatgttttatttgtagccggcttggcttttgtaattggtttagaaagaacattcagattcttcttccaaaaacataaaatgaaagctacaggtttttttctgggtggtgtatttgtagtccttattggttggcctttgataggcatgatcttcgaaatttatggattttttctcttgttcaggggcttctttcctgtcgttgttggctttattagaagagtgccagtccttggatccctcctaaatttacctggaattagatcatttgtagataaagttggagaaagcaacaatatggtataacaacaagtgaatttgaagactcatttaaaatattgtgttatttataaagtcatttgaagaatattcagcacaaaattaaattacatgaaatagcttgtaatgttctttacaggagtttaaaacgtatagcctacaaagtaccagcagcaaattagcaaagaagcagtgaaaacaggcttctactcaagtgaactaagaagaagtcagcaagcaaactgagagaggtgaaatccatgttaatgatgcttaagaaactcttgaaggctatttgtgttgtttttccacaatgtgcgaaactcagccatccttagagaactgtggtgcctgtttcttttctttttattttgaaggctcaggagcatccataggcatttgctttttagaaatgtccactgcaatggcaaaaatatttccagttgcactgtatctctggaagtgatgcatgaattcgattggattgtgtcattttaaagtattaaaaccaaggaaaccccaattttgatgtatggattacttttttttgtaaacatggttaaaataaaacttttgtggttcttctgaatcttaatatttcaaagccaggtgaaaatctgaactagatattctttgttggaatatgcaaaggtcattctttactaacttttagttactaaattatagctaagttttgtcagcagcatactccggaaagtctcatacttcttgggagtctgccctcctaagtatctgtctatatcattcattacgtgtaagtatttaacaaaaaagcattcttgaccatgaatgaagtagtttgtttcatagcttgtctcattgaatagtattattgaagatactaaatgatgcaaaccaaatggattttttccatgtcatgatgtaatttttctttcttctttcttttttttaaattttagcagtggcttattatttgtttttcataaattaaaataacttttgataatgtttactttaagacatgtaacatgttaaaaggttaaacttatggctatttttaaagggctattcatttaatctgagttttcccttattttcagctttttcctagcatataatagtcattaagcatgacatatccttcatatgatcactcatcttgagttaattagaaaatacctgagttcacgtgctaaagtcatttcactgtaataaactgactgtggtttcttaagaacatgacactaaaaaaaaagtgttttttttccaccgttgctgattattagacagtaggaaatagctgttttctttagttttacaagatgtgacagctttagtggtagatgtagggaaacatttcaacagccatagtactatttgttttaccactgattgcactgttttgtttttttaacagttgcaaagctttttaatgcataaaagtataattgaaatctgtggtatttatttacaaacatgtctacaaaaatagattacagcttattttatttttagttaaatctcttaatacacagagaactcccaatcttgctcatctaaataaggaaagacttggtgtatagtgtgatggtttagtcttaaggattaagacatttttggtacttgcatttgacttacgatgtatctgtgaaaatgggatgatattgacaaatggagactcctacctcaatagttaatggaataataagaggctactgttgtgtctaatgttcttcaaaaaagtaatatcctcacttggagagtgtcaaatacatactttgaggattgactttatataaggtgccctgtagaactctgttacacatatttttgacccatattatttacaatgtcttgataattctacctttttagagcaagaatagtatctgctaatgtaagggacatctgtatttaactcctttgtagacatgaatttctatcaaaatgttctttgcactgtaacagagattccttttttcaataatcttaattcaaaagcattattagacttgaaagggtttgataatctcccagtccttagtaaagattgagagaggctggagcagttttcagttttaaatgagtctgcagttaatatcaaatgtgagtttgggactgcctggcaacatttatatttcttattcagaacccttgatgagactatttttaaacatactagtctgctgatagaaagcactatacatcctattgtttctttctttccaaaatcagccttctgtctgtaacaaaaatgtactttatagagatggaggaaaaggtctaatactacatagccttaagtgtttctgtcattgttcaagtgtattttctgtaacagaaacatatttggaatgtttttcttttccccttataaattgtaattcctgaaatactgctgctttaaaaagtcccactgtcagattatattatctaacaattgaatattgtaaatatacttgtcttacctctcaataaaagggtacttttctatt

SEQ ID NO: 189189 - DNA, 417 bp, Artificial Sequence
  derived and/or modified sequence
atgatcagcctgaccgacacccagaagatcggcatgggcctgaccggcttcggcgtgttcttcctgttcttcggcatgatcctgttcttcgacaaggccctgctggccatcggcaacgtgctgttcgtggccggcctggccttcgtgatcggcctggagagaaccttcagattcttcttccagaagcacaagatgaaggccaccggcttcttcctgggcggcgtgttcgtggtgctgatcggctggcccctgatcggcatgatcttcgagatctacggcttcttcctgctgttcagaggcttcttccccgtggtggtgggcttcatcagaagagtgcccgtgctgggcagcctgctgaacctgcccggcatcagaagcttcgtggacaaggtgggcgagagcaacaacatggtgtag

SEQ ID NO: 189190 - DNA, 417 bp, Artificial Sequence
  derived and/or modified sequence
atgatcagtctgactgacacacagaagatcgggatgggcctgacaggattcggggtcttcttcctctttttcggcatgatcctgttctttgataaggccttattggcgattggtaatgtcctctttgtggctggtctcgcattcgtgatagggctggagcggacctttagatttttttttcagaagcataaaatgaaggctaccggcttcttcctgggcggtgtttttgtggttctgatagggtggccactgatcgggatgatttttgaaatctacggcttctttctcctgtttaggggattctttcccgtggtggtgggctttatcaggagggtgccggtcctcggaagtttgctgaacctgccggggattcggtcattcgtggataaggttggggagtctaacaatatggtatag

SEQ ID NO: 189191 - DNA, 417 bp, Artificial Sequence
  derived and/or modified sequence
atgatcagcctgacagacacccagaagattggcatgggcctgactggatttggagtcttcttcctgttcttcggcatgatcctcttctttgacaaggccctgctggccatcggaaatgtgctgtttgtggccggcctggccttcgtcatcggcctggagaggaccttccgcttcttcttccagaagcacaagatgaaggccaccggcttcttcctgggcggcgtgtttgtggtgctgattggctggcccctgattggcatgatctttgagatctacggcttcttcctgctcttccggggcttcttccctgtggtggtgggcttcatccggcgggtgcctgtgctgggcagcctgctgaacctgcccggcatccgcagctttgtggacaaggtgggggagagcaacaacatggtgtag

SEQ ID NO: 189192 - DNA, 417 bp, Artificial Sequence
  derived and/or modified sequence
atgatcagcctgaccgacacccagaagatcggcatgggcctgaccggattcggcgtgtttttcctgtttttcggcatgatcctctttttcgacaaggcactcctagccataggtaatgtgttattcgtggcaggcttggctttcgtaatagggctggagagaacttttagatttttttttcagaagcacaagatgaaggccacaggattcttcctcggcggcgttttcgttgtcctaatcggctggccactgatcggcatgatttttgaaatttatggttttttcctgctctttcgcggctttttcccagttgttgtgggctttattcggcgcgtccctgtgctggggagtctccttaacctgcccggcatccggtcctttgttgacaaggtgggcgaaagtaataatatggtttag

SEQ ID NO: 189193 - DNA, 417 bp, Artificial Sequence
  derived and/or modified sequence
atgatctcactgaccgacacccaaaaaattggaatgggactgaccggctttggcgtgttcttcctatttttcggaatgatcctattttttgataaagccctactggctatagggaatgtgctcttcgtggctgggctggcgttcgttatcgggctagagcgtacttttaggtttttctttcagaaacataaaatgaaggccacaggattcttcctgggcggtgtgtttgtcgtgttgatcggctggccactaatcggtatgatcttcgaaatatacgggttcttcctcctcttcaggggcttttttccagtggtggtggggtttatccgccgagtccctgtattgggtagcctgctcaatttacccggaattagatcatttgtggataaagtgggggaatctaataatatggtttag

SEQ ID NO: 189194 - protein, 203 aa, Artificial Sequence
  derived and/or modified sequence
MARPRPREYKAGDLVFAKMKGYPHWPARIDELPEGAVKPPANKYPIFFFGTHETAFLGPKDLFPYKEYKDKFGKSNKRKGFNEGLWEIENNPGVKFTGYQAIQQQSSSETEGEGGNTADASSEEEGDRVEEDGKGKRKNEKAGSKRKKSYTSKKSSKQSRKSPGDEDDKDCKEEENKSSSEGGDAGNDTRNTTSDLQKTSEGT

SEQ ID NO: 189195 - DNA, 612 bp, Artificial Sequence
  derived and/or modified sequence
atggccaggcccaggccaagagagtacaaggccggcgaccttgttttcgctaagatgaaagggtatccacactggcctgcaaggatagatgagttaccagagggagctgtgaagcctcccgctaataagtacccaatcttcttcttcggtacacatgaaactgctttccttggcccaaaggatttatttccctataaagaatataaagataagtttggcaagtctaataagcggaagggctttaacgagggcctgtgggagattgagaacaacccaggcgtaaaatttactgggtaccaggccattcagcagcagtcttcgtccgaaacggaaggtgaaggaggaaacacggcagatgccagtagcgaggaggagggtgatcgcgtggaggaagacggaaagggaaaacgcaagaatgaaaaggccgggtctaaacgcaagaagtcctacacctctaagaagagcagtaaacagagcaggaagagccctggggacgaggatgacaaggactgcaaagaagaggaaaataaaagctcaagcgaaggaggtgacgccggcaatgatacgcgtaataccacttctgatttgcaaaaaacgagcgagggtacctag

SEQ ID NO: 189196 - DNA, 612 bp, Artificial Sequence
  derived and/or modified sequence
atggcccggccccggccccgggagtacaaggccggggacctggtgtttgccaagatgaagggctacccccactggccagccagaattgatgagctgcctgagggcgctgtgaagcccccagccaacaagtaccccatcttcttcttcggcacccatgaaacagccttcctgggccccaaggacctcttcccctacaaggagtacaaggacaagtttgggaagagcaacaagaggaagggcttcaatgaaggcctgtgggagattgagaacaaccctggggtgaagttcaccggctaccaggccatccagcagcagagcagcagcgagacagaaggagagggcggcaacacagcagatgccagcagcgaggaggagggggacagagtggaggaggatggcaagggcaagaggaagaatgagaaggccggcagcaagaggaagaagagctacaccagcaagaagagcagcaagcagagcaggaagagccctggagatgaagatgacaaggactgcaaggaggaggagaacaagagcagcagcgagggcggagatgctggaaatgacaccaggaacaccaccagtgacctgcagaagaccagcgagggcacctag

SEQ ID NO: 189197 - DNA, 612 bp, Artificial Sequence
  derived and/or modified sequence
atggcccggccccggccccgggagtacaaggccggcgacctggtgttcgcgaaaatgaaaggttatccacattggccagctcggatcgatgagctccccgaaggagcagtcaaacctccggccaacaagtacccaattttctttttcggtacccatgaaactgcatttctggggcccaaagacttgttcccttataaggagtataaagataagtttggtaagtcaaataaacgaaaggggtttaatgaaggcctgtgggagatagaaaataaccctggggtgaagttcacagggtaccaagcgattcagcagcagtccagttccgaaacggagggtgagggggggaacactgccgacgcttcctctgaagaggagggagatcgggtggaggaggatggcaagggaaaaagaaaaaatgaaaaggcaggctcaaagcgaaagaaaagttacacatccaagaagagttctaagcagtccagaaaatcaccgggggacgaagacgacaaggactgcaaggaagaagagaacaagtcgtcatccgaagggggagacgccggcaatgacaccagaaacaccacctcagaccttcagaagactagcgaaggcacgtag

SEQ ID NO: 189198 - DNA, 612 bp, Artificial Sequence
  derived and/or modified sequence
atggccaggcctcgaccacgcgaatataaggccggtgacttagtgttcgcaaagatgaagggttacccgcactggccagctcgaattgacgaactccccgaaggcgctgtgaagcccccagccaacaagtatccgatttttttcttcgggactcatgagaccgcctttctcgggcctaaggacctctttccatacaaagaatacaaagacaagtttgggaagtccaacaaacgcaaggggttcaatgagggactttgggagatcgagaataatcctggagtcaaatttacaggttaccaggcaatccagcaacagagcagttccgagaccgagggagaaggaggaaataccgcagacgcctcctccgaggaagaaggagacagggttgaagaggatggcaagggcaaacgcaagaacgaaaaagccggtagtaagcggaaaaagtcctatacaagcaagaagtcatccaagcagtccagaaaatctcctggcgacgaggacgataaggactgcaaagaggaagaaaacaagtcgtcctctgaggggggtgacgcaggcaacgatacgcggaataccacaagcgacctgcagaagactagtgaaggcacatag

SEQ ID NO: 189199 - DNA, 1973 bp, Artificial Sequence
  derived and/or modified sequence
agccgccgcctcgccgcttcccctcgtcggagcggccgctcgtccgcccggcttgaggcccgcggggagcgcggcgcaattcgtcggcccgcgggggggcggcctcccggcatcttcgcggcgaccaaggactaccaggaaggggagcggctgggatggcgcgtccgcggccccgcgagtacaaagcgggcgacctggtcttcgccaagatgaagggctacccgcactggccggcccggattgatgaactcccagagggcgctgtgaagcctccagcaaacaagtatcctatcttcttttttggcacccatgaaactgcatttctaggtcccaaagacctttttccatataaggagtacaaagacaagtttggaaagtcaaacaaacggaaaggatttaacgaaggattgtgggaaatagaaaataacccaggagtaaagtttactggctaccaggcaattcagcaacagagctcttcagaaactgagggagaaggtggaaatactgcagatgcaagcagtgaggaagaaggtgatagagtagaagaagatggaaaaggcaaaagaaagaatgaaaaagcaggctcaaaacggaaaaagtcatatacttcaaagaaatcctctaaacagtcccggaaatctccaggagatgaagatgacaaagactgcaaagaagaggaaaacaaaagcagctctgagggtggagatgcgggcaacgacacaagaaacacaacttcagacttgcagaaaaccagtgaagggacctaactaccataatgaatgctgcatattaagagaaaccacaagaaggttatatgtttggttgtctaatattcttggatttgatatgaaccaacacatagtccttgttgtcattgacagaaccccagtttgtatgtacattattcatattcctctctgttgtgtttcggggggaaaagacattttagccttttttaaaagttactgatttaatttcatgttatttggttgcatgaagttgcccttaaccactaaggattatcaagatttttgcgcagacttatacatgtctaggatccttttatcaaggcagttatgatcatcgttttcctgccttgaccccaccatcatcaaacactcagttaaatataaattaacattttttagatgaccactcaacataatgcttaagaatggaatttcctctctgtgacagaacccaggaattaattcctaaatacataacgttggtatattgaagacgaaattaaaattgtccttcagttttgaggccatgtgtaaagtttaaccatattgtaaaatatctattccgtattagaaatagctagttgacagcttatacttctcaaaattcatattgttatgtacacaaactaagtttctatatgtgaagttagtgagtctttttgtgttactccaaaataaaggcaatgatttatttttttcccagtgccaatacaattttgagctaagcactcaaggtggatactttacattttaaagctggaatcagcaacagccctatgggaaaccagacaaagcattgacttttaaatgtagacttttaaaataaactgttttcttttggaactacaattagaatagttaatattcatccttaaaccattattatgtgtacattattgttgctattgtgataatagagaattttatttatttttatgccagcttatattgtgagaacacatttagtcagtttgggttttatcaatcctgttaatgcttgtccttggaacatctttcgcgtattcacggtttgtagttgaaaagtttactgtaaaaaaatcaaaaacaaaaaaatgtattgtttttacagaataaatttattggaatgtgtactgggagtaagatttgaggttgtaagcaaactaagttagtgtaatttggcttcatatatgtaacgtgaggtattaatgtaattcatatattaaagcaaaaattgttcacagc

SEQ ID NO: 189200 - DNA, 612 bp, Artificial Sequence
  derived and/or modified sequence
atggccagacccagacccagagagtacaaggccggcgacctggtgttcgccaagatgaagggctacccccactggcccgccagaatcgacgagctgcccgagggcgccgtgaagccccccgccaacaagtaccccatcttcttcttcggcacccacgagaccgccttcctgggccccaaggacctgttcccctacaaggagtacaaggacaagttcggcaagagcaacaagagaaagggcttcaacgagggcctgtgggagatcgagaacaaccccggcgtgaagttcaccggctaccaggccatccagcagcagagcagcagcgagaccgagggcgagggcggcaacaccgccgacgccagcagcgaggaggagggcgacagagtggaggaggacggcaagggcaagagaaagaacgagaaggccggcagcaagagaaagaagagctacaccagcaagaagagcagcaagcagagcagaaagagccccggcgacgaggacgacaaggactgcaaggaggaggagaacaagagcagcagcgagggcggcgacgccggcaacgacaccagaaacaccaccagcgacctgcagaagaccagcgagggcacctag

SEQ ID NO: 189201 - protein, 386 aa, Artificial Sequence
  derived and/or modified sequence
MDRFVWTSGLLEINETLVIQQRGVRIYDGEEKIKFDAGTLLLSTHRLIWRDQKNHECCMAILLSQIVFIEEQAAGIGKSAKIVVHLHPAPPNKEPGPFQSSKNSYIKLSFKEHGQIEFYRRLSEEMTQRRWENMPVSQSLQTNRGPQPGRIRAVGIVGIERKLEEKRKETDKNISEAFEDLSKLMIKAKEMVELSKSIANKIKDKQGDITEDETIRFKSYLLSMGIANPVTRETYGSGTQYHMQLAKQLAGILQVPLEERGGIMSLTEVYCLVNRARGMELLSPEDLVNACKMLEALKLPLRLRVFDSGVMVIELQSHKEEEMVASALETVSEKGSLTSEEFAKLVGMSVLLAKERLLLAEKMGHLCRDDSVEGLRFYPNLFMTQS

SEQ ID NO: 189202 - DNA, 1161 bp, Artificial Sequence
  derived and/or modified sequence
atggacagattcgtgtggaccagcggcctgctggagatcaacgagaccctggtgatccagcagagaggcgtgagaatctacgacggcgaggagaagatcaagttcgacgccggcaccctgctgctgagcacccacagactgatctggagagaccagaagaaccacgagtgctgcatggccatcctgctgagccagatcgtgttcatcgaggagcaggccgccggcatcggcaagagcgccaagatcgtggtgcacctgcaccccgccccccccaacaaggagcccggccccttccagagcagcaagaacagctacatcaagctgagcttcaaggagcacggccagatcgagttctacagaagactgagcgaggagatgacccagagaagatgggagaacatgcccgtgagccagagcctgcagaccaacagaggcccccagcccggcagaatcagagccgtgggcatcgtgggcatcgagagaaagctggaggagaagagaaaggagaccgacaagaacatcagcgaggccttcgaggacctgagcaagctgatgatcaaggccaaggagatggtggagctgagcaagagcatcgccaacaagatcaaggacaagcagggcgacatcaccgaggacgagaccatcagattcaagagctacctgctgagcatgggcatcgccaaccccgtgaccagagagacctacggcagcggcacccagtaccacatgcagctggccaagcagctggccggcatcctgcaggtgcccctggaggagagaggcggcatcatgagcctgaccgaggtgtactgcctggtgaacagagccagaggcatggagctgctgagccccgaggacctggtgaacgcctgcaagatgctggaggccctgaagctgcccctgagactgagagtgttcgacagcggcgtgatggtgatcgagctgcagagccacaaggaggaggagatggtggccagcgccctggagaccgtgagcgagaagggcagcctgaccagcgaggagttcgccaagctggtgggcatgagcgtgctgctggccaaggagagactgctgctggccgagaagatgggccacctgtgcagagacgacagcgtggagggcctgagattctaccccaacctgttcatgacccagagctag

SEQ ID NO: 189203 - DNA, 1161 bp, Artificial Sequence
  derived and/or modified sequence
atggacagatttgtctggactagcggattgctggagatcaatgaaacgttagtgatccagcagaggggggtgagaatatacgacggcgaggagaagattaaatttgacgctggtaccctgttgctgagtactcaccggctcatttggcgcgatcagaaaaatcacgaatgttgcatggctatactgcttagccagatcgtgtttatcgaagagcaggctgctggtattgggaagtctgcaaaaattgtcgtacatttgcatccagccccacccaacaaggagccaggcccctttcagtcctcgaagaattcctacattaagctctcctttaaggagcacggccagatcgagttttacaggagattgagcgaggagatgacccaacgcagatgggagaacatgcctgtgtcccaatctttacagacaaacagaggcccgcagccagggaggatccgggccgttgggattgtgggtatcgagcgaaagctggaggaaaaaagaaaggagactgacaaaaatataagcgaggcgttcgaggatctatctaagttgatgataaaagctaaggaaatggttgaactctctaaaagcatcgcgaataagattaaggacaagcagggagatataaccgaagacgagacaattaggttcaagtcttacctgttatctatggggattgcgaatccagtgacacgcgaaacctacggtagcggaacacagtaccacatgcagttagctaaacaactggctgggatcctgcaagtaccacttgaggaacgaggtgggatcatgtcactaactgaggtgtattgtctggtgaacagagccagaggcatggaattgttgtctcccgaagacctggtgaatgcctgcaaaatgctggaagcgctcaaactgccactccgattgcgcgtattcgattctggtgtcatggttattgagctgcagtcacacaaagaagaagagatggtggcatccgccctggagaccgtatccgagaaagggagcctgacctccgaagagttcgccaagctcgtggggatgagcgtcctgttggcaaaggagaggcttttactcgctgaaaaaatgggtcacctctgccgagacgacagcgtcgaaggcctgcgattctaccccaacctgttcatgactcaaagctag

SEQ ID NO: 189204 - DNA, 1161 bp, Artificial Sequence
  derived and/or modified sequence
atggacagatttgtgtggaccagcggcctgctggagatcaatgagaccctggtgatccagcagaggggcgtgcgcatctatgatggagaggagaagatcaagtttgatgctggcaccctgctgctgagcacccacaggctcatctggagggaccagaagaaccacgagtgctgcatggccatcctgctgagccagatcgtgttcatcgaggagcaggccgccggcatcggcaagagcgccaagatcgtggtgcacctgcacccagccccacccaacaaggagcccggccccttccagagcagcaagaacagctacatcaagctgtccttcaaggagcacggccagatcgagttctaccgccgcctgtctgaggagatgacccagaggcgctgggagaacatgcctgtgtcccagagcctgcagaccaacagaggcccccagcccggccgcatccgggctgtgggcatcgtgggcattgaaaggaagctggaggagaagaggaaggagacagacaagaacatcagcgaggcctttgaggacctgagcaagctgatgatcaaggccaaggagatggtggagctgagcaagagcatcgccaacaagatcaaggacaagcagggcgacatcacagaagatgagaccatccgcttcaagagctacctgctgtccatgggcatcgccaaccctgtgacccgggagacctacggcagcggcacccagtaccacatgcagctggccaagcagctggccggcatcctgcaggtgcccctggaggagcggggcggcatcatgagcctgacagaggtgtactgcctggtgaacagagcccggggcatggagctgctgagccctgaggacctggtgaatgcctgcaagatgctggaggccctgaagctgcccctgcggctgcgggtgtttgacagcggcgtgatggtgattgagctgcagagccacaaggaggaggagatggtggccagcgccctggagaccgtgtctgagaagggcagcctgaccagcgaggagtttgccaagctggtgggcatgtctgtgctgctggccaaggagcggctgctgctggccgagaagatgggccacctgtgcagagatgattctgtggagggcctgcgcttctaccccaacctcttcatgacccagagctag

SEQ ID NO: 189205 - DNA, 1161 bp, Artificial Sequence
  derived and/or modified sequence
atggaccggttcgtgtggaccagcggcctgctggagatcaacgagacattggtgattcagcaacggggcgtaaggatctatgatggggaggaaaagattaagtttgacgcaggcacgctgcttctgagtactcaccgcttgatatggagagatcagaagaaccacgagtgttgtatggcaatcctgctcagccagatcgtattcatcgaggagcaggctgcagggatcggaaagtctgctaaaattgtggttcatctgcacccggcccctccaaacaaggagcccggaccatttcagagttcgaaaaatagctatatcaaattgtcctttaaagaacatggtcagattgagttttacagacgtctctccgaggaaatgactcaacgccggtgggaaaacatgcctgtatcacagtcactccaaacaaatcgcgggccacaaccaggccgcatacgggccgttggaattgtcggtatagaacgcaaactcgaggagaaacgcaaagagacagataaaaacatctcagaagcatttgaagatctatccaaactcatgattaaagcaaaggagatggtcgagctgagtaaatccatcgcgaataagataaaggacaagcagggagacatcaccgaggacgaaacaattcggttcaagtcctacctgctctcgatgggaatcgccaaccctgttacccgggaaacatatggatctggcacacagtatcatatgcagctggccaagcagctagcgggaatcctgcaggtgcccctagaagaacgcgggggcattatgagtctcacggaggtgtactgtctggttaaccgagccaggggaatggaacttctctctccagaagatttggtgaacgcatgcaagatgctggaagccctgaagctaccgctccgcttacgagtgtttgatagcggcgtgatggtaattgagctgcaaagccataaggaagaggagatggtcgcctcagctttagaaaccgtgtcggagaaaggttcactgacctcggaagagtttgccaagctggtgggcatgagtgttttattggcgaaagaaaggctgctgctcgccgagaaaatgggccacctctgcagggacgatagcgtcgagggcttgagattctatccgaatctgttcatgacccaatcttag

SEQ ID NO: 189206 - DNA, 1161 bp, Artificial Sequence
  derived and/or modified sequence
atggatcgattcgtgtggacatctggcctcctggaaattaatgagacactcgttattcagcagagaggcgtgcgcatctatgatggagaagagaagattaagttcgatgccggtaccctactcctctcaactcacagactcatctggcgcgaccagaaaaaccatgaatgctgcatggccattttgcttagccaaatagtgtttatagaggagcaggctgcgggaattggcaaaagcgccaaaattgtcgtgcatctccaccccgcaccccctaataaggaacccggaccttttcagtctagcaaaaattcttacatcaaattatcctttaaggaacatggccagattgaattttaccgccgactgtctgaagaaatgacacagagaagatgggaaaacatgcctgtgagccagtccctccaaacaaatcggggaccccagcctggacgtataagagctgtggggattgtcggcatcgaacgcaagttagaggaaaagcgcaaagaaacggacaagaatatttctgaggcatttgaggatctcagtaagcttatgatcaaggccaaagagatggtcgaactatctaagagcattgccaataaaatcaaggacaagcaaggcgacattactgaggacgagactatccgattcaagagttatttactgtctatgggaatcgccaatcccgttacacgggagacatatggaagtggaacccaataccacatgcagttggccaaacagctcgcaggaatccttcaggtgccccttgaggagcgtgggggaatcatgtctctgaccgaagtgtactgtttggtgaaccgagctagagggatggagctgctgtcgccagaggatcttgtcaacgcctgcaagatgctggaggcactgaaacttcccctgcgactgcgggtgttcgatagtggggtaatggtgattgaactgcagtcccacaaggaagaggaaatggtcgcaagcgccctagagactgtctcagaaaagggaagcctgacttccgaggagtttgcaaaattagtgggcatgagcgtgcttctcgcaaaggagcggctgctgctggccgaaaaaatgggacatctttgccgcgatgatagcgtggaaggactgcgattttacccaaatcttttcatgacacagagttag

SEQ ID NO: 189207 - DNA, 4315 bp, Artificial Sequence
  derived and/or modified sequence
ggagggccggggctgggtggcagcggccatggaccgcttcgtttggaccagcggcctcctggagatcaacgagaccctggtgatccagcagcgcggggtgcgaatctacgatggcgaggagaagataaaatttgatgctgggactctccttcttagtacacaccgactgatttggagagatcagaaaaatcatgagtgttgcatggccattctcctttcccaaattgtgttcattgaagaacaggcggctggaattgggaagagtgccaaaatagtggttcatcttcacccagctcctcctaacaaagaacctggcccattccagagtagtaagaactcctacatcaaactctccttcaaagaacatggccagattgagttttacaggcgtttatcagaggaaatgacacaaagaagatgggagaatatgccagtttcccagtcattacaaacaaatagaggaccccagccaggaagaataagggctgtaggaattgtaggtattgaaaggaaactggaagaaaaaagaaaagaaactgacaaaaacatttctgaggcctttgaagacctcagcaaactaatgatcaaggctaaggaaatggtggaattatcaaaatcaattgctaataaaattaaagacaaacaaggtgacatcacagaagatgagaccatcaggtttaaatcctacttgctgagcatgggaatagctaacccagttaccagagaaacctacggctcaggcacacagtaccacatgcagctggccaaacaactggctggaatattgcaggtgcctttagaggaacgagggggaataatgtcactcacggaggtgtactgcttagtaaaccgagctcgaggaatggaattgctctcaccagaagatttagtgaatgcgtgcaagatgctggaagcactgaaattacctctcaggctccgtgtgtttgacagtggcgtcatggtaattgagcttcagtctcacaaggaagaggaaatggtggcctcggccctggagacagtttcagaaaagggatccctaacatcagaagagtttgctaagcttgtgggaatgtctgtcctcctagccaaagaaaggttgctgcttgcagagaagatgggccatctttgccgtgatgactcagtggaaggcctgcgtttttacccaaatttatttatgacacagagctaagggttttgtatttaaaatcctttttgtccatatgcttgcgtcatgtagaggttgtatgacattgagctaagagataaaccccgatcaattgagaatttattggaacttcacagtgcaatgtaaatctcttttaatttctcactaaatatggtccaggaaatttatttagtatacgcataggaaaattcagaaaagtgaatgccaatatgaatttaaaatcatgctatagtgcagaaccctcagagtttaacttggaatatagtggattttaacttgatcctcaaatctaatcattttataaagaagggaatttagttttgcagagaataaaaagagaagttgcatgttcagacaggttagattattattttggtgtaactgaaattcactgattgcacatgacaatgttgggacaaaatatactgcagcatgctatatgaggctcctccccagggcttttagaagcagtcatagacatgtcttcaacataccaaataaaatacctttaaaaatgaaataattttatttgacacatatatttatatatattctatctagtttctctttgtttttttaagtgatgatttcatgactggcatttaaagaatgcaactgtgtcattttgtttccaaatgctgtggattttgaaactgaactagagagctgtatagacatgcccagagttatgattacaaatttaggaggtagacggctcaggaattccctgggattgttgtgctggtggaatggcagagggaacttcacaggaaccttagtgttcttttacctcaaagccacagacaggaaatagaaagtggaaaagtaatatctccttttcttttccataaggagtttcaacactgaactttaaaaagtctatcatattccagcaatattttttctttgtcctttatgttgtaagttgtgtggaaaaactacttcggtaagaaatgttactgagataacaacaactggctaatactgcatgtagattgcttaggttttaaagtgactgcctgacttcacatgttattgctacagcctccagtatgttcgcattatctcaaactcagggaccccacaggacaggagacaccctttctgaaactgagttggaagtgaaagggtggtgatggttttggccaagcctgcgggagggaaagtattgtattgggagcacccttgggaccaggaagagggatgcccaggttcacactctgggacccctaagacattgtcagtgggtaaggtggagggccactgccagaggctgctgcagtgccctctgggaagtgccagggaccctcagctgcagacccaggggatcccaatcccttatctctgcctgaaaagtggctattgctgcttcgtatcctccagtgtcacaggaatgctgtgcctgagacatcccactttagtttttgttttccaaacctgtcactgactcttcattgtggtgacagatcctctggttcccccattgctcagcctcaggtttattttgagggtaactcagtgtctgactgcccaagtcttttaggggttagttggaccattgtgtaagcttgtttgtatgtctcacctctttctggttggtacttactgtctcacactgctctggcaaacttgtacacacacacacactctctctctctctcacctggctaaggcttttaaaattatgaagataaataatctgtttcaccagctggagtgagttgcaaggaagattgctggagctactcaatctagcgctaatggtttggattcattactgcaaacctacataatttaacatatttgtttactttagtgtgacaactgatgaaaaaaaatggagcaatctgaattgtataaaataacttaagaaggaagaaaagtgatatataaatatattttgcaaatgtcacattaatttaaaaatgagtatgattgattttatttttaaagtgggcattcttcactgtttcgagacctttgtatgtatttgtgtatttttatctttttttttcaggccattattataaggtgttattttggccctctaatgtagaagttatgtttaaatacaaccaatcaggccctaagtgcaaaaaagttctgtcttggtgcttatcactggtataattattatttttttgttttcctaactttgctcttaggagcatgagcctctttgtagctttatggtaatgcaatatttctggtcatttactgtcaaaaaatttttttacattgtgttagtgaagactgtgttttcagggttaaatgattggtatcaatgtatatagagtaaaattattgcaaaatttaaaaatgatttttcttggcattctttttaaatactctgaaacatatatgcaaatgagaaacctttaatcatactaaagccagttatgttaagaatttttcctttggattttataattaagagttgcttataaatacttatgacattgagctcttactgttttagttgtcttaaaacaatgggacatgtcatgaactggtttctttttttaaaaaattcttgatgtgaattccactgttacctgaccatgtatattcagatgaatgtactctttcttgttccttgttaccagattaatctgagagaatgtggattcatcctgtcatctttctcatactcaaatacttaaaatggttcttttgcccaaaagtctcagagtcttcattttggtacagtggagtcacaacttgtaaggtggttaggttttaaagaccgtgcctaaggacaaaattgagcatgctcagaatggtccttgaaaatctcctaaattaccaataaatttctctttgtagtcttaaagtttaaatccctgtggagtgatatgtaggtatgaatatattatgcttatattaagtacaaaaatacaaactgcatatcaagagattcttatagcattaataatttccatgcatgtgtctttttccagtaggtatggttgaatttatgtaaatttattgctaatcccatcccttacgatctagagtataagctgcgcaagggcagaagtttttatctggtttgttcatggatgtattctaagagctgagaacagggcctggacacaataagcattcaataaatatttactgaatgaa

SEQ ID NO: 189208 - protein, 194 aa, Artificial Sequence
  derived and/or modified sequence
MGANQLVVLNVYDMYWMNEYTSSIGIGVFHSGIEVYGREFAYGGHPYPFSGIFEISPGNASELGETFKFKEAVVLGSTDFLEDDIEKIVEELGKEYKGNAYHLMHKNCNHFSSALSEILCGKEIPRWINRLAYFSSCIPFLQSCLPKEWLTPAALQSSVSQELQDELEEAEDAAASASVASTAAGSRPGRHTKL

SEQ ID NO: 189209 - DNA, 585 bp, Artificial Sequence
  derived and/or modified sequence
atgggcgccaaccagctggtggtgctgaacgtgtacgacatgtactggatgaacgagtacaccagcagcatcggcatcggcgtgttccacagcggcatcgaggtgtacggcagagagttcgcctacggcggccacccctaccccttcagcggcatcttcgagatcagccccggcaacgccagcgagctgggcgagaccttcaagttcaaggaggccgtggtgctgggcagcaccgacttcctggaggacgacatcgagaagatcgtggaggagctgggcaaggagtacaagggcaacgcctaccacctgatgcacaagaactgcaaccacttcagcagcgccctgagcgagatcctgtgcggcaaggagatccccagatggatcaacagactggcctacttcagcagctgcatccccttcctgcagagctgcctgcccaaggagtggctgacccccgccgccctgcagagcagcgtgagccaggagctgcaggacgagctggaggaggccgaggacgccgccgccagcgccagcgtggccagcaccgccgccggcagcagacccggcagacacaccaagctgtag

SEQ ID NO: 189210 - DNA, 585 bp, Artificial Sequence
  derived and/or modified sequence
atgggagctaatcagctggtggtcctaaatgtgtacgacatgtactggatgaacgaatatactagctccatcggaatcggcgtgttccattcaggaatcgaagtgtacggacgcgaatttgcttatggaggccatccttacccatttagtgggatcttcgagattagccctggcaatgcgagtgagcttggcgagacttttaagttcaaggaggctgtcgtcctaggcagcacagacttcctagaggacgatatcgagaaaatcgtggaagagctgggaaaagaatataagggcaatgcctaccacctgatgcataaaaactgtaatcattttagctccgctttgagtgaaattctgtgtggaaaagagatccctcggtggattaatagactggcctatttcagcagctgtattcccttcttgcagtcctgcttgcctaaagaatggcttactcctgccgctctgcaatctagcgtttctcaggaacttcaagacgagcttgaggaggcagaggacgccgccgcatccgcctccgtagctagcactgccgcagggtcccgccctggacgccatacaaagttgtag

SEQ ID NO: 189211 - DNA, 585 bp, Artificial Sequence
  derived and/or modified sequence
atgggcgccaaccagctggtggtgctgaatgtgtatgacatgtactggatgaatgagtacaccagcagcatcggcatcggggtcttccacagcggcatcgaggtgtatggccgggagtttgcctacggcggccacccctaccccttcagcggcatctttgagatcagccctggaaatgccagcgagctgggggagaccttcaagttcaaggaggccgtggtgctgggcagcacagacttcctggaggatgacatcgagaagatcgtggaggagctgggcaaggagtacaagggaaatgcctaccacctgatgcacaagaactgcaaccacttcagcagcgccctgtctgagatcctgtgtgggaaggagatcccccgctggatcaaccggctggcctacttcagcagctgcatccccttcctgcagagctgcctgcccaaggagtggctgaccccagctgccctgcagagctctgtgtcccaggagctgcaggatgagctggaggaggctgaagatgctgctgccagcgcctctgtggccagcacagctgctggcagccggcccggccgccacaccaagctgtag

SEQ ID NO: 189212 - DNA, 585 bp, Artificial Sequence
  derived and/or modified sequence
atgggcgccaaccagctggtggtgctgaacgtgtacgacatgtactggatgaatgagtacacttcctccattggcattggtgtgtttcattctggtattgaggtctacggccgcgaatttgcctacggcgggcacccatatccgtttagtggaatttttgagatctcccccggaaatgcttccgagttaggggaaactttcaagttcaaggaggcagttgtcttgggtagcaccgacttccttgaagacgatatcgaaaaaatcgtggaggagctcggaaaggagtacaaaggaaacgcttatcatcttatgcacaagaattgtaatcacttctcttccgcgctgtctgagattctctgtggcaaagagatacctcgctggattaatagacttgcttatttttctagctgcatccctttcttgcagagctgcctccccaaagagtggctgactcccgctgcacttcaaagttcagtgagtcaggagctacaagacgagctagaggaggctgaggacgcagccgcttccgcctctgttgctagtacggcggccggtagtcgtccagggcggcatacaaagctgtag

SEQ ID NO: 189213 - DNA, 585 bp, Artificial Sequence
  derived and/or modified sequence
atgggagccaatcagctggtggtgcttaatgtgtacgacatgtactggatgaacgaatacacttcttctatcggtattggagtcttccactctggcatcgaggtctatggcagggaattcgcatacggagggcacccataccctttcagcggcatcttcgaaatcagtcccggtaacgcctccgagctgggcgagactttcaaattcaaagaggcagttgtccttggctcaactgattttcttgaagacgacattgagaagatagtggaggagctaggtaaggagtataaaggtaatgcctatcacttaatgcacaagaattgtaatcatttttcttctgccctttccgagatcctctgcgggaaggaaattccacgctggataaataggctggcctacttctctagctgcattcctttcctgcaatcctgtctgcctaaggagtggcttacccccgctgccctgcaaagcagcgtgtcccaggagctgcaggatgaactggaagaggcagaggacgcggcagccagtgcctcggtcgcatctacagctgccggatcacgccctgggaggcacaccaaactgtag

SEQ ID NO: 189214 - DNA, 4208 bp, Artificial Sequence
  derived and/or modified sequence
attttaggtcccgaggtgcgccggccgagaaccagagcgcaggcgggctcagtcctggcgccgggccggccccgcccccggggcgcctggcgcccgccccttgctcaagccccgcctttccccacgtgtctgccgcctaggggaggtgcctcatccggagcgggccgccaacggtccggccccgtccgcacagacgctcctgtcggcggcgcccgggagcggctcggctgcccgatgcttccgccccggctgccgcgggccgggctgtacgcttagtgcccggctcaggccccctgaagcgcccgcgggggtgagagcggcctccggccccgcggagacggagcggcttgaggacgaggcggcggccgcggggaggaggatgggggctaaccagttagtggtgctcaacgtgtacgacatgtattggatgaacgaatatacctcatccattggaattggagtttttcattcaggaattgaagtctatggcagagaatttgcttatggtggccatccttaccccttttctggaatatttgaaatttccccaggaaatgcttctgaactaggagaaacatttaaatttaaagaagctgttgttttagggagcacggacttcctagaagatgatatagaaaaaattgtagaagaactgggaaaagaatacaaaggcaatgcttatcatttaatgcataaaaactgcaatcatttttcttcagctttatcagagattctttgtgggaaagagattcctcgctggatcaatcgacttgcctacttcagctcctgtataccctttctacagagttgcctcccgaaggagtggctcacgcccgcagccctgcagtctagtgtcagccaagaactccaggatgaactggaggaagcagaggatgctgccgcatccgcttccgtggcaagcactgcagcaggctccagacccgggcgccacactaaactataaatgtctccaaagtcacacattcagaactgtctctggcagtcgaatatcactagagaaaagtaaacagagaagcatcctttagatattttgtatgcaaagatggctctcccccaaatcccagtttttcagctcaggattatatttgtaatcaaaaaaaaaaaatcacttggcgcaggagggagaactttgtaagaagctgccctctgttttttttatccactcgtaaatctggatttatttcttctgttttatacaagctctgttaagttatgtttacagtatcttgtatcgctgtttacaaatcttgcatggactcctgccacagtgaaagaagaaaatcttcatgtcttcaaaaattaggcaggtaatctttgtatacttctgacaattgccagatctatggcataaataggcacacaaaaaggtacttaaacagttatagtcaccatcacctgcttcagaatggtcttttagatttgtgtttgttttgttaaagttgttggcaccaggatgcagagaatcagactggcctgaggtgaaggagcacacagccctgagggcttggaaccctgggtccagttcctcttcacacccccttccactctgagtagcacatctccccaggtgcccatggaacacctgctttcatcccaaatatccgtccacctaggcggggtggtatgttcttacgtctctctgactttgatgccactcattctatagtttagctggttttcgttcaagatattcttggtagtaactgacaagtatgttgcacatgtattgggggaggcgcttcatttttattttaatacacatgtatttcctccttgcacaggattttgatggtgtgggaatatcctaagtggtagccttccaagtagcagtgagttgacattcagctgcttttaactattcaggctaccttttatactaaaccttgaaaactagaatctaatgtctaccccaaaaaagtagttctttgatattttatactttttatgtaccatgtcagaaagagtatgttggcgtttgtcatgggactcatttcacataatagaatgcctagtctcattgaccaatcgttaaaaaatcatatttgtgtgtcttaagattcatatttatatgttctctcaaatgtatgtctcttacgtaacatactctaagaatgaaactgtcaccacaggtaaatccttgttagcaaggaatctgtctgctccagtctactcctagtttgatccttggatgtaagaaccaagtcattacatgtcaaattcaatttttctgccttaagaatgaatgtccttcataaaatattggatgcagtgtaacactatccaaggcagtgacttcagctttatatacatataaaatatagttagttttaaaattattgacatttatttaaacttttagattggattgtttgctattgctctgtgtgaggatacataatctttcagtaaactgtatttttaacttttccataagctgattttggttcattttatcaacgtaagcacaccctgttcatagggaaaataaaccttgggttataagcattagcctgaggacaatgaagccacttaacctaatttatgctttcgactgttctgtttccagagaggaaagcctttacaaattactctcagttctttaggggcagaaggcttgtttcaagaggtttgacagaagaaaggaatatatgaacttaatgagatgtcgacttggttcaggtctaaaaatgagggcaaaacactaaggctctagcagtgacttgttcactaaaaagagagagtcctgtccccagacggttagtacaaagccttggatacagtttgcttgtaatatttttaataatgtgaggagtacagtgttttctaattcattcaagtatatatgatttaaacctgggctactgacacacacacagtagccattagttagactcttcttagtgaatatcaggaacatcccatctgtgcttaaccagaatccagcaagtcagcacacaagtgattttattgttattttgttgtatttacttgcatttgttgtatttactttcatctgcagcatttggagtttaaaaataatgtaaagggttctagtagaaatagtgtcctaaggccaattacctaccatactaacaatcagcagataaaattctggacgtgagattccttataatctaattatacctgaggttgagcaagaaatgtcttcctttagaaaatctcattcaagtcaggttcttctctacagttcaaaattgagaatggatttaattaactagcatttagccagctttttcttgcccttggagaaaaagaatcattctcaacctgataatctgttaagaaaaatcccatatgaacaatctggtcattaacatacatatgatacggagtctctttgttgtcaccaagtgaacatacttctcatggtgggttggacagtaatacatgttagagggtcagaagcttctggtttctgctgtttgctttaaatacccttggggtttttttttaaacccttacaaggggagcatcagctttggaaagtgtgactctgtaggagtgtagaaggcagtggtgtatgatcttagcctcgtcctgatgcctgaatccagccagctgttgctctgacccacagcaatagagcaagttacccatcaccagcatttgtacagagcagggaattctggttttagtccattggtagcattgtgtgtatgaggagattcaacaccacagacagctgcaggactcgatatccatggcttctttccatcacaaaacgggtagaaacacattcactgcttcagggttctaatctgtgtgtctccttatgactccatttctgtaagctactctgtaactttgatatatgctgtattttctttctttaaaagatttagatgttttttcagcaagctagccatacaaccattgtatctctttctcttcagtatggtttagagcccagatcagttagtaggctttcgttgtcttctctttcaatacatgtacatctttactgtttgaaaagtgttacagctgtcaaagaatcttcatggacctgaagataatttcttgtgaagttgaatgcaagtgtactgtcattcatagtgtttatatcaaaataccaggaatcttcacttttgctaccttgatatagcattgggctatcatgttacaacattgaaatacattgatttattaaaaaatacttttataagaaa

SEQ ID NO: 189215 - DNA, 540 bp, Artificial Sequence
  derived and/or modified sequence
atgccctctaagtcgctagtcatggaatatctcgcccatccatcgacattgggtctcgccgttggtgttgcatgcggcatgtgccttgggtggagcctgcgagtctgcttcggaatgctgccaaaaagtaaaacttctaaaactcacacggatactgaatctgaggccagcattttgggagacagtggcgagtacaaaatgattctcgtggtgcggaacgatctgaagatgggcaaaggcaaggtcgccgcccagtgctctcatgccgctgtctccgcttacaagcagatccagaggcggaaccccgagatgctgaagcagtgggagtactgtggtcagccaaaggtagtcgtaaaagccccggatgaggagactctgatcgccctgctggcccacgcaaagatgcttgggcttaccgtgagcctcatccaggacgcagggagaacccagattgccccagggagtcagacagtgctaggcatcggtcctgggccggccgatctcattgataaggtaactggccatctgaaactgtactag

SEQ ID NO: 189216 - DNA, 540 bp, Artificial Sequence
  derived and/or modified sequence
atgccatccaagtctcttgtgatggaatacctggcacacccttcaactttggggcttgctgtgggagtggcatgcggaatgtgtctgggatggtccctccgggtttgtttcggaatgctcccaaaaagcaagaccagcaagacccacacggataccgaatccgaggcttcaatccttggtgacagtggggaatataaaatgatcttagtcgtgagaaacgatttgaaaatgggaaagggtaaagtcgccgcacagtgtagccacgctgccgtgtcggcatacaaacagattcagaggcgaaacccggaaatgctgaaacaatgggagtattgcggacagcccaaggtcgtcgtaaaggcccccgacgaggaaactcttatagcccttctggctcatgccaaaatgttaggccttacagttagtctgattcaggatgccggcaggactcaaattgctccggggagtcagacggtcctgggaatcggccccggcccagccgatctgatcgataaggtaaccggtcatcttaaactgtactag

SEQ ID NO: 189217 - DNA, 540 bp, Artificial Sequence
  derived and/or modified sequence
atgcccagcaagagcctggtgatggagtacctggcccaccccagcaccctgggcctggccgtgggcgtggcctgtggcatgtgcctgggctggagcctgcgggtgtgcttcggcatgctgcccaagagcaagaccagcaagacccacacagacacagagagcgaggccagcatcctgggggacagcggggagtacaagatgatcctggtggtgagaaatgacctgaagatgggcaagggcaaggtggccgcccagtgcagccatgctgctgtgtctgcctacaagcagatccagaggaggaaccctgagatgctgaagcagtgggagtactgcggccagcccaaggtggtggtgaaggccccagatgaggagaccctgattgccctgctggcccacgccaagatgctgggcctgactgtgtccctcatccaggatgctggccgcacccagatcgcccctggcagccagacagtgctgggcatcggccctggccctgctgacctgattgacaaggtgacaggccacctgaagctgtactag

SEQ ID NO: 189218 - DNA, 540 bp, Artificial Sequence
  derived and/or modified sequence
atgcccagcaagagcctggtgatggagtacctggcccaccccagcaccttgggcttggcggtaggcgttgcttgtgggatgtgtttggggtggagcctccgggtttgtttcggaatgctgcctaaaagcaagacctctaaaacccacaccgataccgagagcgaggctagcattctgggagatagcggggagtataaaatgatacttgttgtgagaaatgatctgaagatgggcaagggaaaagtggctgcccagtgttcccacgcagcagtgtccgcttacaagcagatccaaaggaggaaccccgagatgctgaaacagtgggagtattgtgggcagccgaaagtggtagttaaggcacctgacgaggagacactgatcgctctgttggcccatgcaaaaatgctcgggctcaccgtcagcctgattcaggatgccggaaggacacagatcgctcccggttcacaaacagttcttggcattggccctggtccggcagaccttatcgacaaggtcaccgggcacctcaagctttactag

SEQ ID NO: 189219 - DNA, 540 bp, Artificial Sequence
  derived and/or modified sequence
atgcccagcaagagcctggtgatggagtacctggcccaccccagcactctcggcctcgccgtgggcgtcgcatgtggcatgtgtctcgggtggagcctgagggtctgcttcggaatgctgccaaaatctaagacatcgaagacacacaccgacacagaatcagaggcatcaatcctgggcgacagtggcgaatacaaaatgatactggtggtacggaatgacttaaagatgggcaagggcaaagtggctgcccaatgctcgcacgctgcagtctccgcatataaacaaatccaaagacggaacccagaaatgctgaaacagtgggaatactgcggacaacctaaggtcgtggtcaaggcgcccgatgaggagactctgattgccctgttggcacacgccaaaatgttaggactgacggtatccctaatccaggatgcgggaaggactcagatagcccctggcagccagacagtgctgggcatcggaccggggcccgccgatctaatagacaaggttacaggccatcttaaactatactag

SEQ ID NO: 189220 - DNA, 901 bp, Artificial Sequence
  derived and/or modified sequence
atacgttcctccctcctttcggcgagctcggttgatcctcgcgggatttcagttaggctcttagtgcgggccctgtgggtgtggcaagaggaagaatgactgctcgctttgtgattcttgatccggaacttgtcacccaggaaccccggaagaggtagctcacgcgatagaaacgtgttcgctgcccagaagaagggaaggcgcgagtgaggaaaggaggtactgtagatgccctccaaatccttggttatggaatatttggctcatcccagtacactcggcttggctgttggagttgcttgtggcatgtgcctgggctggagccttcgagtatgctttgggatgctccccaaaagcaagacgagcaagacacacacagatactgaaagtgaagcaagcatcttgggagacagcggggagtacaagatgattcttgtggttcgaaatgacttaaagatgggaaaagggaaagtggctgcccagtgctctcatgctgctgtttcagcctacaagcagattcaaagaagaaatcctgaaatgctcaaacaatgggaatactgtggccagcccaaggtggtggtcaaagctcctgatgaagaaaccctgattgcattattggcccatgcaaaaatgctgggactgactgtaagtttaattcaagatgctggacgtactcagattgcaccaggctctcaaactgtcctagggattgggccaggaccagcagacctaattgacaaagtcactggtcacctaaaactttactaggtggactttgatatgacaacaacccctccatcacaagtgtttgaagcctgtcagattctaacaacaaaagctgaatttcttcacccaacttaaatgttcttgagatgaaaataaaacctattcccatgttcta

SEQ ID NO: 189221 - DNA, 540 bp, Artificial Sequence
  derived and/or modified sequence
atgccttcgaaatcactggtgatggaatacctcgcacatccctcaactctcggtctggccgttggcgttgcgtgcggaatgtgtctgggctggtctcttcgggtgtgttttggcatgcttccaaaaagcaagacatccaagacgcacaccgacacagaatctgaggcgtctattcttggcgacagcggtgaatataaaatgattcttgtggttaggaatgatcttaaaatgggcaaaggcaaggtggccgctcagtgtagccatgccgctgtgagtgcctataagcagatacaacgcagaaatcccgagatgctgaaacagtgggaatattgcggtcagccaaaggtggtcgtgaaggctccagatgaggagactctgattgccctcctggcccatgcaaaaatgctcgggctgacagtttcactgatacaggacgccggaaggactcaaatcgcccctggctcccagacggttctgggaattggacccggacccgctgatctgatcgacaaggttaccgggcacctgaaactctactag

SEQ ID NO: 189222 - DNA, 540 bp, Artificial Sequence
  derived and/or modified sequence
atgcccagtaaatcgctcgtcatggagtatttggcccacccctccaccctcggattggcggtgggcgttgcttgcggcatgtgtcttggttggagcttgagagtgtgttttggtatgttaccgaaatctaagacctcgaagactcatacagacacagagtccgaggcctctatcctgggggacagcggtgagtacaaaatgatattagtcgtgaggaatgatctaaaaatgggcaaggggaaggttgctgcccagtgctctcacgcagccgtgagcgcatacaagcaaatccagagaagaaaccccgaaatgttaaaacagtgggagtattgtggccagccaaaagtggtcgttaaagcacctgacgaagagacccttatcgccttattggcgcatgccaagatgctcggactgactgtgtccctgatccaagacgccggtcgcactcaaattgccccaggcagccaaacagttttaggaatcggacccggtccggctgatctgatcgataaggtcactgggcacctaaagctgtattag

SEQ ID NO: 189223 - DNA, 540 bp, Artificial Sequence
  derived and/or modified sequence
atgcccagcaagagcctggtgatggagtacctggcccaccccagcaccctgggcctggccgtgggcgtggcctgcggcatgtgcctgggctggagcctgagagtgtgcttcggcatgctgcccaagagcaagaccagcaagacccacaccgacaccgagagcgaggccagcatcctgggcgacagcggcgagtacaagatgatcctggtggtgagaaacgacctgaagatgggcaagggcaaggtggccgcccagtgcagccacgccgccgtgagcgcctacaagcagatccagagaagaaaccccgagatgctgaagcagtgggagtactgcggccagcccaaggtggtggtgaaggcccccgacgaggagaccctgatcgccctgctggcccacgccaagatgctgggcctgaccgtgagcctgatccaggacgccggcagaacccagatcgcccccggcagccagaccgtgctgggcatcggccccggccccgccgacctgatcgacaaggtgaccggccacctgaagctgtactag

SEQ ID NO: 189224 - protein, 205 aa, Artificial Sequence
  derived and/or modified sequence
MLQQDSNDDTEDVSLFDAEEETTNRPRKAKIRHPVASFFHLFFRVSAIIVYLLCGLLSSSFITCMVTIILLLSCDFWAVKNVTGRLMVGLRWWNHIDEDGKSHWVFESRKESSQENKTVSEAESRIFWLGLIACPVLWVIFAFSALFSFRVKWLAVVIMGVVLQGANLYGYIRCKVRSRKHLTSMATSYFGKQFLRQNTGDDQTS

SEQ ID NO: 189225 - DNA, 618 bp, Artificial Sequence
  derived and/or modified sequence
atgctgcagcaggacagcaacgacgacaccgaggacgtgagcctgttcgacgccgaggaggagaccaccaacagacccagaaaggccaagatcagacaccccgtggccagcttcttccacctgttcttcagagtgagcgccatcatcgtgtacctgctgtgcggcctgctgagcagcagcttcatcacctgcatggtgaccatcatcctgctgctgagctgcgacttctgggccgtgaagaacgtgaccggcagactgatggtgggcctgagatggtggaaccacatcgacgaggacggcaagagccactgggtgttcgagagcagaaaggagagcagccaggagaacaagaccgtgagcgaggccgagagcagaatcttctggctgggcctgatcgcctgccccgtgctgtgggtgatcttcgccttcagcgccctgttcagcttcagagtgaagtggctggccgtggtgatcatgggcgtggtgctgcagggcgccaacctgtacggctacatcagatgcaaggtgagaagcagaaagcacctgaccagcatggccaccagctacttcggcaagcagttcctgagacagaacaccggcgacgaccagaccagctag

SEQ ID NO: 189226 - DNA, 1853 bp, Artificial Sequence
  derived and/or modified sequence
ttggtgacgggtcgcctcagttccgacccggacccgtacgctgctgcgctgacgtggctcccggaagtagggctggcgtagggccgccatgttgcagcaggatagtaatgatgacactgaagatgtttcactgtttgatgcggaagaggagacgactaatagaccaagaaaagccaaaatcagacatccagtagcatcgtttttccacttattctttcgagtcagtgcaatcatcgtctatcttctctgtgggttgctcagcagcagctttattacctgtatggtgacaattatcttgttgttgtcgtgtgacttttgggcagtgaagaatgtcacaggtagactaatggttggcctacgttggtggaatcacattgatgaagatggaaagagccattgggtgtttgaatctagaaaggagtcctctcaagagaataaaactgtgtcagaggctgaatcaagaatcttttggttgggacttattgcctgtccagtactgtgggtgatatttgcttttagtgcactcttctccttcagagtaaagtggttggcggtggttatcatgggtgtggtgctacaaggtgccaacctgtatggttacatcaggtgtaaggtgcgcagcagaaagcatttaaccagcatggctacttcatattttggaaagcagtttttaagacaaaacactggagatgatcagacttcctgaatagagaaagcttatgtgctttgttacattggggaacaactgaagagattcttgactcaaccttttagagcttagtccatgttgcaacgaggagtgttggctttgtttttccacttaaaaactttatttataaaaaggaaaagtagttttcatattaagtttttatttcctttccagcagttggggctagaaagtatgtgttggcactagaaacattgtcaagatttgttctgtggtgtaggtatgcacattccataggtatgcacacggccatgtaatatcagtatatcccaagttaatgaaagtgttcatttacataggtaatggagacctttgcattttgatccatagaacataggaggatgttcttagtctgtctcaaagctctatatgtttacatattatttctgtagattgttttcaggagaaagttttgcttctatggtaagagtgagcactttggcttatgtataagttagaaataattgttagtttttaatatgcacttcgtggggaaatttcttagacgtatgcaagcaagtgaaaacaattagggccagtggtattaactactttataaaattttatttttgtttgtaagaagtcatctatttaaggcccagttaatataagtggaatcatcatagtttaaggaatacccagagattgctgctgttctatttattttacagaaaggatagctagattgaaagctcttcagtggaccttgagctaatagatcttttaccactaaaagagcattattctcatgtcataatgagaataataatttacatacttggcataataaatgcctaaaagacattttattttctgaatctatttttttcttgctataatggggatattgtaaattatgcatttgtattaatggtatttcttaaagcaatctatgtaactgtaaattaaaccaatctacaaactattgtaggcatctgtaaattctgttgtaggtattataaactttgttgaagtcttaatcagcagattatgttgtgaatatatttgtacattgttaaaatagtttttaagattatttgtttaattgaataagtgtcttattggagtgatagctttgaaggtgcaaaactttatatttgtataaaattctactatttacaaggca

SEQ ID NO: 189227 - DNA, 618 bp, Artificial Sequence
  derived and/or modified sequence
atgctccaacaggatagtaatgacgacacggaagatgtcagtctatttgacgccgaggaagaaacgaccaataggccgagaaaggccaaaattcgtcatccagtggcctcattttttcacctgttctttcgcgtctctgccattatagtctatctgctgtgtggattgttaagcagctctttcatcacatgcatggtgactatcatcctgctgctgtcctgcgatttctgggccgtaaaaaacgtgacgggcagactgatggttggacttaggtggtggaatcatattgacgaagacgggaagtcgcactgggtatttgaatccaggaaagaatcctcgcaggaaaataagacggttagtgaagctgaatcaagaatattctggctaggcctgatagcttgccccgtcttgtgggtcatcttcgccttcagcgccttgttttctttcagggtgaagtggctggcagttgtgatcatgggggttgtcctgcaaggcgcaaacctgtatggctacattcgctgcaaggtcagaagtcgtaagcacctcacatcaatggcaacatcatatttcgggaaacagtttttgagacagaacactggcgatgatcaaaccagctag

SEQ ID NO: 189228 - DNA, 618 bp, Artificial Sequence
  derived and/or modified sequence
atgctgcagcaggacagcaatgatgacacagaagatgtgtccctgtttgatgctgaggaggagaccaccaaccggcccaggaaggccaagatccgccaccctgtggccagcttcttccacctgttcttccgggtgtctgccatcatcgtgtacctgctgtgtggcctgctgagcagcagcttcatcacctgcatggtgaccatcatcctgctgctgagctgtgacttctgggccgtgaagaatgtgacaggccgcctgatggtgggcctgcgctggtggaaccacattgatgaagatggcaagagccactgggtgtttgagagcaggaaggagagcagccaggagaacaagacagtgtctgaggccgagagccgcatcttctggctgggcctcatcgcctgccctgtgctgtgggtgatctttgccttcagcgccctcttctccttccgggtgaagtggctggccgtggtgatcatgggcgtggtgctgcagggcgccaacctgtatggctacatccgctgcaaggtgcgcagcaggaagcacctgacctccatggccaccagctactttgggaagcagttcctgcggcagaacacaggagatgaccagaccagctag

SEQ ID NO: 189229 - DNA, 618 bp, Artificial Sequence
  derived and/or modified sequence
atgctgcagcaggacagcaacgacgacaccgaggacgtgagcctgttcgacgcggaggaagagaccacaaatagaccccgcaaggcaaagatccggcatcctgtggctagtttctttcatctgttcttccgggtctcagccatcattgtctatctgctgtgcggtctgctttcctcttctttcattacctgtatggtgaccatcatcctgttattgtcatgcgatttttgggctgttaaaaacgtgacagggcgactgatggttggtctcagatggtggaatcatattgacgaagatggcaagtctcactgggtgtttgaatctcggaaggaatccagccaggagaataaaaccgtctctgaagccgagtccaggatcttctggttgggtctaattgcctgtcccgtactgtgggtgattttcgcgttctccgcactgtttagcttcagagtcaaatggctggccgtcgttattatgggcgtcgtgctgcagggcgcgaatctctatgggtacattagatgtaaggttaggagcagaaaacacctgacatccatggccacctcctattttgggaagcagtttcttcggcaaaataccggtgacgatcaaactagctag

SEQ ID NO: 189230 - DNA, 618 bp, Artificial Sequence
  derived and/or modified sequence
atgctgcaacaggatagcaatgatgataccgaggacgtcagtctcttcgatgcagaagaggaaacaaccaatagaccacggaaagctaaaatccgccatccagtggctagctttttccatcttttctttcgcgtgagtgcaattatcgtctacctgctctgcggcctcctgtctagttcattcattacctgcatggtgaccattattctgttgctgagctgtgacttctgggccgttaaaaacgtgactggcaggctgatggtgggactccgctggtggaatcacatcgacgaagatggtaagagccattgggtgtttgagagccgaaaagagtcctctcaggagaataagacagtgtctgaagccgaatctcgaatcttttggctcggccttatcgcctgccctgtattgtgggtgatctttgctttctccgccctgttcagttttagagttaaatggcttgcagtggtcatcatgggggtggtcctccagggtgccaacctgtacgggtatatccggtgcaaggtaagaagcaggaagcaccttacttcaatggcaacctcctattttggcaaacaattcctgagacagaacactggggacgatcagacctcctag

SEQ ID NO: 189231 - protein, 222 aa, Artificial Sequence
  derived and/or modified sequence
MGLFGKTQEKPPKELVNEWSLKIRKEMRVVDRQIRDIQREEEKVKRSVKDAAKKGQKDVCIVLAKEMIRSRKAVSKLYASKAHMNSVLMGMKNQLAVLRVAGSLQKSTEVMKAMQSLVKIPEIQATMRELSKEMMKAGIIEEMLEDTFESMDDQEEMEEEAEMEIDRILFEITAGALGKAPSKVTDALPEPEPPGAMAASEDEEEEEEALEAMQSRLATLRS

SEQ ID NO: 189232 - DNA, 3174 bp, Artificial Sequence
  derived and/or modified sequence
tgccgccgctccctactctgggggttgggactacctccttttccgcgggccccgcccaggcggctgcccgtgacctgcctgggcgcggggaactgaaagccggaaggggcaagacgggttcagttcgtcatggggctgtttggaaagacccaggagaagccgcccaaagaactggtcaatgagtggtcattgaagataagaaaggaaatgagagttgttgacaggcaaataagggatatccaaagagaagaagaaaaagtgaaacgatctgtgaaagatgctgccaagaagggccagaaggatgtctgcatagttctggccaaggagatgatcaggtcaaggaaggctgtgagcaagctgtatgcatccaaagcacacatgaactcagtgctcatggggatgaagaaccagctcgcggtcttgcgagtggctggttccctgcagaagagcacagaagtgatgaaggccatgcaaagtcttgtgaagattccagagattcaggccaccatgagggagttgtccaaagaaatgatgaaggctgggatcatagaggagatgttagaggacacttttgaaagcatggacgatcaggaagaaatggaggaagaagcagaaatggaaattgacagaattctctttgaaattacagcaggggccttgggcaaagcacccagtaaagtgactgatgcccttccagagccagaacctccaggagcgatggctgcctcagaggatgaggaggaggaggaagaggctctggaggccatgcagtcccggctggccacactccgcagctaggggctgcctaccccgctgggtgtgcacacactcctctcaagagctgccattttatgtgtctcttgcactacacctctgttgtgaggactaccattttggagaaggttctgtttgtctcttttcattctctgcccaggttttgggatcgcaaagggattgttcttataaaagtggcataaataaatgcatcatttttaggagtatagacagatatatcttattgtggggaggggaaagaaatccatctgctcatgaagcacttctgaaaatataggtgattgcctgaatgtcgaagactctacttttgtctataaaacactatataaatgaattttaataaatttttgctttagcacttggccccattgtagattgccctgtgcagtaaactttcaaggtgtcggctgccccagattgcttcatttgctgggtgtggaaagagttgctatggccaggcatatgggatttggaagctcagcagaagtgacttctgctctgtggttgctgctccccggctttcacagacatggtatggcagccattcttttatctatttaaccaagaggatgctggggaattgtgctgcttgtcctgttggctggtggctgcattatgtcctggggtgtgcatgtgggtctatttagagcttctgtcccttccttcccattgcaagttgcacccagatgagacagctgtagtactaggtctctttcacctctcattgcctgtccctgcttcgagctggttgtcttgtgcgtgggacatgggccttcctatctgtgttttctcaaagtcaggagctgaccaggagcacactaaggtgtggtcatgcatcataaccaacattcactcatctgggacattcttaagatacatttataaatcatttcagcagtagtactttgtatgtgttgagagtttacagagctctttgacatacgcgatcttagtctttacaaataaggaaaacagctcagtttgggaagtatcagagatgggattcaaacccagatcctctggtccaagttgtatgtgcactgaactaatcaggcaggaaaaaagcccagccactgtctcacagattgttttttgtatattgtagcaaaatcctgaaacaatggggtccttccagtctcatcatacaaaatggcaatcttggctgggtgcggtggttcatgcctataatcccagtgctttacaaggctgaggcaggaggctctcttgagaataggagttcaagaccagcctgggcaacatagcaagatcctgtctctccaaaaaaaaaaaaaaaaaaaaaaaaaaatttcatttttgagtccagaggaccctcctattactcttgatttcatcttcagagtgtagttaaaaaattattttaaataattatttttttaaatcagttgtaggttcacagcaaaagtggacaaaaagaaatttctcatatatcccctgccctcacacatgcatagcctcccaccactatcagtatcccacaccagagtggtacatttgttacaatcaataaacctccattgacacatcattatcacccaaagtccatagtttacatgaagattcactctggtgttgtacattgtatgggcttagacaaatgtatgatgatatctacaattatagaatcatacagaatagtttcactgccctaaaacttctctatgcttcacctgttcatccctttcttccctaatcccctggcaaccactttaaaaaaaaaattaggttcagggggtacatgtgcaggtaaactcgtgacaagggggtttgttatacagattatttagtgacccaggtactaagcctagtacccaatagttacttttctggtcctgtcccttttcccaccctccaccctcaggtaggccccagtatgttattcctttgtgtccatgttatttcactcccacttgtgagaacatggaatatttggtttcctgttcctatgttagtttgttaaggataatggcctccagccccatccatgttcctgcaaaggacatgatctttctttggcaaccactttttactgtcgccatagttcttccttttctagaatgtcatattggaatcatatagtatgtagccttttcagactggcttctttcacttaataatatgcaattaaggttcctccatgtcatttcatggcttaatagtgcatttatttttagcactgaataatactccattgtctagatgaatagtttatccattcacctattgaaagacttcttggtggtttccaagttttggcaattatgaataaagctgttgtaaacatctttgtgcaggtttttctatgggcatgtttttaattcatttgaataaataccaagagcttcagtgctggatcataaa

SEQ ID NO: 189233 - DNA, 669 bp, Artificial Sequence
  derived and/or modified sequence
atgggcctcttcgggaagacacaggaaaaaccgccaaaggaactggtgaacgagtggtctttgaaaataaggaaagaaatgagagtagttgatagacaaattagggacatccaacgagaggaagaaaaagtgaagcggtcagtgaaggacgccgccaaaaagggccagaaggacgtttgcattgttctggctaaagaaatgatcaggagtcgaaaagcggtttcaaagttatatgcctcgaaggcccacatgaacagtgtcctcatgggcatgaaaaaccagctggcggtcctcagggtggccggatcactccaaaagagtacagaagtgatgaaggcaatgcaaagtctcgtcaagattcccgagatccaggccaccatgcgcgagctgagtaaagaaatgatgaaggccggcatcatcgaagaaatgctcgaggataccttcgagtcgatggatgaccaggaggaaatggaggaggaagctgaaatggagattgatagaatcttgtttgagattaccgcaggtgcgctcggaaaagccccctccaaggtcaccgacgccctgcctgaacccgagcccccaggagccatggccgcgagcgaagacgaggaagaggaggaagaagcactggaggcaatgcagtcccgcctagccacactgcggtcctag

SEQ ID NO: 189234 - DNA, 669 bp, Artificial Sequence
  derived and/or modified sequence
atgggcctgtttgggaagacccaggagaagccacccaaggagctggtgaatgagtggagcctgaagatcaggaaggagatgagggtggtggaccggcagatccgggacatccagcgggaggaggagaaggtgaagaggtctgtgaaggatgctgccaagaagggccagaaggatgtgtgcatcgtgctggccaaggagatgatccgcagcaggaaggctgtgtccaagctgtatgccagcaaggcccacatgaacagcgtgctgatgggcatgaagaaccagctggccgtgctgcgggtggccggcagcctgcagaagagcacagaggtgatgaaggccatgcagagcctggtgaagatccctgagatccaggccaccatgagggagctgagcaaggagatgatgaaggccggcatcatcgaggagatgctggaggacacctttgagagcatggatgaccaggaggagatggaggaggaggccgagatggagattgaccgcatcctgtttgagatcacagctggggccctgggcaaggcccccagcaaggtgacagatgccctgcctgagcctgagcccccaggggccatggccgcctctgaagatgaggaggaggaggaggaggccctggaggccatgcagagccggctggccaccctgcggagctag

SEQ ID NO: 189235 - DNA, 669 bp, Artificial Sequence
  derived and/or modified sequence
atgggcctgttcggcaagacccaggagaagccccccaaggagctggtgaacgaatggagcttaaaaattcgcaaagagatgcgcgtcgtcgatcggcagataagggatatccagagagaagaggaaaaggtaaagcgcagcgtgaaagatgccgcaaaaaaggggcaaaaggacgtttgtattgtgttggcaaaagagatgatccgcagtcgaaaggcagtctccaagctgtatgcttctaaagcccatatgaactccgttctgatggggatgaaaaaccaactggccgtgttaagagtggccggttctctgcagaaatcaaccgaagtcatgaaggcgatgcaaagcctggtgaagattccggaaattcaggcaaccatgcgggaactctctaaagagatgatgaaggccgggatcattgaggaaatgctggaggatacctttgagagcatggatgatcaggaggaaatggaagaagaggccgagatggagatcgaccgcatcctgtttgaaatcacagccggcgcactgggaaaggccccgtccaaggtaaccgacgctttgccagagccagagcctccaggggctatggctgcctctgaagatgaggaggaggaagaggaagccctggaggcaatgcagtccaggctggcgactctacgatcttag

SEQ ID NO: 189236 - DNA, 669 bp, Artificial Sequence
  derived and/or modified sequence
atggggttgtttggcaagacccaggaaaagccacctaaggagctggtcaacgaatggtccctcaagatcagaaaggaaatgagagtagtggatagacagattagggatattcagcgcgaggaggagaaggtgaagcgctcggttaaggacgccgctaagaagggccaaaaggacgtctgcatcgttctggctaaagagatgatccgctcacgcaaggctgtgtcgaaactttacgcctctaaggcccatatgaactctgtgttgatgggcatgaaaaaccagctagccgtcttacgagtggccggttcactccagaagtccaccgaggttatgaaagctatgcaatccttagtgaagattccagagattcaagcaaccatgcgtgagctgagtaaggagatgatgaaagctggcatcatcgaggaaatgctggaagacactttcgagtcaatggacgaccaggaagaaatggaagaagaggcagagatggaaatcgacaggatactgtttgagattactgctggcgcactgggtaaagcccctagtaaagtcaccgatgccttgcctgagcctgagccacctggagcaatggctgcatcggaggatgaagaggaggaagaggaggcactggaagcgatgcagagtcgactggcaaccctacgctcatag

SEQ ID NO: 189237 - DNA, 3171 bp, Artificial Sequence
  derived and/or modified sequence
tgccgccgctccctactctgggggttgggactacctccttttccgcgggccccgcccaggcggctgcccgtgacctgcctgggcgcggggaactgaaagccggaaggggcaagacgggttcagttcgtcatggggctgtttggaaagacccaggagaagccgcccaaagaactggtcaatgagtggtcattgaagataagaaaggaaatgagagttgttgacaggcaaataagggatatccaaagagaagaagaaaaagtgaaacgatctgtgaaagatgctgccaagaagggccagaaggatgtctgcatagttctggccaaggagatgatcaggtcaaggaaggctgtgagcaagctgtatgcatccaaagcacacatgaactcagtgctcatggggatgaagaaccagctcgcggtcttgcgagtggctggttccctgcagaagagcacagaagtgatgaaggccatgcaaagtcttgtgaagattccagagattcaggccaccatgagggagttgtccaaagaaatgatgaaggctgggatcatagaggagatgttagaggacacttttgaaagcatggacgatcaggaagaaatggaggaagaagcagaaatggaaattgacagaattctctttgaaattacagcaggggccttgggcaaagcacccagtaaagtgactgatgcccttccagagccagaacctccaggagcgatggctgcctcagaggatgaggaggaggaggaagaggctctggaggccatgcagtcccggctggccacactccgcagctaggggctgcctaccccgctgggtgtgcacacactcctctcaagagctgccattttatgtgtctcttgcactacacctctgttgtgaggactaccattttggagaaggttctgtttgtctcttttcattctctgcccaggttttgggatcgcaaagggattgttcttataaaagtggcataaataaatgcatcatttttaggagtatagacagatatatcttattgtggggaggggaaagaaatccatctgctcatgaagcacttctgaaaatataggtgattgcctgaatgtcgaagactctacttttgtctataaaacactatataaatgaattttaataaatttttgctttagcacttggccccattgtagattgccctgtgcagtaaactttcaaggtgtcggctgccccagattgcttcatttgctgggtgtggaaagagttgctatggccaggcatatgggatttggaagctcagcagaagtgacttctgctctgtggttgctgctccccggctttcacagacatggtatggcagccattcttttatctatttaaccaagaggatgctggggaattgtgctgcttgtcctgttggctggtggctgcattatgtcctggggtgtgcatgtgggtctatttagagcttctgtcccttccttcccattgcaagttgcacccagatgagacagctgtagtactaggtctctttcacctctcattgcctgtccctgcttcgagctggttgtcttgtgcgtgggacatgggccttcctatctgtgttttctcaaagtcaggagctgaccaggagcacactaaggtgtggtcatgcatcataaccaacattcactcatctgggacattcttaagatacatttataaatcatttcagcagtagtactttgtatgtgttgagagtttacagagctctttgacatacgcgatcttagtctttacaaataaggaaaacagctcagtttgggaagtatcagagatgggattcaaacccagatcctctggtccaagttgtatgtgcactgaactaatcaggcaggaaaaaagcccagccactgtctcacagattgttttttgtatattgtagcaaaatcctgaaacaatggggtccttccagtctcatcatacaaaatggcaatcttggctgggtgcggtggttcatgcctataatcccagtgctttacaaggctgaggcaggaggctctcttgagaataggagttcaagaccagcctgggcaacatagcaagatcctgtctctccaaaaaaaaaaaaaaaaaaaaaaaaaaatttcatttttgagtccagaggaccctcctattactcttgatttcatcttcagagtgtagttaaaaaattattttaaataattatttttttaaatcagttgtaggttcacagcaaaagtggacaaaaagaaatttctcatatatcccctgccctcacacatgcatagcctcccaccactatcagtatcccacaccagagtggtacatttgttacaatcaataaacctccattgacacatcattatcacccaaagtccatagtttacatgaagattcactctggtgttgtacattgtatgggcttagacaaatgtatgatgatatctacaattatagaatcatacagaatagtttcactgccctaaaacttctctatgcttcacctgttcatccctttcttccctaatcccctggcaaccactttaaaaaaaaaattaggttcagggggtacatgtgcaggtaaactcgtgacaagggggtttgttatacagattatttagtgacccaggtactaagcctagtacccaatagttacttttctggtcctgtcccttttcccaccctccaccctcaggtaggccccagtatgttattcctttgtgtccatgttatttcactcccacttgtgagaacatggaatatttggtttcctgttcctatgttagtttgttaaggataatggcctccagccccatccatgttcctgcaaaggacatgatctttctttggcaaccactttttactgtcgccatagttcttccttttctagaatgtcatattggaatcatatagtatgtagccttttcagactggcttctttcacttaataatatgcaattaaggttcctccatgtcatttcatggcttaatagtgcatttatttttagcactgaataatactccattgtctagatgaatagtttatccattcacctattgaaagacttcttggtggtttccaagttttggcaattatgaataaagctgttgtaaacatctttgtgcaggtttttctatgggcatgtttttaattcatttgaataaataccaagagcttcagtgctggatcat

SEQ ID NO: 189238 - DNA, 1099 bp, Artificial Sequence
  derived and/or modified sequence
agtgccgccgctccctactctgggggttgggactacctccttttccgcgggccccgcccaggcggctgcccgtgacctgcctgggcgcggggaactgaaagccggaaggggcaagacgggttcagttcgtcatggggctgtttggaaagacccaggagaagccgcccaaagaactgatatccaaagagaagaagaaaaagtgaaacgatctgtgaaagatgctgccaagaagggccagaaggatgtctgcatagttctggccaaggagatgatcaggtcaaggaaggctgtgagcaagctgtatgcatccaaagcacacatgaactcagtgctcatggggatgaagaaccagctcgcggtcttgcgagtggctggttccctgcagaagagcacagaagtgatgaaggccatgcaaagtcttgtgaagattccagagattcaggccaccatgagggagttgtccaaagaaatgatgaaggctgggatcatagaggagatgttagaggacacttttgaaagcatggacgatcaggaagaaatggaggaagaagcagaaatggaaattgacagaattctctttgaaattacagcaggggccttgggcaaagcacccagtaaagtgactgatgcccttccagagccagaacctccaggagcgatggctgcctcagaggatgaggaggaggaggaagaggctctggaggccatgcagtcccggctggccacactccgcagctaggggctgcctaccccgctgggtgtgcacacactcctctcaagagctgccattttatgtgtctcttgcactacacctctgttgtgaggactaccattttggagaaggttctgtttgtctcttttcattctctgcccaggttttgggatcgcaaagggattgttcttataaaagtggcataaataaatgcatcatttttaggagtatagacagatatatcttattgtggggaggggaaagaaatccatctgctcatgaagcacttctgaaaatataggtgattgcctgaatgtcgaagactctacttttgtctataaaacactatataaatgaattttaataaatttttgctttagcacttgg

SEQ ID NO: 189239 - DNA, 669 bp, Artificial Sequence
  derived and/or modified sequence
atgggcctgttcggcaagacccaggagaagccccccaaggagctggtgaacgagtggagcctgaagatcagaaaggagatgagagtggtggacagacagatcagagacatccagagagaggaggagaaggtgaagagaagcgtgaaggacgccgccaagaagggccagaaggacgtgtgcatcgtgctggccaaggagatgatcagaagcagaaaggccgtgagcaagctgtacgccagcaaggcccacatgaacagcgtgctgatgggcatgaagaaccagctggccgtgctgagagtggccggcagcctgcagaagagcaccgaggtgatgaaggccatgcagagcctggtgaagatccccgagatccaggccaccatgagagagctgagcaaggagatgatgaaggccggcatcatcgaggagatgctggaggacaccttcgagagcatggacgaccaggaggagatggaggaggaggccgagatggagatcgacagaatcctgttcgagatcaccgccggcgccctgggcaaggcccccagcaaggtgaccgacgccctgcccgagcccgagccccccggcgccatggccgccagcgaggacgaggaggaggaggaggaggccctggaggccatgcagagcagactggccaccctgagaagctag

SEQ ID NO: 189240 - protein, 313 aa, Artificial Sequence
  derived and/or modified sequence
MAARRALHFVFKVGNRFQTARFYRDVLGMKVESCSVARLECSGAISAHCSDYTRITEDSFSKPYDGKWSKTMVGFGPEDDHFVAELTYNYGVGDYKLGNDFMGITLASSQAVSNARKLEWPLTEVAEGVFETEAPGGYKFYLQNRSLPQSDPVLKVTLAVSDLQKSLNYWCNLLGMKIYEKDEEKQRALLGYADNQCKLELQGVKGGVDHAAAFGRIAFSCPQKELPDLEDLMKRENQKILTPLVSLDTPGKATVQVVILADPDGHEICFVGDEAFRELSKMDPEGSKLLDDAMAADKSDEWFAKHNKPKASG

SEQ ID NO: 189241 - protein, 298 aa, Artificial Sequence
  derived and/or modified sequence
MAARRALHFVFKVGNRFQTARFYRDVLGMKVLRHEEFEEGCKAACNGPYDGKWSKTMVGFGPEDDHFVAELTYNYGVGDYKLGNDFMGITLASSQAVSNARKLEWPLTEVAEGVFETEAPGGYKFYLQNRSLPQSDPVLKVTLAVSDLQKSLNYWCNLLGMKIYEKDEEKQRALLGYADNQCKLELQGVKGGVDHAAAFGRIAFSCPQKELPDLEDLMKRENQKILTPLVSLDTPGKATVQVVILADPDGHEICFVGDEAFRELSKMDPEGSKLLDDAMAADKSDEWFAKHNKPKASG

SEQ ID NO: 189242 - protein, 501 aa, Artificial Sequence
  derived and/or modified sequence
MRLTPFSLSTGNSFRYSRRLKKNIFGTAPALRASEMSLRPSSRIFPCFSRNGLDFTIVITLLQPPVPGISFIVAKPRLFPGAGSAGCGLLERLFLSLLLGTGLRWCRGCFPGARFCSTTSPEGNTTFTGLRRSARTQRLQGPKPGPPAATVARQTSRVSPAPPCSLRPGLRHESAPSAASDVTARGALRGLGCTVRVTAACGGNHGCSQLHFVFKVGNRFQTARFYRDVLGMKVLRHEEFEEGCKAACNGPYDGKWSKTMVGFGPEDDHFVAELTYNYGVGDYKLGNDFMGITLASSQAVSNARKLEWPLTEVAEGVFETEAPGGYKFYLQNRSLPQSDPVLKVTLAVSDLQKSLNYWCNLLGMKIYEKDEEKQRALLGYADNQCKLELQGVKGGVDHAAAFGRIAFSCPQKELPDLEDLMKRENQKILTPLVSLDTPGKATVQVVILADPDGHEICFVGDEAFRELSKMDPEGSKLLDDAMAADKSDEWFAKHNKPKASG

SEQ ID NO: 189243 - DNA, 942 bp, Artificial Sequence
  derived and/or modified sequence
atggccgccagaagagccctgcacttcgtgttcaaggtgggcaacagattccagaccgccagattctacagagacgtgctgggcatgaaggtggagagctgcagcgtggccagactggagtgcagcggcgccatcagcgcccactgcagcgactacaccagaatcaccgaggacagcttcagcaagccctacgacggcaagtggagcaagaccatggtgggcttcggccccgaggacgaccacttcgtggccgagctgacctacaactacggcgtgggcgactacaagctgggcaacgacttcatgggcatcaccctggccagcagccaggccgtgagcaacgccagaaagctggagtggcccctgaccgaggtggccgagggcgtgttcgagaccgaggcccccggcggctacaagttctacctgcagaacagaagcctgccccagagcgaccccgtgctgaaggtgaccctggccgtgagcgacctgcagaagagcctgaactactggtgcaacctgctgggcatgaagatctacgagaaggacgaggagaagcagagagccctgctgggctacgccgacaaccagtgcaagctggagctgcagggcgtgaagggcggcgtggaccacgccgccgccttcggcagaatcgccttcagctgcccccagaaggagctgcccgacctggaggacctgatgaagagagagaaccagaagatcctgacccccctggtgagcctggacacccccggcaaggccaccgtgcaggtggtgatcctggccgaccccgacggccacgagatctgcttcgtgggcgacgaggccttcagagagctgagcaagatggaccccgagggcagcaagctgctggacgacgccatggccgccgacaagagcgacgagtggttcgccaagcacaacaagcccaaggccagcggctag

SEQ ID NO: 189244 - DNA, 897 bp, Artificial Sequence
  derived and/or modified sequence
atggccgccagaagagccctgcacttcgtgttcaaggtgggcaacagattccagaccgccagattctacagagacgtgctgggcatgaaggtgctgagacacgaggagttcgaggagggctgcaaggccgcctgcaacggcccctacgacggcaagtggagcaagaccatggtgggcttcggccccgaggacgaccacttcgtggccgagctgacctacaactacggcgtgggcgactacaagctgggcaacgacttcatgggcatcaccctggccagcagccaggccgtgagcaacgccagaaagctggagtggcccctgaccgaggtggccgagggcgtgttcgagaccgaggcccccggcggctacaagttctacctgcagaacagaagcctgccccagagcgaccccgtgctgaaggtgaccctggccgtgagcgacctgcagaagagcctgaactactggtgcaacctgctgggcatgaagatctacgagaaggacgaggagaagcagagagccctgctgggctacgccgacaaccagtgcaagctggagctgcagggcgtgaagggcggcgtggaccacgccgccgccttcggcagaatcgccttcagctgcccccagaaggagctgcccgacctggaggacctgatgaagagagagaaccagaagatcctgacccccctggtgagcctggacacccccggcaaggccaccgtgcaggtggtgatcctggccgaccccgacggccacgagatctgcttcgtgggcgacgaggccttcagagagctgagcaagatggaccccgagggcagcaagctgctggacgacgccatggccgccgacaagagcgacgagtggttcgccaagcacaacaagcccaaggccagcggctag

SEQ ID NO: 189245 - DNA, 1506 bp, Artificial Sequence
  derived and/or modified sequence
atgagactgacccccttcagcctgagcaccggcaacagcttcagatacagcagaagactgaagaagaacatcttcggcaccgcccccgccctgagagccagcgagatgagcctgagacccagcagcagaatcttcccctgcttcagcagaaacggcctggacttcaccatcgtgatcaccctgctgcagccccccgtgcccggcatcagcttcatcgtggccaagcccagactgttccccggcgccggcagcgccggctgcggcctgctggagagactgttcctgagcctgctgctgggcaccggcctgagatggtgcagaggctgcttccccggcgccagattctgcagcaccaccagccccgagggcaacaccaccttcaccggcctgagaagaagcgccagaacccagagactgcagggccccaagcccggcccccccgccgccaccgtggccagacagaccagcagagtgagccccgcccccccctgcagcctgagacccggcctgagacacgagagcgcccccagcgccgccagcgacgtgaccgccagaggcgccctgagaggcctgggctgcaccgtgagagtgaccgccgcctgcggcggcaaccacggctgcagccagctgcacttcgtgttcaaggtgggcaacagattccagaccgccagattctacagagacgtgctgggcatgaaggtgctgagacacgaggagttcgaggagggctgcaaggccgcctgcaacggcccctacgacggcaagtggagcaagaccatggtgggcttcggccccgaggacgaccacttcgtggccgagctgacctacaactacggcgtgggcgactacaagctgggcaacgacttcatgggcatcaccctggccagcagccaggccgtgagcaacgccagaaagctggagtggcccctgaccgaggtggccgagggcgtgttcgagaccgaggcccccggcggctacaagttctacctgcagaacagaagcctgccccagagcgaccccgtgctgaaggtgaccctggccgtgagcgacctgcagaagagcctgaactactggtgcaacctgctgggcatgaagatctacgagaaggacgaggagaagcagagagccctgctgggctacgccgacaaccagtgcaagctggagctgcagggcgtgaagggcggcgtggaccacgccgccgccttcggcagaatcgccttcagctgcccccagaaggagctgcccgacctggaggacctgatgaagagagagaaccagaagatcctgacccccctggtgagcctggacacccccggcaaggccaccgtgcaggtggtgatcctggccgaccccgacggccacgagatctgcttcgtgggcgacgaggccttcagagagctgagcaagatggaccccgagggcagcaagctgctggacgacgccatggccgccgacaagagcgacgagtggttcgccaagcacaacaagcccaaggccagcggctag

SEQ ID NO: 189246 - DNA, 942 bp, Artificial Sequence
  derived and/or modified sequence
atggcggctcggagagccctgcatttcgtttttaaagtgggcaatcgtttccagaccgctaggttttaccgcgacgtgctgggaatgaaggtggagtcttgcagcgttgctagactggagtgcagcggcgccatctctgcacactgctccgattacacccggatcaccgaggatagtttctccaagccctatgacgggaaatggagcaaaactatggtaggcttcggtccagaggatgaccacttcgtggcagagctcacatataactatggggtaggagactataagcttgggaacgattttatggggatcaccctggcatctagtcaggcagtttcgaatgccaggaagctcgaatggccattaaccgaagtggctgaaggagtgtttgaaacagaggctcctggaggctacaaattctatctgcaaaatagatccttgcctcagtctgacccagtgcttaaggtaaccctcgctgtgagcgatctgcagaagagcctgaactactggtgcaacctgctggggatgaagatctacgagaaagatgaggagaagcagagagctttactagggtacgccgataaccagtgcaagctggagctgcagggggtcaaaggtggggtagatcacgccgccgcattcggtcgtattgcgtttagctgcccccagaaagagctgcccgatctagaggacctcatgaagagggagaatcagaagatccttacccccctagtttcactggacacccctgggaaagcaacagtacaagtggtgatcctcgccgatcctgacgggcacgaaatatgctttgtcggcgatgaggcctttcgggaactatctaagatggatccagaggggagcaaactgctcgacgacgccatggctgctgacaagagcgacgagtggtttgcgaagcataacaagcctaaggcttcaggatag

SEQ ID NO: 189247 - DNA, 897 bp, Artificial Sequence
  derived and/or modified sequence
atggcggcaaggagagctctccattttgtatttaaagtggggaaccggttccagactgcgaggttctatagagatgttctgggcatgaaagtgctgcgccatgaggagttcgaagaaggctgcaaggccgcatgtaacgggccctatgatggcaaatggtcaaaaactatggtgggctttggcccggaagacgaccatttcgtggccgaattaacatataattacggcgtcggagactataagctgggaaacgatttcatggggataaccctggccagcagtcaagctgtgtcaaacgcaaggaaactggaatggccactgaccgaggttgccgagggcgttttcgaaaccgaagccccagggggctataagttctacctgcagaatcgttccctcccccagtctgaccctgtcctcaaggtgactctcgcggtctccgatcttcagaaatcactaaattattggtgcaacttactcggtatgaaaatctacgaaaaagacgaggaaaaacagcgcgctctcctggggtacgccgataaccagtgtaaattggagttgcagggggttaagggtggcgttgaccatgccgccgccttcggtaggattgcttttagctgcccccagaaggaactcccagacctcgaggacttaatgaagagggaaaaccagaaaatcctgactccattggtttccctcgatacaccaggcaaggccaccgtgcaggttgtgatcctggctgaccctgacggccacgagatatgtttcgtcggcgatgaagcgtttcgcgaactgtcgaagatggatccggaaggatcaaaattactcgatgatgctatggcagctgataagagtgatgagtggttcgccaaacataacaaaccaaaggcttctggctag

SEQ ID NO: 189248 - DNA, 1506 bp, Artificial Sequence
  derived and/or modified sequence
atgcgacttacccctttcagcttatctacggggaacagcttccgctactcaaggcgtttaaagaagaatatttttgggacagctcctgcactacgcgcttccgagatgagcttgaggccatccagccggatctttccatgcttctcccgaaacggactggatttcactattgtcattactttactccagccccctgtgccaggcatctcttttattgtcgcgaagcctagactttttcctggtgccggctctgctggttgtgggctgctggagaggctattcctttcactgctgctcgggactgggctacgctggtgtcgtggctgctttcccggagcccgtttctgcagtaccacttctcctgaggggaataccacgtttaccgggctccgcaggtcagcacggacccagagactccagggccccaagcctgggcccccggcagctactgtggccaggcaaaccagccgggtttctcctgcccccccctgcagtctgcgcccagggttgcgccacgaatccgcacctagcgccgccagcgacgttacagccagaggcgccctcagaggactgggttgtaccgtccgggtgacagccgcctgtggagggaaccacggctgcagccaattgcatttcgttttcaaagtcggaaatagattccaaactgcaagattctaccgagacgtgcttggcatgaaggttttaagacatgaggaatttgaagaggggtgtaaagcagcttgtaacggaccctatgatgggaagtggagcaaaacaatggtgggatttggcccagaagatgaccacttcgtcgccgaactaacctataattatggagtaggcgattacaagctgggcaatgattttatgggaatcactctcgctagctcgcaggccgtgagcaatgccagaaagttggagtggcccctgactgaggtggccgagggagtctttgagaccgaagcgccaggcggttacaagttttatctgcagaatagatctctgccacagagcgatcccgtcctgaaggtgacactcgccgtctctgacctacaaaaaagtctaaattattggtgtaacttattgggcatgaaaatctacgagaaggatgaggagaaacaacgagcattactgggttatgcggacaatcagtgcaagctggaattgcagggagtgaagggaggagtggatcatgccgcagccttcggtagaattgctttctcctgccctcaaaaggagctgccggacctcgaggacttaatgaagcgtgagaatcagaagatactcactccactggtgtcacttgacacccctggaaaggctactgtccaggtggtcatactggcagatcccgatggccacgagatatgcttcgtaggcgatgaagcgtttcgcgaattatcgaagatggaccctgagggatccaaactactcgatgacgccatggctgccgacaagtctgacgaatggtttgccaaacacaacaagcccaaagctagcgggtag

SEQ ID NO: 189249 - DNA, 1714 bp, Artificial Sequence
  derived and/or modified sequence
ttcgtggactgggctgtacggtgcgcgtgacggctgcgtgcggcgggaatcatggctgctcgcagagctctgcacttcgtattcaaagtgggaaaccgcttccagacggcgcgtttctatcgggacgtcctggggatgaaggtggagtcttgctctgtcgccaggctggagtgcagtggcgcgatctcggctcactgctctgactacacccggataacagaagacagtttctcaaagccttatgatgggaaatggagtaaaacaatggtgggatttgggcctgaggatgatcattttgtcgcagaactgacttacaattatggcgtcggagactacaagcttggcaatgactttatgggaatcacgctcgcttctagccaggctgtcagcaacgccaggaagctggagtggccactgacggaagttgcagaaggtgtttttgaaaccgaggccccgggaggatataagttctatttgcagaatcgcagtctgcctcagtcagatcctgtattaaaagtaactctagcagtgtctgatcttcaaaagtccttgaactactggtgtaatctactgggaatgaaaatttatgaaaaagatgaagaaaagcaaagggctttgctgggctatgctgataaccagtgtaagctggagctacagggcgtcaagggtggggtggaccatgcagcagcttttggaagaattgccttctcttgcccccagaaagagttgccagacttagaagacttgatgaaaagggagaaccagaagattctgactcccctggtgagcctggacaccccagggaaagcaacagtacaggtggtcattctggccgaccctgacggacatgaaatttgctttgtcggggatgaagcatttcgagaactttctaagatggatccagagggaagcaaattgttggatgatgcaatggcagcagataaaagtgacgagtggtttgccaaacacaataaacccaaagcttcaggttaacggaagacatgatgcagagcaagcctctgtgattcctgcccagcacctgtgaggcctgacgtgtcagttcccaataaatgctcttctgatttgtttcccgtacaggcaaggaggcttgggtagtgcagatttgtgtatttcaatctttgaaagctctgatgtaatttagaaatgaaatccaatcatgagtccaggtagagaacgcctgctgtaatctacactgttgctgggactgcgcattctgtatataactgtgttggatgagtgacagatgattgtccagactaggacagcggcatgaacatgactttggttgggattgcggatagttagggttacctctgaatcgtgtagcttttatgagagcagctgtgcaagtgaatccacattaatgccttgtcgtggtgccattcccagcgcctgacgatacgctcttctattgtcttattctggcaggttttgacgttttaaattttttaaagaaattttattccttggaccaaaaggtttggttaaccacccccctcttacttgctttcacattttgagtgtccagaggaaacagaaaggaatgagtgtgtgacgttgctgcacgcctgactctgtgcgagcttctttctgtgtatatattttgttttatttttttccgtgtatatttttaatcccgacagaacatcatgtgagatttctttaaaatggattaaacgatttcttcagcctg

SEQ ID NO: 189250 - DNA, 1836 bp, Artificial Sequence
  derived and/or modified sequence
agtgacgtcacggcccgtggcgcccttcgtggactgggctgtacggtgcgcgtgacggctgcgtgcggcgggaatcatggctgctcgcagagctctgcacttcgtattcaaagtgggaaaccgcttccagacggcgcgtttctatcgggacgtcctggggatgaaggttctgcggcatgaggaatttgaagaaggctgcaaagctgcctgtaatgggccttatgatgggaaatggagtaaaacaatggtgggatttgggcctgaggatgatcattttgtcgcagaactgacttacaattatggcgtcggagactacaagcttggcaatgactttatgggaatcacgctcgcttctagccaggctgtcagcaacgccaggaagctggagtggccactgacggaagttgcagaaggtgtttttgaaaccgaggccccgggaggatataagttctatttgcagaatcgcagtctgcctcagtcagatcctgtattaaaagtaactctagcagtgtctgatcttcaaaagtccttgaactactggtgtaatctactgggaatgaaaatttatgaaaaagatgaagaaaagcaaagggctttgctgggctatgctgataaccagtgtaagctggagctacagggcgtcaagggtggggtggaccatgcagcagcttttggaagaattgccttctcttgcccccagaaagagttgccagacttagaagacttgatgaaaagggagaaccagaagattctgactcccctggtgagcctggacaccccagggaaagcaacagtacaggtggtcattctggccgaccctgacggacatgaaatttgctttgtcggggatgaagcatttcgagaactttctaagatggatccagagggaagcaaattgttggatgatgcaatggcagcagataaaagtgacgagtggtttgccaaacacaataaacccaaagcttcaggttaacggaagacatgatgcagagcaagcctctgtgattcctgcccagcacctgtgaggcctgacgtgtcagttcccaataaatgctcttctgatttgtttcccgtacaggcaaggaggcttgggtagtgcagatttgtgtatttcaatctttgaaagctctgatgtaatttagaaatgaaatccaatcatgagtccaggtagagaacgcctgctgtaatctacactgttgctgggactgcgcattctgtatataactgtgttggatgagtgacagatgattgtccagactaggacagcggcatgaacatgactttggttgggattgcggatagttagggttacctctgaatcgtgtagcttttatgagagcagctgtgcaagtgaatccacattaatgccttgtcgtggtgccattcccagcgcctgacgatacgctcttctattgtcttattctggcaggttttgacgttttaaattttttaaagaaattttattccttggaccaaaaggtttggttaaccacccccctcttacttgctttcacattttgagtgtccagaggaaacagaaaggaatgagtgtgtgacgttgctgcacgcctgactctgtgcgagcttctttctgtgtatatattttgttttatttttttccgtgtatatttttaatcccgacagaacatcatgtgagatttctttaaaatggattaaacgatttcttcagcctgaaaaaaaaggttttgaaaatgttttcttgtagttttgtttggttctaaacaacaaataggttttaatcactcgaaatggaattatattgtgtattcattgaataaattttttttgaaagtaagcttctgaaatcaagctgtg

SEQ ID NO: 189251 - DNA, 2227 bp, Artificial Sequence
  derived and/or modified sequence
atgaggctgacacctttcagcttatcgactggcaactcctttaggtattctagacggctaaagaagaacatttttggcacagctccagccttgagagcgtctgaaatgagcctgcgaccttccagcaggatcttcccttgtttttcccgaaatggcctggactttactattgtcattacactgcttcagcctcctgtccccgggataagctttatcgtagcgaagcccagactcttcccaggtgctgggagcgcgggatgcggactcctcgagcggttgtttctctcgttgctcctgggcactggcctcagatggtgccggggctgcttcccaggagcgcgcttctgttccaccacctctccggaaggaaacaccactttcactgggctccgccgcagcgcccggacccagcgcctccaaggtcccaagcctggaccacctgcagcaacggtcgcacgacaaacctcgcgggtctcaccagcgccgccatgttccctgagacccgggctgcgtcacgaaagcgcgccgtcggcggctagtgacgtcacggcccgtggcgcccttcgtggactgggctgtacggtgcgcgtgacggctgcgtgcggcgggaatcatggctgctcgcagctgcacttcgtattcaaagtgggaaaccgcttccagacggcgcgtttctatcgggacgtcctggggatgaaggttctgcggcatgaggaatttgaagaaggctgcaaagctgcctgtaatgggccttatgatgggaaatggagtaaaacaatggtgggatttgggcctgaggatgatcattttgtcgcagaactgacttacaattatggcgtcggagactacaagcttggcaatgactttatgggaatcacgctcgcttctagccaggctgtcagcaacgccaggaagctggagtggccactgacggaagttgcagaaggtgtttttgaaaccgaggccccgggaggatataagttctatttgcagaatcgcagtctgcctcagtcagatcctgtattaaaagtaactctagcagtgtctgatcttcaaaagtccttgaactactggtgtaatctactgggaatgaaaatttatgaaaaagatgaagaaaagcaaagggctttgctgggctatgctgataaccagtgtaagctggagctacagggcgtcaagggtggggtggaccatgcagcagcttttggaagaattgccttctcttgcccccagaaagagttgccagacttagaagacttgatgaaaagggagaaccagaagattctgactcccctggtgagcctggacaccccagggaaagcaacagtacaggtggtcattctggccgaccctgacggacatgaaatttgctttgtcggggatgaagcatttcgagaactttctaagatggatccagagggaagcaaattgttggatgatgcaatggcagcagataaaagtgacgagtggtttgccaaacacaataaacccaaagcttcaggttaacggaagacatgatgcagagcaagcctctgtgattcctgcccagcacctgtgaggcctgacgtgtcagttcccaataaatgctcttctgatttgtttcccgtacaggcaaggaggcttgggtagtgcagatttgtgtatttcaatctttgaaagctctgatgtaatttagaaatgaaatccaatcatgagtccaggtagagaacgcctgctgtaatctacactgttgctgggactgcgcattctgtatataactgtgttggatgagtgacagatgattgtccagactaggacagcggcatgaacatgactttggttgggattgcggatagttagggttacctctgaatcgtgtagcttttatgagagcagctgtgcaagtgaatccacattaatgccttgtcgtggtgccattcccagcgcctgacgatacgctcttctattgtcttattctggcaggttttgacgttttaaattttttaaagaaattttattccttggaccaaaaggtttggttaaccacccccctcttacttgctttcacattttgagtgtccagaggaaacagaaaggaatgagtgtgtgacgttgctgcacgcctgactctgtgcgagcttctttctgtgtatatattttgttttatttttttccgtgtatatttttaatcccgacagaacatcatgtgagatttctttaaaatggattaaacgatttcttcagcctg

SEQ ID NO: 189252 - DNA, 942 bp, Artificial Sequence
  derived and/or modified sequence
atggccgcccggcgggccctgcactttgtgttcaaggtgggcaaccgcttccagacagcccgcttctacagagatgtgctgggcatgaaggtggagagctgcagcgtggcccggctggagtgcagcggggccatcagcgcccactgcagcgactacacccgcatcacagaagattccttcagcaagccctatgatggcaagtggagcaagaccatggtgggctttggaccagaagatgaccactttgtggccgagctgacctacaactacggcgtgggggactacaagctgggcaatgacttcatgggcatcaccctggccagcagccaggccgtgtccaatgccaggaagctggagtggcccctgacagaggtggccgagggcgtgtttgaaacagaggcccctgggggctacaagttctacctgcagaacagaagcctgccccagagcgaccctgtgctgaaggtgaccctggccgtgtctgacctgcagaagagcctgaactactggtgcaacctgctgggcatgaagatctatgagaaggatgaggagaagcagagggccctgctgggctatgctgacaaccagtgcaagctggagctgcagggcgtgaagggcggcgtggaccatgctgctgccttcggcagaattgccttcagctgcccccagaaggagctgcctgacctggaggacctgatgaagcgggagaaccagaagatcctgacccccctggtgtccctggacacccctgggaaggccaccgtgcaggtggtgatcctggccgaccctgatggccacgagatctgctttgtgggagatgaggccttccgggagctgagcaagatggaccctgagggcagcaagctgctggatgatgccatggctgctgacaagagtgatgagtggtttgccaagcacaacaagcccaaggccagcggctag

SEQ ID NO: 189253 - DNA, 897 bp, Artificial Sequence
  derived and/or modified sequence
atggccgcccggcgggccctgcactttgtgttcaaggtgggcaaccgcttccagacagcccgcttctacagagatgtgctgggcatgaaggtgctgcggcatgaggagtttgaggagggctgcaaggccgcctgcaatggcccctatgatggcaagtggagcaagaccatggtgggcttcggcccagaagatgaccactttgtggccgagctgacctacaactatggagtgggggactacaagctgggcaatgacttcatgggcatcaccctggccagcagccaggccgtgtccaatgccaggaagctggagtggcccctgacagaggtggccgagggcgtgtttgaaacagaggcccctgggggctacaagttctacctgcagaacagaagcctgccccagagcgaccctgtgctgaaggtgaccctggccgtgtctgacctgcagaagagcctgaactactggtgcaacctgctgggcatgaagatctatgagaaggatgaggagaagcagagggccctgctgggctacgccgacaaccagtgcaagctggagctgcagggcgtgaagggcggcgtggaccacgccgccgccttcggccgcatcgccttcagctgcccccagaaggagctgcctgacctggaggacctgatgaagcgggagaaccagaagatcctgacccccctggtgtccctggacaccccaggcaaggccaccgtgcaggtggtgatcctggccgaccctgatggccacgagatctgctttgtgggagatgaggccttccgggagctgagcaagatggaccctgagggcagcaagctgctggatgatgccatggctgctgacaagagtgatgagtggtttgccaagcacaacaagcccaaggccagcggctag

SEQ ID NO: 189254 - DNA, 1506 bp, Artificial Sequence
  derived and/or modified sequence
atgaggctgacccccttcagcctgagcacaggcaacagcttccgctacagccggcggctgaagaagaacatctttggaacagccccagccctgcgggccagcgagatgagcctgcggcccagcagccgcatcttcccctgcttcagcagaaatggcctggacttcaccatcgtcatcaccctgctgcagccccctgtgcccggcatctccttcatcgtggccaagcccaggctcttccctggggccggcagcgctggctgcggcctgctggagcggctcttcctgagcctgctgctgggcaccggcctgcgctggtgccggggctgcttccctggggcccgcttctgcagcaccaccagccctgagggcaacaccaccttcaccggcctgcggcgcagcgcccggacccagaggctgcagggccccaagccaggccccccagctgccaccgtggcccggcagaccagccgggtgtccccagccccaccctgcagcctgcggcccggcctgcggcatgagagcgcccccagcgctgccagtgatgtgacagcccggggggccctgcggggcctgggctgcaccgtgcgggtgacagctgcctgtggcggcaaccacggctgcagccagctgcactttgtgttcaaggtgggcaaccgcttccagacagcccgcttctacagagatgtgctgggcatgaaggtgctgcggcatgaggagtttgaggagggctgcaaggccgcctgcaatggcccctatgatggcaagtggagcaagaccatggtgggctttggaccagaagatgaccactttgtggccgagctgacctacaactacggcgtgggggactacaagctgggcaatgacttcatgggcatcaccctggccagcagccaggccgtgtccaatgccaggaagctggagtggcccctgacagaggtggccgagggcgtgtttgaaacagaggcccctgggggctacaagttctacctgcagaacagaagcctgccccagagcgaccctgtgctgaaggtgaccctggccgtgtctgacctgcagaagagcctgaactactggtgcaacctgctgggcatgaagatctatgagaaggatgaggagaagcagagggccctgctgggctatgctgacaaccagtgcaagctggagctgcagggcgtgaagggcggcgtggaccatgctgctgccttcggcagaattgccttcagctgcccccagaaggagctgcctgacctggaggacctgatgaagcgggagaaccagaagatcctgacccccctggtgtccctggacacccctgggaaggccaccgtgcaggtggtgatcctggccgaccctgatggccacgagatctgctttgtgggagatgaggccttccgggagctgagcaagatggaccctgagggcagcaagctgctggatgatgccatggctgctgacaagagtgatgagtggtttgccaagcacaacaagcccaaggccagcggctag

SEQ ID NO: 189255 - DNA, 942 bp, Artificial Sequence
  derived and/or modified sequence
atggccgcccggcgggccctgcacttcgtgttcaaggtgggcaaccggtttcagacagcaagattctatagagacgtgctcggcatgaaagtcgaatcgtgttcagtggcccgcctggagtgcagtggcgccatatctgcccactgctccgactacacccggattactgaggacagcttcagtaagccatatgatggtaaatggagtaagaccatggtgggcttcgggcccgaggatgatcacttcgtggccgagttgacctacaattatggagtgggtgattacaaattaggcaacgactttatggggatcaccctcgcatcttctcaggcggtgtctaatgccagaaaattagaatggcccctgacggaggtggccgagggagtcttcgagaccgaggctcctggtggctacaagttctaccttcagaaccggagcttaccgcagtctgatcccgttcttaaagttacgctggcggtttctgatttacagaaaagcctgaactactggtgtaacctgctgggcatgaagatctatgagaaggatgaagaaaagcagcgcgcactattgggctatgctgataaccaatgtaaactggaactgcagggagtcaaagggggagtggaccacgcagccgcttttggtaggattgcattctcttgtccccagaaagaactccctgatctggaggatctcatgaagagggagaaccagaaaattttaacacctctcgtgtcgctggacaccccagggaaggctacagtgcaggtagtaatcctggctgaccccgacggacatgagatctgcttcgtgggggatgaagcttttcgcgagttaagtaagatggatcccgaggggtccaagctgcttgatgatgccatggccgctgacaagtcagatgagtggttcgcaaaacacaacaagcctaaagcatcaggatag

SEQ ID NO: 189256 - DNA, 897 bp, Artificial Sequence
  derived and/or modified sequence
atggccgcccggcgggccctgcacttcgtgttcaaggtgggcaaccggtttcaaaccgctagattttacagggacgtgctagggatgaaggtgctgcgccatgaggaattcgaggagggttgtaaagccgcctgtaatggcccctacgatggcaaatggtctaaaacgatggtgggattcggcccagaagacgaccactttgtcgcagaactgacctacaactacggcgtgggtgattacaaactgggcaacgatttcatgggaatcactctcgccagtagccaggccgtgtccaacgcacgcaaactagagtggccccttaccgaggtagccgagggggtctttgaaaccgaggctcctggtggctacaagttctatctccagaatagatccctgccccagagcgatcctgttctgaaagtgacacttgctgtgagcgaccttcaaaagtcgctcaattactggtgcaacctgctcgggatgaagatctacgagaaagacgaggaaaaacagcgggccctgctgggttacgcagacaatcagtgtaaactggagctacaaggtgttaagggcggcgtcgaccatgctgccgccttcgggcgcatcgcttttagttgtccccaaaaagaactgccggatttggaggatctcatgaagcgtgagaaccagaagatcctgaccccattggtgtctctagacacacccgggaaagccacagtgcaggtggtaatcctagccgatccggacggacacgagatatgttttgtgggcgatgaggcttttcgagagctgagcaagatggaccccgagggctccaagctgcttgacgacgcaatggcagccgacaaatcagacgaatggttcgctaagcacaataagccgaaggccagcggttag

SEQ ID NO: 189257 - DNA, 1506 bp, Artificial Sequence
  derived and/or modified sequence
atgcggctgacccccttcagcctgagcaccggcaacagcttccggtactctaggcgcctgaaaaagaacatatttggcaccgcaccggccctgcgtgctagcgaaatgagcttgcgcccttctagtcgcatttttccctgtttttcacgcaacggcttggactttacaatcgtgataactcttctgcaacctcccgtgcctgggatcagtttcattgtggctaaacctcgacttttcccaggcgccgggagcgctggatgtggactgttggaacgcctgttcctgtctcttctacttgggaccggactcagatggtgccggggctgctttcctggtgctagattctgctccacgacaagtccagagggtaacaccacgttcactgggttgcggcggtcagctagaacacagaggcttcagggcccaaaaccagggccgcccgcggcgacggtcgcaagacaaacttcccgcgtgtcacccgcacctccttgtagcttgaggcctgggctgagacatgagagcgctcccagtgccgccagcgacgtgacagcccggggtgcactgagaggcctcggatgtactgtaagggtgaccgctgcgtgcggcggcaatcatggatgctcacagctgcacttcgtcttcaaggtgggtaatcgctttcagaccgctcggttttacagagacgtcctgggaatgaaggttctgcgccacgaggaattcgaggagggctgtaaggcggcttgcaacgggccctacgacggaaagtggtctaaaaccatggtcggattcggccctgaggatgatcacttcgtcgctgagctgacttataattatggcgtaggagattacaagctcgggaatgacttcatgggtattacactggcgtcatcacaggcagtgagcaacgctcggaaactggagtggcctctcaccgaggttgcagaaggggtattcgagacagaggccccaggggggtacaagttttatctccagaatcgttccctccctcagagcgaccccgtgcttaaggtgactcttgctgtgtccgacctgcagaaatccctgaactattggtgtaacttattgggaatgaaaatatatgaaaaggatgaggagaaacagcgcgcattgctgggctacgctgataaccagtgcaagctggaactccagggggtcaaaggaggagtcgaccacgctgctgcatttggccgcatcgccttctcttgtcctcaaaaggaactgccggacctggaagatctgatgaagagagagaaccagaaaatcctcaccccactggtctcgctggacacgccagggaaggccacagtgcaagtcgtgatcctggcagatcccgatggacacgagatctgtttcgtgggggatgaagctttccgtgagttgtctaagatggatccagagggcagtaagctgctggatgatgccatggcagcagacaagtctgatgagtggtttgccaaacacaataagccaaaagcctcaggctag

SEQ ID NO: 189258 - DNA, 942 bp, Artificial Sequence
  derived and/or modified sequence
atggcagcgaggagagccctgcattttgtgtttaaagtcggtaaccggttccagaccgccaggttttaccgcgacgttctcgggatgaaagttgagtcatgcagcgttgcccgtctcgaatgcagcggggctataagtgctcactgctccgattacacgcgcataacagaggattcctttagcaaaccatacgatggtaagtggagtaaaaccatggtaggcttcggacctgaggacgatcactttgtggccgagctgacgtataactatggagttggggattataaattgggaaatgactttatgggcattacactggcatctagccaggctgttagcaacgccagaaaactcgagtggcccctgacagaagtggccgaaggggtgttcgaaacggaggcaccaggcggatacaagttttatcttcaaaaccgtagcctgccacagagcgatcctgttctgaaggtgaccttggcggtatccgacttgcaaaaaagcctaaattattggtgcaacctcctcggtatgaaaatttatgaaaaagatgaagagaaacaacgcgcacttttaggctatgcggataatcaatgcaagcttgaactgcaaggagtaaaaggtggtgtggaccatgcggctgcttttgggagaatcgcattcagctgcccccaaaaggaactcccggacctagaggatttgatgaagcgggaaaaccagaaaattctgacccccttagtgagcctagacaccccgggaaaggcaactgtccaggtggtgatcctggccgaccctgacggccacgagatatgctttgtcggtgatgaagcatttcgcgagctgtctaaaatggaccccgagggctccaaactgctagacgatgccatggcagctgataaaagcgatgaatggtttgctaaacacaataagcctaaagcttcaggctag

SEQ ID NO: 189259 - DNA, 897 bp, Artificial Sequence
  derived and/or modified sequence
atggcagctaggcgagccctgcacttcgtttttaaagtgggcaaccgttttcaaactgccaggttttatcgcgacgtcttaggtatgaaggtgttgaggcacgaagagtttgaagagggatgtaaggccgcatgcaacggcccttatgacgggaagtggagcaaaactatggtcgggtttggccctgaggacgaccactttgtcgcggaacttacctacaactacggcgtcggggattataagctggggaacgattttatgggaattactctggcctcctctcaggctgtctcaaatgcacgcaagttagagtggcccctgaccgaggtagccgagggggtcttcgagaccgaggctcccggaggatacaaattctacctccaaaacaggagcttgccacagagcgatccggtactcaaagtaaccctcgctgtgtccgatctgcagaaaagtttgaactattggtgtaatctgttgggtatgaaaatctacgagaaagatgaggagaagcagcgtgcccttctggggtacgctgacaatcagtgtaagctggaactgcagggtgtgaagggcggagttgatcacgctgctgcttttgggcgaatagctttcagttgtccccagaaggagttaccggatctggaagatctgatgaagcgggaaaatcagaaaatcctcaccccactggtgtcccttgatactcctggcaaggcaactgtacaggtggtcatccttgctgatcctgacggacatgagatctgcttcgtcggcgatgaagcctttcgggagctgtctaaaatggatcctgaggggtccaaattgttggacgacgccatggctgctgataagagcgacgagtggtttgcaaaacacaataagcctaaggccagtggctag

SEQ ID NO: 189260 - DNA, 1506 bp, Artificial Sequence
  derived and/or modified sequence
atgcggttaactccattctctctctctaccggaaatagcttcaggtactctcgccgtctgaaaaaaaatatattcggtactgcccctgctctgcgcgcatcagaaatgtcactgcgtccctcttctagaattttcccttgcttttcccgcaatgggctggatttcaccattgtgatcaccttactgcagccaccggttcctgggatctccttcatcgtggctaagcccaggcttttcccaggagccggttctgccggttgtgggctgctggagcggctcttcttatccctcctcctaggaaccggcctgcggtggtgtagaggatgcttccccggagccagattctgctccactacatctccagaaggtaacactacctttacaggactaaggcggtcagcgcgaacccaaagacttcagggcccaaaaccaggaccacccgcagcaaccgtcgctcggcagacatcacgtgttagcccagcccctccttgctccttgagaccgggactgcgccatgaatcagcaccctcggccgctagcgatgtcaccgctaggggggctctccgcggtcttggctgcactgtaagagtcaccgccgcttgcgggggtaaccacgggtgttctcaacttcatttcgtctttaaagtgggtaaccggttccagacagccaggttttatagagatgttctcggcatgaaggttttacggcacgaagaatttgaggaaggatgtaaggctgcctgtaacggcccttacgacggaaaatggagcaaaacaatggtggggtttggcccagaagacgatcattttgtcgctgagcttacatataactacggtgttggtgattacaagctgggcaatgactttatgggcatcaccttagcttcatctcaggccgtcagcaacgcacgcaaactggagtggcctctgaccgaagtggcggagggagttttcgagaccgaagctccaggtggctataaattttacttgcaaaaccgaagcctcccacagagtgatccggtgctgaaagtgaccctcgctgtcagtgatttgcagaaaagcctgaactattggtgcaatcttttaggcatgaaaatctatgagaaggatgaagaaaagcaacgtgccctgctcggatatgccgataaccagtgtaagctggaactccagggcgtcaaaggaggggtcgaccatgcagccgcttttggtagaattgcattctcatgcccacaaaaagaactacctgatctcgaagaccttatgaagagagagaaccagaaaatcctgactccattggtaagtctcgacactcccggaaaggcaaccgtacaagtggttatcctggccgaccccgatggacatgagatttgttttgtcggcgatgaagcctttagagagttgagtaagatggatcccgagggctccaagctcctcgacgatgcaatggccgcagataagtccgatgagtggttcgccaaacacaataaacctaaagctagcggatag

SEQ ID NO: 189261 - protein, 1106 aa, Artificial Sequence
  derived and/or modified sequence
MSGTSSHESFYDSLSDMQEESKNTDFFPGLSAFLSQEEINKSLDLARRAIADSETEDFDSEKEISQIFSTSPASLCEHPSHKETKLGEHASRRPQDNRSTPVQPLAEKQTKSISSPVSKRKPAMSPLLTRPSYIRSLRKAEKRGAKTPSTNVKPKTPHQRKGGPQSQLCDKAANLIEELTSIFKAAKPRNRSPNGESSSPDSGYLSPKNQPSALLSASASQSPMEDQGEMEREVKSPGARHCYQDNQDLAVPHNRKSHPQPHSALHFPAAPRFIQKLRSQEVAEGSRVYLECRVTGNPTPRVRWFCEGKELHNTPDIQIHCEGGDLHTLIIAEAFEDDTGRYTCLATNPSGSDTTSAEVFIEGASSTDSDSESLAFKSRAGAMPQAQKKTTSVSLTIGSSSPKTGVTTAVIQPLSVPVQQVHSPTSYLCRPDGTTTAYFPPVFTKELQNTAVAEGQVVVLECRVRGAPPLQVQWFRQGSEIQDSPDFRILQKKPRSTAEPEEICTLVIAETFPEDAGIFTCSARNDYGSATSTAQLVVTSANTENCSYESMGESNNDHFQHFPPPPPILETSSLELASKKPSEIQQVNNPELGLSRAALQMQFNAAERETNGVHPSRGVNGLINGKANSNKSLPTPAVLLSPTKEPPPLLAKPKLGFPKKASRTARIASDEEIQGTKDAVIQDLERKLRFKEDLLNNGQPRLTYEERMARRLLGADSATVFNIQEPEEETANQEYKVSSCEQRLISEIEYRLERSPVDESGDEVQYGDVPVENGMAPFFEMKLKHYKIFEGMPVTFTCRVAGNPKPKIYWFKDGKQISPKSDHYTIQRDLDGTCSLHTTASTLDDDGNYTIMAANPQGRISCTGRLMVQAVNQRGRSPRSPSGHPHVRRPRSRSRDSGDENEPIQERFFRPHFLQAPGDLTVQEGKLCRMDCKVSGLPTPDLSWQLDGKPVRPDSAHKMLVRENGVHSLIIEPVTSRDAGIYTCIATNRAGQNSFSLELVVAAKEAHKPPVFIEKLQNTGVADGYPVRLECRVLGVPPPQIFWKKENESLTHSTDRVSMHQDNHGYICLLIQGATKEDAGWYTVSAKNEAGIVSCTARLDVYISRH

SEQ ID NO: 189262 - protein, 512 aa, Artificial Sequence
  derived and/or modified sequence
KNTDFFPGLSAFLSQEEINKSLDLARRAIADSETEDFDSEKEISQIFSTSPASLCEHPSHKETKLGEHASRRPQDNRSTPVQPLAEKQTKSISSPVSKRKPAMSPLLTRPSYIRSLRKAEKRGAKTPSTNVKPKTPHQRKGGPQSQLCDKAANLIEELTSIFKAAKPRNRSPNGESSSPDSGYLSPKNQPSALLSASASQSPMEDQGEMEREVKSPGARHCYQDNQDLAVPHNRKSHPQPHSALHFPAAPRFIQKLRSQEVAEGSRVYLECRVTGNPTPRVRWFCEGKELHNTPDIQIHCEGGDLHTLIIAEAFEDDTGRYTCLATNPSGSDTTSAEVFIEGASSTDSDSESLAFKSRAGAMPQAQKKTTSVSLTIGSSSPKTGVTTAVIQPLSVPVQQVHSPTSYLCRPDGTTTAYFPPVFTKELQNTAVAEGQVVVLECRVRGAPPLQVQWFRQGSEIQDSPDFRILQKKPRSTAEPDVLYVFVRVRCHQMKIQYYNLAHLISSWLSSFL

SEQ ID NO: 189263 - DNA, 3321 bp, Artificial Sequence
  derived and/or modified sequence
atgtccggaactagtagtcacgaatcattctacgactcattgagcgacatgcaggaagagtccaagaatactgactttttcccggggctaagcgccttcctgtcccaggaggagattaacaagagtctcgacctggcccgacgcgccatcgccgacagcgagaccgaagatttcgactcagaaaaggagatttcacagattttttccacttctcccgcctccttgtgtgaacacccttcgcacaaggagactaaactcggtgagcacgcttccagaaggcctcaggataaccgctctaccccggtccagccactggctgagaagcagacaaagtccatctcgtccccagtgagtaagcggaagcctgctatgagtccgctgctgaccaggccatcatatatcaggagcttaagaaaagccgagaaacgaggggctaagaccccctccaccaacgtcaagcccaagacaccccaccagcggaagggcgggcctcagagccagctttgcgataaagctgctaatttaattgaagaactgacctcgatcttcaaagccgctaagccccggaataggtctcctaatggagagagctcaagccccgactcagggtacctgtcccccaagaaccagccaagcgcactgctgtcagcgagcgcatcccaatcccctatggaggaccagggagaaatggagagggaagtaaagagtcccggggcacgtcactgctaccaagataatcaggacctcgccgttccacacaaccgcaagagccaccctcagccccatagcgctctacacttcccagccgcacctagattcattcagaaactgcgatcccaggaggtggctgagggatcaagggtgtatctcgaatgccgcgtgactggcaaccccactccacgggtccgatggttttgcgaaggaaaagaacttcacaatactcctgatatccagattcactgcgagggaggtgatttgcacacgctcattatcgcagaggcgtttgaggacgatacaggacggtacacttgcctcgctactaatccaagcggatccgacactaccagcgccgaggtattcattgaaggggcctcttccactgactctgacagcgagtctctcgcattcaagagcagagccggcgctatgccccaagcgcaaaaaaagacgacctcggtcagtctgacaataggatcatcatcacctaaaacaggagttaccacagccgtaattcaaccactgtctgtacccgttcaacaggtgcattccccaaccagttatctatgccggcccgatggtaccacgaccgcctacttcccaccagtgtttactaaggagttacagaataccgccgtagccgaaggacaggtcgtggttctcgaatgcagggtacgcggggcaccgcctctccaggtgcagtggttccggcagggaagcgaaattcaggatagccctgattttcggattctccagaaaaaacccaggagcaccgctgaaccggaggagatttgcacactggtcatcgctgagacctttcccgaagatgcaggtatttttacatgtagcgctagaaatgactacggctcagccacatcaaccgcccaactcgtggtcaccagcgcaaatactgagaattgctcttacgaaagtatgggggagagcaacaatgaccacttccagcatttcccgccaccacccccaattttagaaacatcgtctctcgagctagcctccaaaaagccctcggagatacaacaggttaataacccggagctcggattaagtagggcggcgctgcagatgcagttcaacgcagccgagagagaaactaatggggtgcatcctagccggggagtgaatggcctcattaacggcaaagcaaattccaacaaatctcttccgacacctgccgtgttgttatctcccaccaaagagcccccaccactgctggcaaagcccaagcttgggtttccgaaaaaagcttccagaaccgctcggatcgcttcagatgaagaaatccagggcacaaaggacgcagtcattcaggacctggagcgaaaactgcggtttaaggaggacctgttgaacaatggccagcctcgcctaacctacgaggagcgcatggcccgaaggctcctgggagcagacagcgcaaccgtttttaacatccaggagcctgaggaagagactgctaatcaggagtacaaagtaagcagttgtgagcagcgtttgatctccgagatagagtacaggctggagagatcgcctgtggacgaaagcggtgacgaggtgcagtatggagatgtgcctgtggaaaatggaatggcaccctttttcgaaatgaaactcaagcattacaagatattcgaagggatgcccgtgacatttacctgccgggtggctggaaatcccaaacctaagatctactggtttaaagacggaaagcagatctcccccaagagcgaccactacaccatccagcgcgacctagatggcacctgtagtctgcataccacggcctccaccctcgatgacgacggcaactacacaatcatggctgctaatcctcagggaaggatttcttgcactgggcgtctcatggtgcaagcggtgaatcagcgtgggagatctcccaggagcccatccggacacccacatgtaaggcgacctaggagtcggtcccgcgactccggggacgagaatgagcctattcaggagcgtttctttcgtccccacttccttcaggcaccgggtgatttgaccgtgcaagaaggaaaactctgccgcatggattgtaaggtgagcggtctgcctacacctgatttgtcctggcagctggacggcaaacctgtgcggcccgatagcgctcacaaaatgttggtgcgggaaaatggggttcactctcttatcattgaaccagtgacatctcgcgacgctggaatttatacatgcatcgccacaaatcgggccgggcaaaattcattcagtctagaactggtcgtggccgcgaaggaggcacataagccccctgtctttattgagaagctccagaacaccggagtcgcagacgggtacccagtccggttggagtgtcgagttctcggagtaccccccccacaaattttttggaagaaggagaacgaaagtctgacacattcaactgacagggtgagtatgcaccaggacaaccacggctacatctgcctgctgatacaaggcgcaactaaggaggatgccggatggtatactgtcagtgccaagaatgaggcagggattgtgtcttgcactgccagactggatgtgtatatttcccggcactag

SEQ ID NO: 189264 - DNA, 1233 bp, Artificial Sequence
  derived and/or modified sequence
atgagtcccctgctgacgagaccttcctacattagatccctgcgcaaggccgaaaaacggggggctaaaaccccatctaccaacgtgaagccaaaaaccccgcatcaaagaaagggggggccacaaagtcagctgtgcgacaaagctgctaatctaattgaagaattaacgtctatatttaaggcagccaagcctagaaatagaagtcctaacggggaatcctcgagtcccgattcaggctatctgagccctaagaaccaaccatccgccttactgagcgcttccgcgtcgcagtctccgatggaagaccagggtgagatggagcgcgaagtgaaaagcccaggcgcaagacactgctaccaggacaatcaggatctcgcggtaccacataacagaaagagccacccacagccccactctgctcttcacttccccgcggctccaaggttcatccagaaactgcgttcccaagaagtagctgaagggagccgagtgtacctggagtgtcgagtaaccggcaacccgaccccccgtgtccgttggttctgtgaggggaaggaactgcataatacccccgatatacagatacattgtgaaggaggtgacctccacacgctgataatcgccgaagccttcgaagacgacactggccggtacacctgcctggccacaaacccctctggctccgacactaccagcgcggaggtcttcattgagggggcatcaagtaccgattcagattccgagtccctggcttttaaatctcgggcaggagccatgcctcaagcccaaaaaaagacaacctctgtgagtctgaccattggatcttcttcacctaagacaggagtgacgactgcagtgatccagccactgtctgtgccagtacagcaggtgcacagccccacaagttatctttgtaggcccgacggcaccacaaccgcttattttccacctgtttttaccaaagaactgcagaatactgcggtggcagaagggcaagtagttgtgctggagtgtagagtgcgtggcgccccgcccctgcaggttcagtggttccggcaggggtccgaaatacaagactcacctgacttcaggattctgcagaagaagccccggtctacggccgaacctgacgttctgtacgtgttcgttcgcgtacggtgtcaccagatgaaaattcaatactacaatctggctcacctgatcagttcttggcttagctccttcttgtag

SEQ ID NO: 189265 - DNA, 3321 bp, Artificial Sequence
  derived and/or modified sequence
atgagcggcaccagcagccatgagagcttctatgacagcctgagtgacatgcaggaggagagcaagaacacagacttcttccctggcctgagcgccttcctgagccaggaggagatcaacaagagcctggacctggcccggcgggccatcgctgacagcgagacagaggactttgacagcgagaaggagatcagccagatcttcagcaccagccctgccagcctgtgtgagcaccccagccacaaggagaccaagctgggggagcacgccagccggcggccccaggacaacagaagcacccctgtgcagcccctggccgagaagcagaccaagagcatcagcagccctgtgtccaagaggaagccagccatgagccccctgctgacccggcccagctacatccgcagcctgaggaaggccgagaagagaggagccaagacccccagcaccaacgtgaagcccaagaccccccaccagaggaaaggaggcccccagagccagctgtgtgacaaggccgccaacctgattgaggagctgaccagcatcttcaaggccgccaagcccaggaacagaagccccaacggggagagcagcagcccagacagcggctacctgagccccaagaaccagcccagcgccctgctgagcgccagcgccagccagagccccatggaggaccagggcgagatggagcgggaggtgaagagccctggggcccggcactgctaccaggacaaccaggacctggccgtgccccacaacaggaagagccacccccagccccacagcgccctgcacttccctgctgccccccgcttcatccagaagctgcggagccaggaggtggccgagggcagccgggtgtacctggagtgccgggtgactggaaaccccaccccccgggtgcgctggttctgtgagggcaaggagctgcacaacaccccagacatccagatccactgtgagggcggggacctgcacaccctcatcatcgccgaggcctttgaagatgacaccggccgctacacctgcctggccaccaaccccagcggcagtgacaccaccagcgctgaggtgttcattgaaggagccagcagcacagacagcgacagcgagagcctggccttcaagagccgggccggggccatgccccaggcccagaagaagaccacctctgtgtccctgaccatcggcagcagcagccccaagacaggagtgaccacagctgtgatccagcccctgtctgtgcctgtgcagcaggtgcacagccccaccagctacctgtgcaggccagatggcaccaccacagcctacttcccccctgtgttcaccaaggagctgcagaacacagctgtggccgagggccaggtggtggtgctggagtgccgggtgcggggggccccacccctgcaggtgcagtggttccggcagggcagcgagatccaggacagcccagacttccgcatcctgcagaagaagcccaggagcacagctgagcctgaggagatctgcaccctggtgattgctgagaccttcccagaagatgctggcatcttcacctgcagcgccagaaatgactatggcagcgccaccagcacagcccagctggtggtgaccagcgccaacacagagaactgcagctatgagagcatgggagagagcaacaatgaccacttccagcacttccccccacctccacccatcctggagaccagcagcctggagctggccagcaagaagcccagcgagatccagcaggtgaacaaccctgagctgggcctgagcagagctgccctgcagatgcagttcaatgctgctgagcgggagaccaatggagtgcaccccagccggggcgtgaatggcctcatcaacgggaaggccaacagcaacaagagcctgcccaccccagctgtgctgctgagccccaccaaggagcccccacccctgctggccaagcccaagctgggcttccccaagaaggccagcaggacagccagaattgccagtgatgaggagatccagggcaccaaggatgctgtgatccaggacctggagaggaagctgcgcttcaaggaggacctgctgaacaacggccagccccggctgacctatgaggagaggatggcccggcggctgctgggcgctgacagcgccaccgtcttcaacatccaggagcctgaggaggagacagccaaccaggagtacaaggtgagcagctgtgagcagaggctcatcagcgagattgagtaccgcctggagaggagccctgtggatgagagcggagatgaggtgcagtatggagatgtgcctgtggagaatggcatggcccccttctttgagatgaagctgaagcactacaagatctttgagggcatgcctgtgaccttcacctgccgggtggccggcaaccccaagcccaagatctactggttcaaggatggcaagcagatcagccccaagagtgaccactacaccatccagagggacctggatggcacctgcagcctgcacaccacagccagcaccctggatgatgatggcaactacaccatcatggccgccaacccccagggccgcatcagctgcaccggccgcctgatggtgcaggccgtgaaccagaggggccgcagccccaggagccccagcggccacccccacgtgcggcggcccaggagccgcagccgggacagcggagatgaaaatgagcccatccaggagcgcttcttccggccccacttcctgcaggcccctggggacctgactgtgcaggagggcaagctgtgcaggatggactgcaaggtgtctggcctgcccaccccagacctgtcctggcagctggatggcaagcctgtgcggccagattctgcccacaagatgctggtgagagaaaatggagtgcacagcctcatcatcgagcctgtgaccagcagagatgctggcatctacacctgcatcgccaccaacagagctggccagaacagcttcagcctggagctggtggtggccgccaaggaggcccacaagccccctgtgttcatcgagaagctgcagaacacaggagtggctgatggctaccctgtgcggctggagtgccgggtgctgggcgtgcccccaccccagatcttctggaagaaggaaaatgaaagcctgacccacagcacagacagagtgtccatgcaccaggacaaccacggctacatctgcctgctgatccagggcgccaccaaggaggatgctggctggtacacagtgtctgccaagaatgaggccggcatcgtgtcctgcacagcccggctggatgtgtacatcagccgccactag

SEQ ID NO: 189266 - DNA, 1233 bp, Artificial Sequence
  derived and/or modified sequence
atgagccccctgctgacccggcccagctacatccgcagcctgaggaaggccgagaagagaggagccaagacccccagcaccaacgtgaagcccaagaccccccaccagaggaagggcggcccccagagccagctgtgtgacaaggccgccaacctgattgaggagctgaccagcatcttcaaggccgccaagcccaggaacagaagccccaatggagagagcagcagcccagattctggctacctgagccccaagaaccagcccagcgccctgctgagcgccagcgccagccagagccccatggaggaccagggcgagatggagcgggaggtgaagagccctggggcccggcactgctaccaggacaaccaggacctggccgtgccccacaacaggaagagccacccccagccccacagcgccctgcacttccctgctgccccccgcttcatccagaagctgcggagccaggaggtggccgagggcagccgggtgtacctggagtgccgggtgacaggcaaccccaccccccgggtgcgctggttctgtgagggcaaggagctgcacaacaccccagacatccagatccactgtgagggcggggacctgcacaccctcatcatcgccgaggcctttgaagatgacaccggccgctacacctgcctggccaccaaccccagcggcagtgacaccaccagcgctgaggtgttcatcgagggcgccagcagcacagacagcgacagcgagagcctggccttcaagagcagagctggggccatgccccaggcccagaagaagaccacctctgtgtccctgaccatcggcagcagcagccccaagacaggagtgaccacagctgtgatccagcccctgtctgtgcctgtgcagcaggtgcacagccccaccagctacctgtgcaggccagatggcaccaccacagcctacttcccccctgtgttcaccaaggagctgcagaacacagctgtggccgagggccaggtggtggtgctggagtgccgggtgcggggggccccacccctgcaggtgcagtggttccggcagggcagcgagatccaggacagcccagacttccgcatcctgcagaagaagcccaggagcacagctgagccagatgtgctgtatgtgtttgtgcgggtgcgctgccaccagatgaagatccagtactacaacctggcccacctgatcagctcctggctgagcagcttcctgtag

SEQ ID NO: 189267 - DNA, 3321 bp, Artificial Sequence
  derived and/or modified sequence
atgagcggcaccagcagccacgagagcttctacgacagcctgagcgacatgcaggaagaatccaaaaatactgacttttttccgggattaagcgcctttctgtctcaagaagaaatcaataaatccttggacctggccagacgggcgatcgctgactccgagacagaagacttcgactcagagaaagaaatctcccagattttctcaacgtccccagcaagtctgtgcgaacatccaagccataaggaaaccaaattaggtgaacatgctagtcgccggccacaggacaatagatccactcccgtgcagccacttgccgagaagcaaacaaaaagcatctctagcccagtaagcaagcggaaacccgcaatgtctccactacttacgaggccctcatacatcagatccctgcggaaggccgaaaagcgaggggccaaaacccccagtacaaacgttaaacccaaaaccccacaccagaggaagggcggaccccagagtcaactgtgcgacaaggcagcaaatctgattgaggaattgactagtatctttaaagctgctaaaccacgaaatcgatcccctaatggagagagttctagtcctgactcaggctacttgtcccccaaaaaccagcctagcgccctcctgtccgcctctgcaagtcaatcccccatggaagatcagggcgaaatggagcgcgaggttaagtctcccggggctcgccattgctatcaagataatcaagacctggctgtgccccacaatcggaaaagccatccccagccccatagcgctcttcacttccctgcagctccgcgctttatacagaagctgcgcagtcaggaggttgccgaaggatcccgtgtgtacctggagtgccgtgtgactggaaatccaacaccccgagttcgctggttctgtgagggcaaggaattgcataacacccccgacattcagattcactgtgaggggggagacctgcataccctcatcattgccgaggcttttgaggacgacaccggacgctacacttgcctcgcaaccaacccctctgggtccgataccacatcggcagaggtatttatagagggggcttcttccacagacagtgactccgagtccctcgcatttaagagtagggcaggggctatgccccaagcacaaaagaagacgacaagtgtgtctctgacaatcgggtccagttctcctaagactggtgtgacaacagcagtcatccagcctctgtcggttccggtgcaacaggtgcatagccccacatcatatctgtgtaggccagacggcaccacgaccgcctattttccacccgtatttactaaagagctccagaataccgccgtggccgaaggacaggtagttgtgctcgagtgcagggtgaggggagccccacccctgcaggtacagtggttccggcagggctcggagattcaagactcacctgactttcgcatcctgcagaaaaagccacgaagcactgctgagcccgaggaaatctgcactctagtaattgccgagacttttcccgaagacgcaggaatcttcacttgttccgcccggaatgattatggtagcgcaacaagcaccgcccaactggtggtaacatccgctaacactgaaaactgcagctacgagtctatgggagagtcaaacaatgaccacttccagcatttcccacctcccccccccatcctggagacttcctctctggagcttgcgtctaaaaagccgtctgagatccagcaggtgaacaaccccgagttaggactgtcccgagctgctctgcagatgcagttcaacgcggcggagcgtgagaccaacggagtgcacccttcgcgcggtgtgaacggcctgattaatggcaaagcgaattccaataagtcgcttcccacccctgccgtcctactcagtcctacaaaagaacctcctcccttactggccaagccaaaactcggctttccaaaaaaggccagccggactgctagaattgcgtccgatgaagagatccagggcacaaaggacgcagtgatacaggatctggagcggaagctcagatttaaagaggacctgctgaataacggtcagccacgtctgacttacgaagaacgtatggcacggaggttactcggggctgattccgcaaccgtgtttaacatccaagagcccgaggaagaaaccgccaaccaggaatataaagtctcttcgtgtgaacagcggctgatcagcgaaatcgagtaccgcctagaacgctctcccgtcgatgaatcaggagatgaggttcagtacggggatgtcccggtggagaacggtatggctccgttctttgagatgaaattaaagcactataagatatttgaaggcatgccggtaacattcacctgcagagtggcaggcaaccctaaacctaaaatttattggttcaaggacggaaaacagatctcacctaagtctgatcattacacaattcagcgagatctggacggtacctgttccctgcatactaccgcctcaacgctggacgatgacgggaactacaccatcatggcagctaatccgcagggtagaatctcttgtaccggaagattgatggtgcaggcggtcaatcaaagaggacggagccctcggtcaccctcggggcacccccacgtgcggaggccacgtagtcggtctagagactcaggggacgagaacgaacctattcaggaacggttcttccggccgcacttcctacaggctcctggtgatttgaccgtgcaggagggcaagctgtgcagaatggactgtaaagtttccggcctcccaacccccgacctgtcgtggcagcttgatggaaagcctgtccgaccagactccgcccacaaaatgctagtccgggaaaatggcgtgcactcgctcatcatcgagcctgtgactagtcgtgatgcaggtatctatacctgcatcgccactaaccgcgccggccaaaattccttctccctcgagctcgtggtagcagccaaagaagctcacaaacctcctgtattcattgaaaagcttcagaatacgggcgttgctgatggctaccctgtgcgcttggaatgtagggtgctgggagtccctcctcctcagattttttggaagaaggaaaacgaatccctgactcattcgacggatagagtctctatgcaccaggacaatcatggatacatttgtctgctaatccagggcgcgactaaggaagatgcaggttggtacacggtgtcggccaagaacgaggctggcatcgtttcctgcacggctcgcctggacgtctatattagtagacattag

SEQ ID NO: 189268 - DNA, 1233 bp, Artificial Sequence
  derived and/or modified sequence
atgagccccctgctgacccggcccagctacatccggagcctgcggaaggcagaaaaaagaggagccaagaccccttccactaatgttaagccaaaaactcctcaccagcgaaaaggtgggccacaatctcagctgtgcgataaagccgcaaacttgatagaagaacttaccagcatttttaaagcagccaagcctcgcaataggtcccccaatggcgaatcatcatctcccgattctggctatctttccccaaaaaaccaaccatccgctctgctgtccgcctcagcctctcaatccccaatggaagaccagggggaaatggagagagaagtgaagagtccaggtgctagacactgctaccaggacaaccaggacctcgcagttcctcataatagaaagagccacccacagccccactccgcactgcattttcccgccgcaccgagattcatacagaaactccgctctcaagaggtggctgaaggaagccgggtctaccttgaatgcagggtcaccggaaacccgacccctagagtccgctggttttgtgaaggaaaggaactacataacacacctgacattcagatacattgtgagggaggtgacctgcacacactgatcattgccgaagctttcgaggacgacaccgggcggtacacctgtctcgccaccaatccatctggctccgacaccacttctgctgaggttttcatcgagggcgcctcatcgactgacagcgactcagagagcctggcatttaaaagcagggctggagctatgcctcaggcccagaagaagactacgagcgtctcattgacaatcggctccagctcacccaagacgggcgtgaccacagccgtgattcagcctctttcagtgcccgtgcaacaggtgcactcacccaccagctacctgtgccgtccagatgggactacaaccgcctattttccacctgtgttcacaaaagagcttcagaataccgcagtagccgagggccaggttgtggttctcgagtgtcgggttcgaggcgcccccccactgcaggtccagtggtttcgtcagggttctgagatccaggactctccggactttaggattctgcagaagaaacctcgatccacggccgaaccagacgttctgtacgtattcgtccgcgtgcggtgtcaccagatgaaaattcagtactacaatctggcacacctgatatcgtcttggctgtcatctttcctatag

SEQ ID NO: 189269 - DNA, 3321 bp, Artificial Sequence
  derived and/or modified sequence
atgtccgggacttccagccacgagtcgttttacgactctctgagcgatatgcaggaggagtccaaaaacaccgatttcttcccagggctgtctgcctttttgtcacaggaggagattaataagtcattggatctcgcacgacgggcaatcgccgatagcgagaccgaagattttgatagtgagaaggaaatcagccagattttctcaacgagtccagcaagtctatgcgagcacccgtctcacaaggaaactaagctcggggagcacgccagtcgcagacctcaagataacagaagcacgccagtgcagcccttggcagagaaacagactaagagtatcagtagtccggtgagcaagagaaaacctgcaatgtcaccactgctcactaggccatcctatattaggtcacttcgaaaggctgagaaacgcggtgcaaaaaccccgagcacaaacgtgaaacccaaaacaccacaccagagaaagggaggcccacaaagccaattgtgtgataaggcagcgaatttgatcgaggagctcacctcaatcttcaaagccgctaagcctcgcaacagatctccaaacggggaatccagctcccccgactctggctacctgtcacctaaaaatcagccatctgctctcctcagtgcctccgcatctcagagtcctatggaggatcagggggagatggaacgtgaagtaaagagcccaggcgcacggcactgttaccaagacaatcaggacttggctgttccccacaaccggaagagccacccccagccccattcggctctgcactttccagcagcgccaagattcatacagaagcttagatctcaagaagtggctgagggctcacgggtttacctggagtgtagggttactggcaaccctacgcctcgcgtgaggtggttttgcgagggtaaagagttgcacaatacaccagatattcagatccactgtgaaggtggagaccttcatacgctgatcattgcggaagcattcgaggacgataccggaaggtacacttgtctggccacaaacccttcgggatctgacaccacatccgccgaggtttttatcgaaggcgcaagctctactgattccgattccgaaagtcttgcgttcaagagccgcgctggagctatgcctcaggctcaaaagaagaccacatctgtcagtttgaccattggttcaagctctccaaaaactggcgtaactactgccgtcatacagccacttagcgtgcctgtgcaacaggtgcattctcctacctcttatctgtgtaggcccgatgggaccactaccgcatacttcccccctgtctttaccaaggaactccagaacaccgccgtcgccgaagggcaagtcgtcgtgctggagtgtagagttaggggcgctccacctttacaggtccagtggtttagacaagggtcagaaattcaagatagcccagacttccgcattctacagaaaaagccgaggtctacggctgaaccagaggagatatgtactctggtgatagccgaaaccttcccagaagacgcaggaattttcacctgttccgcgaggaatgattacggtagcgccacttcaaccgcgcaactcgtggttaccagcgccaacacagagaattgctcttacgaaagtatgggcgagtcaaataacgaccatttccagcacttcccccctcctccacctatcttggaaacaagttcactggagttagctagcaaaaagccaagcgaaatccagcaggttaataacccagagctgggattatcccgggctgccttgcagatgcagtttaatgctgcagagagagaaacaaatggggtacaccctagcaggggcgttaacggcttaatcaacggtaaagcgaacagcaataagagcctgcccacccctgccgtgctactgagcccaacaaaagagcctccccctctgctggctaaacccaagctgggctttccaaaaaaggcttcccgaaccgctaggatcgctagtgacgaggaaatccaaggcacaaaagatgcagtcatccaggatttagagcggaagctgcgttttaaggaagacctccttaacaacggccagcctcgactgacttatgaagagcgaatggcccgtaggttactcggggcagatagcgctacagtgtttaatattcaggagcccgaggaggagaccgctaatcaagaatacaaagtatcttcatgtgagcagagactcatctctgagatcgagtatagactggaaaggagtccagtcgacgaaagcggggatgaggtccagtacggcgatgtccctgtggaaaacggaatggcaccatttttcgaaatgaagctgaagcattataagattttcgagggaatgcccgtcactttcacctgccgtgtagcaggaaacccgaagccaaaaatatactggttcaaagatggcaagcaaatctccccaaagagtgatcattacacaattcagagagatcttgacggcacctgctcactgcacaccaccgcctctacactggatgatgacggtaactataccatcatggcagcaaacccacagggccgaatcagttgcaccggcaggctgatggtgcaagccgtcaaccagaggggtaggagccccaggagcccaagtgggcatccacacgtgcgcagacctcgtagcaggagtagggactctggggacgaaaacgagcctatacaagagcggttctttcggcctcactttctgcaggctccaggagacctcaccgtgcaggaagggaaattgtgcaggatggattgtaaggttagcggtctgccaacccctgatcttagctggcagctcgatggcaagcccgttagacccgactcagctcacaaaatgctggtgcgcgaaaatggcgtccacagtttgatcattgagccagtcacgagtcgggacgccggtatatacacatgtattgctacgaacagagccggtcagaacagcttctcgctggaactggtagttgctgccaaggaggcacataagcctccagttttcatcgaaaagttgcaaaacacgggagtggctgatggatacccagtccgattggagtgcagggttctgggcgtaccaccaccacaaattttttggaagaaggagaacgaaagtttgacccacagtactgaccgcgtgagtatgcaccaggataatcatgggtatatatgcctactaattcaaggagcgaccaaagaggacgccggatggtacactgttagcgcaaagaatgaagcaggcatcgtcagctgcaccgccagacttgacgtttacatatcaaggcactag

SEQ ID NO: 189270 - DNA, 1233 bp, Artificial Sequence
  derived and/or modified sequence
atgtcaccgcttctgacacgaccttcctacataaggtcactgagaaaagccgagaaaagaggagccaaaactccctccacgaacgtcaagccgaagacaccacatcagagaaagggcggacctcagagccaactttgcgacaaggcagccaatctgatcgaagagcttacatcaatctttaaagctgcaaagcccaggaaccgcagtcctaatggcgagagcagttctccagacagcggttacctgtcaccaaagaaccagccaagcgcactgctttccgctagcgcgagccagtcccctatggaggaccagggcgagatggagagagaagttaagagccccggagcgcgtcactgctatcaggataaccaggacctagccgttcctcacaatcggaaatcccacccgcaaccccactcggctctgcatttcccggctgcacctaggttcatacagaaacttcggagccaggaagtcgcagaaggctcaagagtgtatctcgaatgtcgcgtgactggcaatccaaccccccgtgtcaggtggttctgcgaaggcaaggaactgcataacacacccgatatccaaattcactgtgaagggggagacttacatactttgattattgctgaagccttcgaggacgatacaggacggtatacttgtctcgccaccaatccgtccggctccgacaccacatcagcagaagtatttatcgagggggcatcctccacagattcagacagtgaatccctcgctttcaaatcccgggctggcgcaatgccccaggcacaaaagaaaactacctccgtgtccttgaccataggaagctcttctccgaaaacgggcgtaaccacagctgtaatccagccgctgtcagtgcccgtccaacaggtgcactcgcctacctcctacctgtgccgtccagatggaacaacaacagcctactttccccctgtgtttacaaaagagctgcagaatacggcagtcgctgagggccaggtcgtcgtgcttgaatgtcgagttcgcggtgccccacccctgcaggtgcaatggttcaggcagggctccgagattcaagacagccccgattttcgcattctgcagaagaagccaagaagcactgccgaaccagacgtgctctacgtcttcgtgagggtgcgttgtcaccagatgaagatacaatattataacctggcacacctgatctcgagctggctgagctcattcctgtag

SEQ ID NO: 189271 - DNA, 3321 bp, Artificial Sequence
  derived and/or modified sequence
atgagcggcaccagcagccacgagagcttctacgacagcctgagcgacatgcaggaggagagcaagaacaccgacttcttccccggcctgagcgccttcctgagccaggaggagatcaacaagagcctggacctggccagaagagccatcgccgacagcgagaccgaggacttcgacagcgagaaggagatcagccagatcttcagcaccagccccgccagcctgtgcgagcaccccagccacaaggagaccaagctgggcgagcacgccagcagaagaccccaggacaacagaagcacccccgtgcagcccctggccgagaagcagaccaagagcatcagcagccccgtgagcaagagaaagcccgccatgagccccctgctgaccagacccagctacatcagaagcctgagaaaggccgagaagagaggcgccaagacccccagcaccaacgtgaagcccaagaccccccaccagagaaagggcggcccccagagccagctgtgcgacaaggccgccaacctgatcgaggagctgaccagcatcttcaaggccgccaagcccagaaacagaagccccaacggcgagagcagcagccccgacagcggctacctgagccccaagaaccagcccagcgccctgctgagcgccagcgccagccagagccccatggaggaccagggcgagatggagagagaggtgaagagccccggcgccagacactgctaccaggacaaccaggacctggccgtgccccacaacagaaagagccacccccagccccacagcgccctgcacttccccgccgcccccagattcatccagaagctgagaagccaggaggtggccgagggcagcagagtgtacctggagtgcagagtgaccggcaaccccacccccagagtgagatggttctgcgagggcaaggagctgcacaacacccccgacatccagatccactgcgagggcggcgacctgcacaccctgatcatcgccgaggccttcgaggacgacaccggcagatacacctgcctggccaccaaccccagcggcagcgacaccaccagcgccgaggtgttcatcgagggcgccagcagcaccgacagcgacagcgagagcctggccttcaagagcagagccggcgccatgccccaggcccagaagaagaccaccagcgtgagcctgaccatcggcagcagcagccccaagaccggcgtgaccaccgccgtgatccagcccctgagcgtgcccgtgcagcaggtgcacagccccaccagctacctgtgcagacccgacggcaccaccaccgcctacttcccccccgtgttcaccaaggagctgcagaacaccgccgtggccgagggccaggtggtggtgctggagtgcagagtgagaggcgccccccccctgcaggtgcagtggttcagacagggcagcgagatccaggacagccccgacttcagaatcctgcagaagaagcccagaagcaccgccgagcccgaggagatctgcaccctggtgatcgccgagaccttccccgaggacgccggcatcttcacctgcagcgccagaaacgactacggcagcgccaccagcaccgcccagctggtggtgaccagcgccaacaccgagaactgcagctacgagagcatgggcgagagcaacaacgaccacttccagcacttccccccccccccccccatcctggagaccagcagcctggagctggccagcaagaagcccagcgagatccagcaggtgaacaaccccgagctgggcctgagcagagccgccctgcagatgcagttcaacgccgccgagagagagaccaacggcgtgcaccccagcagaggcgtgaacggcctgatcaacggcaaggccaacagcaacaagagcctgcccacccccgccgtgctgctgagccccaccaaggagcccccccccctgctggccaagcccaagctgggcttccccaagaaggccagcagaaccgccagaatcgccagcgacgaggagatccagggcaccaaggacgccgtgatccaggacctggagagaaagctgagattcaaggaggacctgctgaacaacggccagcccagactgacctacgaggagagaatggccagaagactgctgggcgccgacagcgccaccgtgttcaacatccaggagcccgaggaggagaccgccaaccaggagtacaaggtgagcagctgcgagcagagactgatcagcgagatcgagtacagactggagagaagccccgtggacgagagcggcgacgaggtgcagtacggcgacgtgcccgtggagaacggcatggcccccttcttcgagatgaagctgaagcactacaagatcttcgagggcatgcccgtgaccttcacctgcagagtggccggcaaccccaagcccaagatctactggttcaaggacggcaagcagatcagccccaagagcgaccactacaccatccagagagacctggacggcacctgcagcctgcacaccaccgccagcaccctggacgacgacggcaactacaccatcatggccgccaacccccagggcagaatcagctgcaccggcagactgatggtgcaggccgtgaaccagagaggcagaagccccagaagccccagcggccacccccacgtgagaagacccagaagcagaagcagagacagcggcgacgagaacgagcccatccaggagagattcttcagaccccacttcctgcaggcccccggcgacctgaccgtgcaggagggcaagctgtgcagaatggactgcaaggtgagcggcctgcccacccccgacctgagctggcagctggacggcaagcccgtgagacccgacagcgcccacaagatgctggtgagagagaacggcgtgcacagcctgatcatcgagcccgtgaccagcagagacgccggcatctacacctgcatcgccaccaacagagccggccagaacagcttcagcctggagctggtggtggccgccaaggaggcccacaagccccccgtgttcatcgagaagctgcagaacaccggcgtggccgacggctaccccgtgagactggagtgcagagtgctgggcgtgccccccccccagatcttctggaagaaggagaacgagagcctgacccacagcaccgacagagtgagcatgcaccaggacaaccacggctacatctgcctgctgatccagggcgccaccaaggaggacgccggctggtacaccgtgagcgccaagaacgaggccggcatcgtgagctgcaccgccagactggacgtgtacatcagcagacactag

SEQ ID NO: 189272 - DNA, 1233 bp, Artificial Sequence
  derived and/or modified sequence
atgagccccctgctgaccagacccagctacatcagaagcctgagaaaggccgagaagagaggcgccaagacccccagcaccaacgtgaagcccaagaccccccaccagagaaagggcggcccccagagccagctgtgcgacaaggccgccaacctgatcgaggagctgaccagcatcttcaaggccgccaagcccagaaacagaagccccaacggcgagagcagcagccccgacagcggctacctgagccccaagaaccagcccagcgccctgctgagcgccagcgccagccagagccccatggaggaccagggcgagatggagagagaggtgaagagccccggcgccagacactgctaccaggacaaccaggacctggccgtgccccacaacagaaagagccacccccagccccacagcgccctgcacttccccgccgcccccagattcatccagaagctgagaagccaggaggtggccgagggcagcagagtgtacctggagtgcagagtgaccggcaaccccacccccagagtgagatggttctgcgagggcaaggagctgcacaacacccccgacatccagatccactgcgagggcggcgacctgcacaccctgatcatcgccgaggccttcgaggacgacaccggcagatacacctgcctggccaccaaccccagcggcagcgacaccaccagcgccgaggtgttcatcgagggcgccagcagcaccgacagcgacagcgagagcctggccttcaagagcagagccggcgccatgccccaggcccagaagaagaccaccagcgtgagcctgaccatcggcagcagcagccccaagaccggcgtgaccaccgccgtgatccagcccctgagcgtgcccgtgcagcaggtgcacagccccaccagctacctgtgcagacccgacggcaccaccaccgcctacttcccccccgtgttcaccaaggagctgcagaacaccgccgtggccgagggccaggtggtggtgctggagtgcagagtgagaggcgccccccccctgcaggtgcagtggttcagacagggcagcgagatccaggacagccccgacttcagaatcctgcagaagaagcccagaagcaccgccgagcccgacgtgctgtacgtgttcgtgagagtgagatgccaccagatgaagatccagtactacaacctggcccacctgatcagcagctggctgagcagcttcctgtag

SEQ ID NO: 189273 - DNA, 1944 bp, Artificial Sequence
  derived and/or modified sequence
cggaagtcgcttgtgtatgaacgcagcggcggacctgtgaggggatccgacttgccggcagaacttacgctgcgggaccccgggcactgttgctgctgcgggagtccagagaggcaggaggatggagctcggaaggatttcagctccaggctggctgctggaccgacttttcaacattttttaaaaagtgcctcagctcctcaggagaagctgtcttcagaagtggaagacccacctccctatctcatgatggatgaacttcttggaaggcagagaaaagtctacctcgagacctatggctgccagatgaatgtgaatgacacagagatagcctggtccatcttacagaagagtggctacctgcggaccagtaacctccaagaggcagatgtgattctccttgtcacatgctctatcagggagaaggctgagcagaccatctggaaccgtttacatcagcttaaagccttgaagacaaggcggccccgctcccgggttcctctgaggattggaattctaggctgcatggctgagaggttgaaggaggagattctcaacagagagaaaatggtagatattttggctggtcctgatgcctaccgggaccttccccggctgctggctgttgctgagtcgggccagcaagctgccaacgtgctgctctctctggacgagacctatgctgatgtcatgccagtccagacaagcgccagtgccacgtctgcctttgtgtcaatcatgcgaggctgtgacaacatgtgtagctactgcattgttcctttcacccggggcagggagaggagtcggcctattgcctccattctagaggaagtgaagaagctttctgagcaggggctgaaagaagtgacacttcttggtcagaatgttaatagttttcgggacaattcggaggtccagttcaacagtgcagtgcctaccaatctcagtcgtggctttaccaccaactataaaaccaagcaaggaggacttcgttttgctcatcttctggatcaggtctccagagtagatcctgaaatgaggatccgttttacctctccccaccccaaggattttcctgatgaggttctgcagctgattcatgagagagataacatctgtaaacagatccacctgccagcccagagtggaagcagccgtgtgttggaggccatgcggaggggatattcaagagaagcttatgtggagttagttcaccatattagagaatctattccaggtgtgagcctcagcagcgatttcattgctggcttttgtggtgagacggaggaagatcacgtccagacagtctctttgctccgggaagttcagtacaacatgggcttcctctttgcctacagcatgagacagaagacacgggcatatcataggctgaaggatgatgtcccggaagaggtaaaattaaggcgtttggaggaactcatcactatcttccgagaagaagcaacaaaagccaatcagacctctgtgggctgtacccagttggtgctagtggaagggctcagtaaacgctctgccactgacctgtgtggcaggaatgatggaaaccttaaggtgatcttccctgatgcagagatggaggatgtcaataaccctgggctcagggtcagagcccagcctggggactatgtgctggtgaagatcacctcagccagttctcagacacttaggggacatgttctctgcaggaccactctgagggactcttctgcatattgctgacctgagaggatggcctcagagctgacttgggcaatcctccccaacaggaaggggagacattgcctgccactgaggaaacaggtcatgaaggtggagataagctgcaaggggcgaagcaactttatgtcagtggaaaacgtgtctctttaaagctgctatgtgaacagcttttacagtcattaaatttacctaaactaaggttaa

SEQ ID NO: 189274 - protein, 281 aa, Artificial Sequence
  derived and/or modified sequence
MKLAAMIKKMCPSDSELSIPAKNCYRMVILGSSKVGKTAIVSRFLTGRFEDAYTPTIEDFHRKFYSIRGEVYQLDILDTSGNHPFPAMRRLSILTGDVFILVFSLDNRDSFEEVQRLRQQILDTKSCLKNKTKENVDVPLVICGNKGDRDFYREVDQREIEQLVGDDPQRCAYFEISAKKNSSLDQMFRALFAMAKLPSEMSPDLHRKVSVQYCDVLHKKALRNKKLLRAGSGGGGGDPGDAFGIVAPFARRPSVHSDLMYIREKASAGSQAKDKERCVIS

SEQ ID NO: 189275 - DNA, 846 bp, Artificial Sequence
  derived and/or modified sequence
atgaaactcgccgctatgataaagaagatgtgtccctctgactccgagctgtcgatcccagcaaagaactgctatcgaatggtgatactggggtcctcaaaagtcggcaaaacagccatagtctcccggttcttgacaggtcggttcgaggatgcatacacgcccaccattgaagattttcacagaaaattttacagcatcagaggcgaggtgtatcagctggatatcctggacacctccgggaaccacccattccctgctatgcgcagactgagcattctgactggcgacgtgttcatcctggtattctcattagacaatagagactcctttgaggaggtgcagagactgcggcaacagattctggacaccaaaagttgtctgaagaacaaaacaaaagaaaacgtggatgtgccactggttatctgtggcaataagggggacagggacttctacagggaggtggatcagcgagagatcgagcagttagttggggacgacccacagcgctgcgcatacttcgagatatctgcaaagaagaacagctcgctcgatcagatgttccgcgcactgtttgccatggcaaagctgccgtcagagatgtcacccgatctgcacaggaaggtctcagtgcagtactgcgacgtcctgcataaaaaagcactgagaaacaaaaagctgttgagagcgggctctggcggcggcgggggcgatcctggtgacgctttcggcatcgttgcaccatttgctaggcggccatctgtacactcagatttgatgtatatccgagaaaaggcatctgctggatctcaagctaaggataaagaacgctgcgtgatttcttag

SEQ ID NO: 189276 - DNA, 846 bp, Artificial Sequence
  derived and/or modified sequence
atgaagctggccgccatgatcaagaagatgtgccccagcgacagcgagctgagcatcccagccaagaactgctacaggatggtgatcctgggcagcagcaaggtgggcaagacagccatcgtgagccgcttcctgaccggccgctttgaagatgcctacacccccaccatcgaggacttccacaggaagttctacagcatccggggggaggtgtaccagctggacatcctggacaccagcggcaaccaccccttccctgccatgaggcggctgagcatcctgactggagatgtgttcatcctggtgttcagcctggacaacagagacagctttgaggaggtgcagaggctgcggcagcagatcctggacaccaagagctgcctgaagaacaagaccaaggaaaatgtggatgtgcccctggtgatctgtggcaacaagggggaccgggacttctaccgggaggtggaccagcgggagattgagcagctggtgggagatgacccccagagatgtgcctactttgagatcagcgccaagaagaacagcagcctggaccagatgttccgggccctgtttgccatggccaagctgcccagcgagatgagcccagacctgcacaggaaggtgtctgtgcagtactgtgatgtgctgcacaagaaggccctgaggaacaagaagctgctgcgggccggcagcggcggcggcggcggggaccctggagatgcctttggaattgtggccccctttgcccggcggcccagcgtgcacagcgacctgatgtacatccgggagaaggccagcgctggcagccaggccaaggacaaggagcgctgcgtcatctcctag

SEQ ID NO: 189277 - DNA, 846 bp, Artificial Sequence
  derived and/or modified sequence
atgaagctggccgccatgatcaagaagatgtgccccagcgacagcgagctgtccatccctgctaagaactgctaccggatggtgatcctggggtctagtaaggtgggaaagaccgcaattgtatcaagattcctcaccggacgctttgaagatgcttatacccctaccatagaggactttcatagaaagttttatagtatacgaggagaagtctatcaattggacatcctcgacacatcaggtaatcacccattccccgcgatgcgacgattgagtatactcactggggacgtctttattctggtctttagcctcgacaacagggattcattcgaggaggtccaacgcctgcggcaacagatccttgacacaaagtcgtgcctgaaaaacaaaaccaaagagaatgtggacgtgcccctggttatctgcggtaacaaaggcgatcgcgatttctaccgggaagtggatcaaagggaaatagagcagctcgtcggggatgacccccaaagatgcgcctacttcgagattagcgcgaaaaagaattcctcgctcgaccagatgtttagggcacttttcgcaatggcaaagttgccttcggaaatgtctcctgaccttcaccgcaaagttagcgtacagtattgcgacgtgctgcacaagaaggcactgcggaacaagaagcttctacgggccggaagtgggggtggtggtggtgatcccggcgacgcattcgggatcgttgcccccttcgcccggcgtcccagcgtacactcagatctaatgtatatcagagaaaaagcatctgcagggtcccaggcaaaggataaagaacgctgtgtgatcagctag

SEQ ID NO: 189278 - DNA, 846 bp, Artificial Sequence
  derived and/or modified sequence
atgaagctggctgcgatgattaagaagatgtgcccaagtgacagcgaactaagtatcccagctaaaaattgttacaggatggtgatcttggggtcttctaaagtggggaagacggccattgtctcccgcttccttacaggcaggttcgaagacgcgtatacccctaccattgaagatttccaccggaaattctactcaatcaggggcgaggtctaccagcttgacatactcgatacttcagggaaccatcccttcccagccatgagacgtctgagcatattgacgggcgatgtgtttattttggttttttcgttggacaacagagacagctttgaagaggtgcagcgcctgaggcagcagatactggacacaaaatcctgccttaagaacaagaccaaggagaacgtcgacgtccccctggtgatctgtggaaataaaggcgatagagacttctacagggaagtggatcagagagagattgagcaacttgtaggggacgatccccagagatgtgcatatttcgagatttctgctaagaagaacagcagcctcgaccagatgttcagagcactgtttgctatggcaaagctccccagcgagatgtctccggaccttcaccgaaaagtctccgttcagtactgcgacgtacttcacaaaaaggccttacggaataagaagctcctcagggcaggctcaggcggaggcggtggagatcccggtgatgccttcggcatcgtagccccttttgcgaggagaccatccgtgcattctgacttaatgtatataagggagaaggctagcgctggtagccaggctaaggacaaggagcgatgcgtgattagctag

SEQ ID NO: 189279 - DNA, 1404 bp, Artificial Sequence
  derived and/or modified sequence
agagcaagcggcctgtgcccagatcctgggagaaccccagccgagcccagcctagcccgagcccagcccgagcggagccggagccccaagcccgagccgcgcccagcccgagcagagccctccagccgctcaccccgcgtgccaccccagcgaccctcagccgctctctgcccttctctcggccccgcgcccgccctcgcggcccctctgcccaatgaaactggccgcgatgatcaagaagatgtgcccgagcgactcggagctgagtatcccggccaagaactgctatcgcatggtcatcctcggctcgtccaaggtgggcaagacggccatcgtgtcgcgcttcctcaccggccgcttcgaggacgcctacacgcctaccatcgaggacttccaccgcaagttctactccatccgcggcgaggtctaccagctcgacatcctcgacacgtccggcaaccacccgttccccgccatgcggcgcctctccatcctcacagatcctcgacaccaagtcttgcctcaagaacaaaaccaaggagaacgtggacgtgcccctggtcatctgcggcaacaagggtgaccgcgacttctaccgcgaggtggaccagcgcgagatcgagcagctggtgggcgacgacccccagcgctgcgcctacttcgagatctcggccaagaagaacagcagcctggaccagatgttccgcgcgctcttcgccatggccaagctgcccagcgagatgagcccagacctgcaccgcaaggtctcggtgcagtactgcgacgtgctgcacaagaaggcgctgcggaacaagaagctgctgcgggccggcagcggcggcggcggcggcgacccgggcgacgcctttggcatcgtggcacccttcgcgcgccggcccagcgtacacagcgacctcatgtacatccgcgagaaggccagcgccggcagccaggccaaggacaaggagcgctgcgtcatcagctaggagccccgccgcgctggcgacacaacctaaggaggacctttttgttaagtcaaatccaacggcccggtgcgccccaggccgggagcgcgcgcggactggcgtctcccctcccggcgatccgcccccagcactggggaggcgccactgaaccgagaagggacggtcatctgctccggaaggaaagagaacgggccaagactgggactattccccacccccggtcccccattgaggcccgccacccccataactttgggagcgagggcccagccgagggtggatttatcttctcaaagacctaagagtgagcgcggggtgggggagggatgtgaagttatccagcctctgctaggcttcaagaaaccgtcatgcccgcttgagggtcaggacccacggggcattatcttgtctgtgattc

SEQ ID NO: 189280 - DNA, 1746 bp, Artificial Sequence
  derived and/or modified sequence
agcaagcggcctgtgcccagatcctgggagaaccccagccgagcccagcctagcccgagcccagcccgagcggagccggagccccaagcccgagccgcgcccagcccgagcagagccctccagccgctcaccccgcgtgccaccccagcgaccctcagccgctctctgcccttctctcggccccgcgcccgccctcgcggcccctctgcccaatgaaactggccgcgatgatcaagaagatgtgcccgagcgactcggagctgagtatcccggccaagaactgctatcgcatggtcatcctcggctcgtccaaggtgggcaagacggccatcgtgtcgcgcttcctcaccggccgcttcgaggacgcctacacgcctaccatcgaggacttccaccgcaagttctactccatccgcggcgaggtctaccagctcgacatcctcgacacgtccggcaaccacccgttccccgccatgcggcgcctctccatcctcacaggagacgttttcatcctggtgttcagtctggacaaccgcgactccttcgaggaggtgcagcggctcaggcagcagatcctcgacaccaagtcttgcctcaagaacaaaaccaaggagaacgtggacgtgcccctggtcatctgcggcaacaagggtgaccgcgacttctaccgcgaggtggaccagcgcgagatcgagcagctggtgggcgacgacccccagcgctgcgcctacttcgagatctcggccaagaagaacagcagcctggaccagatgttccgcgcgctcttcgccatggccaagctgcccagcgagatgagcccagacctgcaccgcaaggtctcggtgcagtactgcgacgtgctgcacaagaaggcgctgcggaacaagaagctgctgcgggccggcagcggcggcggcggcggcgacccgggcgacgcctttggcatcgtggcacccttcgcgcgccggcccagcgtacacagcgacctcatgtacatccgcgagaaggccagcgccggcagccaggccaaggacaaggagcgctgcgtcatcagctaggagccccgccgcgctggcgacacaacctaaggaggacctttttgttaagtcaaatccaacggcccggtgcgccccaggccgggagcgcgcgcggactggcgtctcccctcccggcgatccgcccccagcactggggaggcgccactgaaccgagaagggacggtcatctgctccggaaggaaagagaacgggccaagactgggactattccccacccccggtcccccattgaggcccgccacccccataactttgggagcgagggcccagccgagggtggatttatcttctcaaagacctaagagtgagcgcggggtgggggagggatgtgaagttatccagcctctgctaggcttcaagaaaccgtcatgcccgcttgagggtcaggacccacggggcattatcttgtctgtgattccgggttgctgtgacagccggtagagcctctgccctcccaaaactaagcgggggggcgtgggtcaaatcatagccaagtgacttgtttacatgtgagtgaaactgcacaaaggaacacaaaacaaaacttgcactttaacggtagttccggtgtcaacatggacacgaacaaaaccttacccaggtgtttatactgtgtgtgtctgaggtctttaaagttattgctttatttggttttttaatatacaataaaataatttaaaatggaaaa

SEQ ID NO: 189281 - DNA, 846 bp, Artificial Sequence
  derived and/or modified sequence
atgaagctggccgccatgatcaagaagatgtgccccagcgacagcgagctgagcatccccgccaagaactgctacagaatggtgatcctgggcagcagcaaggtgggcaagaccgccatcgtgagcagattcctgaccggcagattcgaggacgcctacacccccaccatcgaggacttccacagaaagttctacagcatcagaggcgaggtgtaccagctggacatcctggacaccagcggcaaccaccccttccccgccatgagaagactgagcatcctgaccggcgacgtgttcatcctggtgttcagcctggacaacagagacagcttcgaggaggtgcagagactgagacagcagatcctggacaccaagagctgcctgaagaacaagaccaaggagaacgtggacgtgcccctggtgatctgcggcaacaagggcgacagagacttctacagagaggtggaccagagagagatcgagcagctggtgggcgacgacccccagagatgcgcctacttcgagatcagcgccaagaagaacagcagcctggaccagatgttcagagccctgttcgccatggccaagctgcccagcgagatgagccccgacctgcacagaaaggtgagcgtgcagtactgcgacgtgctgcacaagaaggccctgagaaacaagaagctgctgagagccggcagcggcggcggcggcggcgaccccggcgacgccttcggcatcgtggcccccttcgccagaagacccagcgtgcacagcgacctgatgtacatcagagagaaggccagcgccggcagccaggccaaggacaaggagagatgcgtgatcagctag

SEQ ID NO: 189282 - DNA, 516 bp, Artificial Sequence
  derived and/or modified sequence
atgctgcacgccagatgctgcctgaaccagaagggcaccatcctgggcctggacctgcagaactgcagcctggaggaccccggccccaacttccaccaggcccacaccaccgtgatcatcgacctgcaggccaaccccctgaagggcgacctggccaacaccttcagaggcttcacccagctgcagaccctgatcctgccccagcacgtgaactgccccggcggcatcaacgcctggaacaccatcaccagctacatcgacaaccagatctgccagggccagaagaacctgtgcaacaacaccggcgaccccgagatgtgccccgagaacggcagctgcgtgcccgacggccccggcctgctgcagtgcgtgtgcgccgacggcttccacggctacaagtgcatgagacagggcagcttcagcctgctgatgttcttcggcatcctgggcgccaccaccctgagcgtgagcatcctgctgtgggccacccagagaagaaaggccaagaccagctag

SEQ ID NO: 189283 - DNA, 228 bp, Artificial Sequence
  derived and/or modified sequence
atgctgcacgccagatgctgcctgaaccagaagggcaccatcctgggcctggacctgcagaactgcagcctggaggaccccggccccaacttccaccaggcccacaccaccgtgatcatcgacctgcaggccaaccccctgaagggcgacctggccaacaccttcagaggcttcacccagctgcagaccctgatcctgccccagcacgtgaactgccccggcggctag

SEQ ID NO: 189284 - DNA, 516 bp, Artificial Sequence
  derived and/or modified sequence
atgctgcacgcccgctgttgcctaaaccaaaagggcacaatcttggggctggatctgcagaattgctcactggaggatcctggccccaactttcaccaggctcatactaccgtcatcatcgatctgcaggccaacccgttaaagggcgatctcgcaaacacattccgagggtttacacagctccagactttaatactgccacaacacgttaattgccctggagggatcaacgcctggaacactatcacctcatatatagacaatcaaatttgccagggtcagaagaatctgtgtaacaatacaggagatccagaaatgtgcccagaaaatgggtcatgcgtccccgatgggcctggacttcttcagtgcgtctgtgctgacggttttcatggctataagtgcatgagacagggttcattcagtctactgatgttcttcggcatcctcggcgcaactaccctgagcgtgagtatcctcctatgggccacacaacgtcggaaagctaaaacgagctag

SEQ ID NO: 189285 - DNA, 228 bp, Artificial Sequence
  derived and/or modified sequence
atgctccacgcccgctgctgtctcaaccagaagggcaccattctggggctggatctccagaactgcagtctcgaggatcccgggcccaatttccatcaagctcacacaacggtaattatcgacctccaggctaaccctcttaaaggcgatctggctaatacgttcagaggatttacacagttgcagacccttatcctaccgcagcatgttaactgtcctggaggctag

SEQ ID NO: 189286 - DNA, 516 bp, Artificial Sequence
  derived and/or modified sequence
atgctgcacgcccgctgctgcctgaaccagaagggcaccatcctgggcctggacctgcagaactgcagcctggaggaccccggccccaacttccaccaggcccacaccaccgtcatcatcgacctgcaggccaaccccctgaagggggacctggccaacaccttccggggcttcacccagctgcagaccctcatcctgccccagcacgtgaactgccctgggggcatcaatgcctggaacaccatcaccagctacatcgacaaccagatctgccagggccagaagaacctgtgcaacaacacaggagaccctgagatgtgcccagaaaatggcagctgtgtgcctgatggccctggcctgctgcagtgtgtgtgtgctgatggcttccacggctacaagtgcatgaggcagggcagcttcagcctgctgatgttcttcggcatcctgggcgccaccaccctgtctgtgtccatcctgctgtgggccacccagaggaggaaggccaagaccagctag

SEQ ID NO: 189287 - DNA, 228 bp, Artificial Sequence
  derived and/or modified sequence
atgctgcacgcccgctgctgcctgaaccagaagggcaccatcctgggcctggacctgcagaactgcagcctggaggaccccggccccaacttccaccaggcccacaccaccgtcatcatcgacctgcaggccaaccccctgaagggggacctggccaacaccttccggggcttcacccagctgcagaccctcatcctgccccagcacgtgaactgccctgggggctag

SEQ ID NO: 189288 - DNA, 516 bp, Artificial Sequence
  derived and/or modified sequence
atgctgcacgcccggtgctgcctgaaccagaagggcaccatcctgggcctggatctgcagaactgctctctggaggaccccgggccaaatttccaccaagcccatactaccgtgattattgatctgcaggcaaatccattaaaaggtgatctcgccaacacgtttagggggttcacccagttgcagacactcatattaccccagcacgtcaactgccccggcgggattaatgcctggaacacgattacgtcctacattgacaaccagatttgtcagggccagaagaatctgtgcaataataccggagatcctgagatgtgcccagaaaacggatcttgcgtcccagatggccctggtttacttcaatgtgtatgtgctgatgggttccatggatataaatgtatgcgccagggatcattctcacttctgatgtttttcggtatactcggagctaccacccttagcgtatctatcctcctctgggctacccagcgccgaaaggcaaaaacaagctag

SEQ ID NO: 189289 - DNA, 228 bp, Artificial Sequence
  derived and/or modified sequence
atgctgcacgcccggtgctgcctgaaccagaagggcaccatcctgggactggatttgcagaactgctccctagaggatccagggcctaacttccaccaagcacatacaacagtcattattgacttgcaagcaaatccactaaagggcgaccttgccaatacattcagaggctttacccagctgcagacattgatccttccacagcacgtcaactgccctgggggatag

SEQ ID NO: 189290 - DNA, 516 bp, Artificial Sequence
  derived and/or modified sequence
atgttacatgctcgctgctgccttaatcagaaagggactattttggggctggacctgcagaactgctccttagaggaccccggaccaaatttccaccaagcccacaccacagtcatcattgacctacaggcaaatccactgaaaggggacttagccaatacatttcgcggatttactcaattgcagaccttgatactcccacagcacgttaattgtccagggggaattaatgcctggaacacgattactagttacatcgacaaccagatttgccaggggcagaagaatctttgtaataacactggagatcccgagatgtgtcccgagaatggatcatgcgtccctgatggtcctggtctattacagtgtgtgtgtgcagatgggttccatggctacaagtgtatgaggcaggggagtttttccctcctgatgtttttcggcatcctcggcgctaccactctatcagtgagcattctgttgtgggctacacaaagacgtaaggctaagacaagctag

SEQ ID NO: 189291 - DNA, 228 bp, Artificial Sequence
  derived and/or modified sequence
atgcttcacgctcggtgctgtctgaaccagaagggtacaatactcgggctcgacctgcagaattgttcactggaggacccaggtccgaatttccaccaggcacacaccacggtcattatcgatctgcaagcgaatccgctgaaaggagacttggcaaatactttccggggtttcacccagctgcagacccttatcctgccccagcacgtcaattgccccggtggatag

SEQ ID NO: 189292 - protein, 355 aa, Artificial Sequence
  derived and/or modified sequence
MQLTTCLRETLFTGASQKTSLWWLGIASFGVPEKLGCANLPLNSRQKELCKRKPYLLPSIREGARLGIQECGSQFRHERWNCMITAAATTAPMGASPLFGYELSSGTKETAFIYAVMAAGLVHSVTRSCSAGNMTECSCDTTLQNGGSASEGWHWGGCSDDVQYGMWFSRKFLDFPIGNTTGKENKVLLAMNLHNNEAGRQAVAKLMSVDCRCHGVSGSCAVKTCWKTMSSFEKIGHLLKDKYENSIQISDKTKRKMRRREKDQRKIPIHKDDLLYVNKSPNYCVEDKKLGIPGTQGRECNRTSEGADGCNLLCCGRGYNTHVVRHVERCECKFIWCCYVRCRRCESMTDVHTCK

SEQ ID NO: 189293 - protein, 87 aa, Artificial Sequence
  derived and/or modified sequence
CKRKPYLLPSIREGARLGIQECGSQFRHERWNCMITAAATTAPMGASPLFGYELSSGCRQVDVSRLPLPRSFRLLCCENMLENHVFF

SEQ ID NO: 189294 - DNA, 1068 bp, Artificial Sequence
  derived and/or modified sequence
atgcagctgacaacctgcttgagagaaactctgtttaccggcgcatcacagaaaacgtctctttggtggctggggatcgcgtcttttggcgtgcccgaaaagctgggttgtgccaacctgccacttaatagcagacaaaaggagctttgcaagcgcaaaccctatttgctcccaagcatccgcgaaggggctagactgggcatacaagaatgcggcagccaatttcgacatgaacgatggaactgtatgattacagctgctgccacaacagctccaatgggtgcgagtccattatttggatacgagctgtcctctggtaccaaggaaactgccttcatctacgctgtgatggctgctggtctggtccattctgtcacacgcagttgtagcgctggtaatatgaccgaatgtagttgtgataccactctacagaatggaggatccgctagcgaaggttggcactggggtggctgttccgacgacgtgcagtatggaatgtggttcagccgtaagtttttggatttccctatcggaaatactaccggaaaggaaaacaaggtgcttttggcaatgaacttacataacaacgaggccggtaggcaagccgtggctaaactcatgagcgtcgactgccgttgtcacggggtttcggggagctgtgccgttaagacatgctggaaaactatgtcctcgttcgaaaagattggccacctgctgaaggacaaatatgagaatagtattcaaatctccgataagaccaagcgcaaaatgagaagaagggaaaaggatcagagaaagattcccattcataaagacgatttgttgtacgtgaataaaagtccaaactactgcgtggaggacaaaaaactagggattcccggtacccagggacgcgagtgtaacaggaccagtgaaggagctgatgggtgtaaccttctgtgttgcgggcgtggctataatacccacgttgtgcgtcatgtggagcgatgcgagtgcaaattcatctggtgttgctacgtacgctgcaggagatgcgagtcaatgacagacgtgcacacatgcaaatag

SEQ ID NO: 189295 - DNA, 264 bp, Artificial Sequence
  derived and/or modified sequence
tgtaagcgaaagccgtacctgctgccaagtattagagagggcgctcgtttgggcatacaggagtgtgggagtcagtttcggcatgagcggtggaactgtatgataactgctgctgcaacaacagcccctatgggggcaagccctttgttcggatacgagttgtcctcaggctgccgccaggtggacgtgtctcggttgccgctaccgagatcgtttcgccttctgtgctgcgagaacatgcttgagaatcatgtgtttttttag

SEQ ID NO: 189296 - DNA, 935 bp, Artificial Sequence
  derived and/or modified sequence
tgcaaaagaggagcggctgggctgggggactccatgcgggggcgatggacagggcggcgctcctgggactggcccgcttgtgcgcgctgtgggcagccctgctcgtgctgttcccctacggagcccaaggaaactggatgtggttgggcattgcctccttcggggttccagagaagctgggctgcgccaatttgccgctgaacagccgccagaaggagctgtgcaagaggaaaccgtacctgctgccgagcatccgagagggcgcccggctgggcattcaggagtgcgggagccagttcagacacgagagatggaactgcatgatcaccgccgccgccactaccgccccgatgggcgccagccccctctttggctacgagctgagcagcggctgtcgccaagttgatgtcagtagactgccgctgccacggagtttccggctcctgtgctgtgaaaacatgctggaaaaccatgtcttcttttgaaaagattggccatttgttgaaggataaatatgaaaacagtatccagatatcagacaaaacaaagaggaaaatgcgcaggagagaaaaagatcagaggaaaataccaatccataaggatgatctgctctatgttaataagtctcccaactactgtgtagaagataagaaactgggaatcccagggacacaaggcagagaatgcaaccgtacatcagagggtgcagatggctgcaacctcctctgctgtggccgaggttacaacacccatgtggtcaggcacgtggagaggtgtgagtgtaagttcatctggtgctgctatgtccgttgcaggaggtgtgaaagcatgactgatgtccacacttgcaagtaaccactccatccagccttgggcaagatgcctcagcaatatacaatggcattgcaaccagagaggtgcccatccctgtgcag

SEQ ID NO: 189297 - DNA, 1068 bp, Artificial Sequence
  derived and/or modified sequence
atgcagctcactacatgtctgcgggaaactctcttcaccggcgccagtcaaaagacatccctgtggtggctgggaatcgcttccttcggagtgccagaaaagctgggttgcgccaatttgcccttaaacagccgacaaaaggaattgtgtaagcgtaagccgtacctgctcccatctattagggaaggggctaggttggggatacaggagtgtgggtcacaatttagacatgagcgatggaattgcatgataacagcagccgctactaccgctccgatgggggccagtcctctgttcggttatgagctctccagcggcactaaggaaactgcgtttatctacgctgttatggccgcagggctggtccactcagtaactcgctcatgctccgcaggtaacatgaccgagtgctcatgcgacacaacactccagaacgggggaagtgccagcgaaggctggcactggggggggtgctctgatgatgtccaatacggcatgtggtttagtaggaaatttctagatttcccaatcggtaatacaactggtaaggagaataaagtactgttagctatgaacttacataataacgaagctggccggcaagccgtggctaaactaatgagcgttgattgccgatgccacggcgtgagcggctcctgcgcagtgaagacctgttggaagaccatgtctagcttcgaaaaaataggacacttgctcaaagataaatatgaaaactctattcaaatttccgataaaactaagcgtaagatgcgaagaagagaaaaagaccagagaaagatcccgatccataaagacgacttgctgtatgtgaacaagtctcctaactactgcgtggaggacaagaaattgggaattccgggtacacaggggcgggaatgtaacaggaccagcgaaggggctgacgggtgtaatcttttgtgttgcggtagagggtataatacgcatgtcgtccggcacgtggaaagatgcgaatgtaaatttatttggtgctgctacgtcagatgtcgcagatgcgagtctatgactgacgtccatacctgtaaatag

SEQ ID NO: 189298 - DNA, 264 bp, Artificial Sequence
  derived and/or modified sequence
tgcaaaagaaaaccctacctccttccatccatccgagagggcgccaggctgggcatccaggaatgcggatcacagtttcgccatgagagatggaactgtatgatcaccgccgccgctacaacagccccaatgggagcttccccgttattcggctatgaactgtcgtccggctgccgccaagtagacgtgtctcgattaccccttcctcgctcctttcgtctcctttgttgtgaaaacatgctagagaatcatgtcttcttctag

SEQ ID NO: 189299 - DNA, 1068 bp, Artificial Sequence
  derived and/or modified sequence
atgcagctcactacttgcctgagagaaactctctttaccggggcatcccagaaaacaagcctttggtggctgggtatcgccagtttcggagtacctgagaaattgggatgcgctaacctcccacttaactcccgccaaaaagaactctgcaaaagaaaaccctacctcctacctagcattcgggaaggcgcccgtctcggcatccaagaatgtggcagccaattccggcatgagcggtggaattgtatgattactgcggccgctactacagctccaatgggcgcgtcaccactctttggatatgagttgtcctccggtaccaaagagaccgcctttatttacgctgttatggccgccgggcttgtgcattcagtaactagaagttgtagcgctggcaacatgaccgaatgcagctgcgatactacactgcagaatggcggctccgcgtccgaaggctggcactggggaggttgttcagacgatgtgcagtacggaatgtggttctctagaaagtttttggatttccccatcggcaacaccacaggcaaagagaataaagtattgttggccatgaatctacacaataatgaggcaggccgtcaggcagtggctaagcttatgtcagttgattgtaggtgccatggagttagcggatcgtgcgcggtgaagacatgttggaagaccatgtcctccttcgagaaaattggacatctcctgaaggataaatatgaaaattctatccaaatttccgacaagacaaaacgcaagatgagaagacgcgaaaaggaccagaggaagatacccattcataaggacgaccttctgtacgtgaataaaagtcccaactattgcgtggaggataaaaaattggggatacctggaacacagggaagagagtgtaatagaacaagcgaaggagcagacggctgtaatctcttgtgttgcggtaggggttacaacacccatgtagtgagacacgtagaaagatgcgaatgtaagtttatttggtgttgctatgtgaggtgcagaagatgtgaaagcatgacagacgtgcatacgtgtaagtag

SEQ ID NO: 189300 - DNA, 1068 bp, Artificial Sequence
  derived and/or modified sequence
atgcagctgaccacctgcctgagagagaccctgttcaccggcgccagccagaagaccagcctgtggtggctgggcatcgccagcttcggcgtgcccgagaagctgggctgcgccaacctgcccctgaacagcagacagaaggagctgtgcaagagaaagccctacctgctgcccagcatcagagagggcgccagactgggcatccaggagtgcggcagccagttcagacacgagagatggaactgcatgatcaccgccgccgccaccaccgcccccatgggcgccagccccctgttcggctacgagctgagcagcggcaccaaggagaccgccttcatctacgccgtgatggccgccggcctggtgcacagcgtgaccagaagctgcagcgccggcaacatgaccgagtgcagctgcgacaccaccctgcagaacggcggcagcgccagcgagggctggcactggggcggctgcagcgacgacgtgcagtacggcatgtggttcagcagaaagttcctggacttccccatcggcaacaccaccggcaaggagaacaaggtgctgctggccatgaacctgcacaacaacgaggccggcagacaggccgtggccaagctgatgagcgtggactgcagatgccacggcgtgagcggcagctgcgccgtgaagacctgctggaagaccatgagcagcttcgagaagatcggccacctgctgaaggacaagtacgagaacagcatccagatcagcgacaagaccaagagaaagatgagaagaagagagaaggaccagagaaagatccccatccacaaggacgacctgctgtacgtgaacaagagccccaactactgcgtggaggacaagaagctgggcatccccggcacccagggcagagagtgcaacagaaccagcgagggcgccgacggctgcaacctgctgtgctgcggcagaggctacaacacccacgtggtgagacacgtggagagatgcgagtgcaagttcatctggtgctgctacgtgagatgcagaagatgcgagagcatgaccgacgtgcacacctgcaagtag

SEQ ID NO: 189301 - DNA, 264 bp, Artificial Sequence
  derived and/or modified sequence
tgcaagagaaagccctacctgctgcccagcatcagagagggcgccagactgggcatccaggagtgcggcagccagttcagacacgagagatggaactgcatgatcaccgccgccgccaccaccgcccccatgggcgccagccccctgttcggctacgagctgagcagcggctgcagacaggtggacgtgagcagactgcccctgcccagaagcttcagactgctgtgctgcgagaacatgctggagaaccacgtgttcttctag

SEQ ID NO: 189302 - DNA, 1068 bp, Artificial Sequence
  derived and/or modified sequence
atgcagctcacgacctgcctgagagagaccctctttaccggcgcctcacagaaaaccagcctctggtggctgggcattgcaagtttcggggtgccggaaaagcttggttgcgccaacctgcctctcaacagccgacagaaagagctgtgtaagaggaagccctaccttctgccctctattcgcgagggcgctcggctgggtatacaagagtgcggctcacagtttcgacatgaaaggtggaattgcatgatcactgcagccgcgaccaccgccccgatgggtgcctcgccccttttcggctacgagctctcaagtgggacaaaagaaaccgcctttatatatgccgtgatggcagccggactggttcacagtgtcaccagaagctgcagtgccggcaacatgaccgaatgcagctgcgacacaaccctgcagaatggggggtccgctagtgagggatggcattggggaggttgctctgatgatgttcagtacggaatgtggttcagcaggaagttcctagacttccctattggtaacactaccggcaaggagaacaaggtgctgttggcaatgaacctgcataacaatgaggcggggcggcaggctgtcgccaaactgatgagcgtcgactgtaggtgtcatggtgtctctgggagttgcgctgttaaaacctgctggaagaccatgagcagcttcgagaaaatcggccacctgctcaaggacaaatacgaaaatagtattcagatctccgataagaccaagcggaagatgagacggcgcgaaaaggatcaaaggaagatacctattcacaaggacgaccttctctacgtgaataagtccccaaattactgtgtggaggacaaaaaactgggtattccaggcacccagggcagggagtgcaaccgaacatcggaaggggccgacggctgcaatcttctctgttgcggacgcgggtacaacactcacgtggtcagacatgtcgaacggtgtgagtgcaagtttatatggtgctgctacgtccggtgccggcgatgcgaatccatgaccgatgtccatacctgcaagtag

SEQ ID NO: 189303 - DNA, 264 bp, Artificial Sequence
  derived and/or modified sequence
tgcaaacgaaaaccttatctcctgcccagcatcagagagggagcgcgcctgggaatacaagaatgcggcagtcaatttagacacgagcgttggaactgcatgatcactgcagccgcaaccactgcacccatgggagcatcccccctcttcgggtatgaattgagttccggatgcagacaggtagacgtctctcggctgccacttccacgaagctttcgcctgttgtgttgcgagaatatgctggagaatcacgtatttttttag

SEQ ID NO: 189304 - DNA, 1230 bp, Artificial Sequence
  derived and/or modified sequence
agcctgcaaaaaccacagagggcaaagccagaaagatggaaaggcacccatgcagctcaccacttgcctcagggagaccctcttcacaggggcttctcaaaagacctccctatggtggttgggcattgcctccttcggggttccagagaagctgggctgcgccaatttgccgctgaacagccgccagaaggagctgtgcaagaggaaaccgtacctgctgccgagcatccgagagggcgcccggctgggcattcaggagtgcgggagccagttcagacacgagagatggaactgcatgatcaccgccgccgccactaccgccccgatgggcgccagccccctctttggctacgagctgagcagcggcaccaaagagacagcatttatttatgctgtgatggctgcaggcctggtgcattctgtgaccaggtcatgcagtgcaggcaacatgacagagtgttcctgtgacaccaccttgcagaacggcggctcagcaagtgaaggctggcactgggggggctgctccgatgatgtccagtatggcatgtggttcagcagaaagttcctagatttccccatcggaaacaccacgggcaaagaaaacaaagtactattagcaatgaacctacataacaatgaagctggaaggcaggctgtcgccaagttgatgtcagtagactgccgctgccacggagtttccggctcctgtgctgtgaaaacatgctggaaaaccatgtcttcttttgaaaagattggccatttgttgaaggataaatatgaaaacagtatccagatatcagacaaaacaaagaggaaaatgcgcaggagagaaaaagatcagaggaaaataccaatccataaggatgatctgctctatgttaataagtctcccaactactgtgtagaagataagaaactgggaatcccagggacacaaggcagagaatgcaaccgtacatcagagggtgcagatggctgcaacctcctctgctgtggccgaggttacaacacccatgtggtcaggcacgtggagaggtgtgagtgtaagttcatctggtgctgctatgtccgttgcaggaggtgtgaaagcatgactgatgtccacacttgcaagtaaccactccatccagccttgggcaagatgcctcagcaatatacaatggcattgcaaccagagaggtgcccatccctgtgcagcgctagtaaagttgactcttgcagtggaatccc

SEQ ID NO: 189305 - DNA, 1068 bp, Artificial Sequence
  derived and/or modified sequence
atgcagctgaccacctgcctgcgggagaccctcttcaccggggccagccagaagaccagcctgtggtggctgggcatcgccagctttggagtgcctgagaagctgggctgtgccaacctgcccctgaacagccggcagaaggagctgtgcaagaggaagccctacctgctgcccagcatccgggagggcgcccggctgggcatccaggagtgtggcagccagttcagacatgagcgctggaactgcatgatcacagctgctgccaccacagcccccatgggcgccagccccctgtttggctatgagctgagcagcggcaccaaggagacagccttcatctatgctgtgatggctgctggcctggtgcacagcgtgaccaggagctgcagcgctggcaacatgacagagtgcagctgtgacaccaccctgcagaatggaggcagcgccagcgagggctggcactggggcggctgcagtgatgatgtgcagtatggcatgtggttcagcaggaagttcctggacttccccatcggcaacaccaccgggaaggagaacaaggtgctgctggccatgaacctgcacaacaatgaggccggccggcaggccgtggccaagctgatgtctgtggactgccgctgccacggcgtgtctggcagctgtgctgtgaagacctgctggaagaccatgagcagctttgagaagattggccacctgctgaaggacaagtatgagaacagcatccagatcagtgacaagaccaagaggaagatgagaagaagagagaaggaccagaggaagatccccatccacaaggatgacctgctgtatgtgaacaagagccccaactactgtgtggaggacaagaagctgggcatccctggcacccagggccgggagtgcaacagaaccagcgagggcgcagatggctgcaacctgctgtgctgcggccggggctacaacacccacgtggtgcgccacgtggagcgctgtgagtgcaagttcatctggtgctgctacgtgcgctgcagaagatgtgagagcatgacagatgtgcacacctgcaagtag

SEQ ID NO: 189306 - DNA, 264 bp, Artificial Sequence
  derived and/or modified sequence
tgcaagaggaagccctacctgctgcccagcatccgggagggcgcccggctgggcatccaggagtgtggcagccagttcagacatgagcgctggaactgcatgatcacagctgctgccaccacagcccccatgggcgccagccccctgtttggctatgagctgagcagcggctgccggcaggtggatgtgtcccggctgcccctgcccaggagcttccggctgctgtgctgtgagaacatgctggagaaccacgtgttcttctag

SEQ ID NO: 189307 - DNA, 1068 bp, Artificial Sequence
  derived and/or modified sequence
atgcagctgaccacctgcctgcgggagaccctgttcaccggcgcctctcagaaaacatccctgtggtggttgggaatagcatcttttggcgtgcctgaaaaactgggatgcgccaacctacctctcaatagtagacagaaggaactctgcaagcggaaaccctatctcttaccatctattcgcgagggggccaggctcggcattcaggagtgtggctcacaatttagacatgagcgctggaactgcatgatcaccgctgccgcgactactgcaccgatgggggccagtccactgttcggctatgaactctcctccggaactaaagaaaccgcctttatatacgccgtgatggcagccgggctggttcattccgtcactcgatcttgctcagccgggaatatgacagagtgctcgtgtgataccaccctgcagaatggtgggtcagcttctgaggggtggcattggggagggtgtagcgacgatgtccagtacggcatgtggttttcaagaaaatttcttgactttcccatcggaaataccaccggcaaagagaataaggtcctgctggctatgaatctccacaacaatgaggccggcaggcaggccgttgcgaagctcatgtccgtagactgccggtgtcacggtgtgagcggctcgtgtgccgtgaagacctgctggaagacgatgtccagctttgagaaaatcgggcacttgctaaaggataagtatgagaacagcatacagatttcagataagaccaagcgcaagatgcgaagacgggagaaagaccaacgtaagatcccaattcataaggacgatctgctgtacgtcaacaaatcccccaactactgcgtagaagataaaaagctgggcatccctggaactcaaggacgcgagtgtaacagaacatctgaaggtgcggacgggtgtaacctgctctgttgcggtcgggggtacaatactcacgttgttcggcacgtggaaaggtgtgagtgtaagttcatctggtgctgctatgtaaggtgccgccggtgtgaatctatgacggatgttcacacctgtaaatag

SEQ ID NO: 189308 - DNA, 264 bp, Artificial Sequence
  derived and/or modified sequence
tgcaagcggaagccctacctgctgcccagcatccgggagggcgccaggctgggtatccaggagtgcggaagccagttccgccatgagcggtggaattgcatgataaccgctgcagccacgaccgccccgatgggtgcctcacctctttttggctatgaactgagctcaggatgtaggcaggtcgatgtgtctcgcttgccactgccgcggagttttcgattactatgctgcgagaacatgctcgagaatcatgtgtttttctag

SEQ ID NO: 189309 - RNA, 1068 nt, Artificial Sequence
  derived and/or modified sequence
augcagcucacuacaugucugcgggaaacucucuucaccggcgccagucaaaagacaucccugugguggcugggaaucgcuuccuucggagugccagaaaagcuggguugcgccaauuugcccuuaaacagccgacaaaaggaauuguguaagcguaagccguaccugcucccaucuauuagggaaggggcuagguuggggauacaggagugugggucacaauuuagacaugagcgauggaauugcaugauaacagcagccgcuacuaccgcuccgaugggggccaguccucuguucgguuaugagcucuccagcggcacuaaggaaacugcguuuaucuacgcuguuauggccgcagggcugguccacucaguaacucgcucaugcuccgcagguaacaugaccgagugcucaugcgacacaacacuccagaacgggggaagugccagcgaaggcuggcacuggggggggugcucugaugauguccaauacggcaugugguuuaguaggaaauuucuagauuucccaaucgguaauacaacugguaaggagaauaaaguacuguuagcuaugaacuuacauaauaacgaagcuggccggcaagccguggcuaaacuaaugagcguugauugccgaugccacggcgugagcggcuccugcgcagugaagaccuguuggaagaccaugucuagcuucgaaaaaauaggacacuugcucaaagauaaauaugaaaacucuauucaaauuuccgauaaaacuaagcguaagaugcgaagaagagaaaaagaccagagaaagaucccgauccauaaagacgacuugcuguaugugaacaagucuccuaacuacugcguggaggacaagaaauugggaauuccggguacacaggggcgggaauguaacaggaccagcgaaggggcugacggguguaaucuuuuguguugcgguagaggguauaauacgcaugucguccggcacguggaaagaugcgaauguaaauuuauuuggugcugcuacgucagaugucgcagaugcgagucuaugacugacguccauaccuguaaauag

SEQ ID NO: 189310 - RNA, 264 nt, Artificial Sequence
  derived and/or modified sequence
ugcaaaagaaaacccuaccuccuuccauccauccgagagggcgccaggcugggcauccaggaaugcggaucacaguuucgccaugagagauggaacuguaugaucaccgccgccgcuacaacagccccaaugggagcuuccccguuauucggcuaugaacugucguccggcugccgccaaguagacgugucucgauuaccccuuccucgcuccuuucgucuccuuuguugugaaaacaugcuagagaaucaugucuucuucuag

SEQ ID NO: 189311 - RNA, 1068 nt, Artificial Sequence
  derived and/or modified sequence
augcagcucacuacuugccugagagaaacucucuuuaccggggcaucccagaaaacaagccuuugguggcuggguaucgccaguuucggaguaccugagaaauugggaugcgcuaaccucccacuuaacucccgccaaaaagaacucugcaaaagaaaacccuaccuccuaccuagcauucgggaaggcgcccgucucggcauccaagaauguggcagccaauuccggcaugagcgguggaauuguaugauuacugcggccgcuacuacagcuccaaugggcgcgucaccacucuuuggauaugaguuguccuccgguaccaaagagaccgccuuuauuuacgcuguuauggccgccgggcuugugcauucaguaacuagaaguuguagcgcuggcaacaugaccgaaugcagcugcgauacuacacugcagaauggcggcuccgcguccgaaggcuggcacuggggagguuguucagacgaugugcaguacggaaugugguucucuagaaaguuuuuggauuuccccaucggcaacaccacaggcaaagagaauaaaguauuguuggccaugaaucuacacaauaaugaggcaggccgucaggcaguggcuaagcuuaugucaguugauuguaggugccauggaguuagcggaucgugcgcggugaagacauguuggaagaccauguccuccuucgagaaaauuggacaucuccugaaggauaaauaugaaaauucuauccaaauuuccgacaagacaaaacgcaagaugagaagacgcgaaaaggaccagaggaagauacccauucauaaggacgaccuucuguacgugaauaaaagucccaacuauugcguggaggauaaaaaauuggggauaccuggaacacagggaagagaguguaauagaacaagcgaaggagcagacggcuguaaucucuuguguugcgguagggguuacaacacccauguagugagacacguagaaagaugcgaauguaaguuuauuugguguugcuaugugaggugcagaagaugugaaagcaugacagacgugcauacguguaaguag

SEQ ID NO: 189312 - protein, 266 aa, Artificial Sequence
  derived and/or modified sequence
MGAAAAEADRTLFVGNLETKVTEELLFELFHQAGPVIKVKIPKDKDGKPKQFAFVNFKHEVSVPYAMNLLNGIKLYGRPIKIQFRSGSSHAPQDVSLSYPQHHVGNSSPTSTSPSRYERTMDNMTSSAQIIQRSFSSPENFQRQAVMNSALRQMSYGGKFGSSPLDQSGFSPSVQSHSHSFNQSSSSQWRQGTPSSQRKVRMNSYPYLADRHYSREQRYTDHGSDHHYRGKRDDFFYEDRNHDDWSHDYDNRRDSSRDGKWRSSRH

SEQ ID NO: 189313 - DNA, 4243 bp, Artificial Sequence
  derived and/or modified sequence
agatcgggttcaacggcagggattgggtaaggtgagaatctggcttggcggctccggccccggccatctggttcccttgggctccggccgccaccatccactcgacggctctcggcccgaacgcttggtcgcaccgcctgccgaggtcctagatgaatcgcttcaggcctggaaacgaggaagccgtctccggagaccatcgccaacgctgacgcccgcggtctgaggtcgccatgggaagagcggtaggccaccctgctcctctgatcaccggaggacagggacacattgttcagggccatattcaaacactgcccgcagtacttgcgttacgtccctttgtgaaggcaggcccttcgcggctccccagatcagtccagcctgtgtcggacccgatgactaagcacacaggaacccataactgagcctgcggaagagccagaagccgccttgcctttaacgaggggtatcctggcgagcatgcgcagaccgtccgcgcacgtcgtcgcccgctgagagcaagcgcaacgggcgttttcgtttgtgacgccagggagcgtgaggacgtggggcttccgtgaatgcgcagtgggtgcgtcggccacgaccttttggccaggttagggagggggcgacgctgagatgggggcggcggcggcggaagcggatcgcactctctttgtgggcaaccttgaaacgaaagtgaccgaggagctccttttcgagcttttccaccaggctgggccagtaataaaggtgaaaattccaaaagataaggatggtaaaccaaagcagtttgcgtttgtgaatttcaaacatgaagtgtctgttccttatgcaatgaatctacttaatggaatcaaactttatggaaggcctatcaaaattcaatttagatcaggaagtagtcatgccccacaagatgtcagtttgtcatatccccaacatcatgttggaaattcaagccctacctccacatctcctagcaggtacgaaaggactatggataacatgacttcatcagcacagataattcagagatctttctcttctccagaaaattttcagagacaagcagtgatgaacagtgctttgagacaaatgtcatatggtggaaaatttggttcttcacctctggatcaatcaggattttcaccatcagttcaatcacacagtcatagtttcaatcagtcttcaagctcccagtggcgccaaggtacaccatcatcacagcgtaaagtcagaatgaattcttatccctacctagcagatagacattatagccgggaacagcgttacactgatcatgggtctgaccatcattacagaggaaagagagatgatttcttctatgaagacaggaatcatgatgactggagccatgactatgataacagaagagacagtagtagagatggaaaatggcgctcatctcgacactaacacatgttaaaaggacattgtttttatagggtcattttaggccctttgactaagttgatatggaaatattttgttgaaaaactgtacagagcagctttacaagttgtcacatttctttataaatttttttaaagctacagtttaatacaaaatgaattgcggttttattacattaataacctttcacctcagggttttatgaagaggaaagggttttatgcaaaagaaagtgctacaattcctaatcattttagacactttaggagggggtgaagttgtatgataaagcagatattttaattatttgttatctttttgtattgcaagaaatttcttgctagtgaatcaagaaaacatccaggttgacagtctaaaatggctactggtattttagttaattcaaaaatgaaacttttcagtgattcactttactaacattctatttgagaaggcttattggtaaagtttggggataaaggcattgcttaacttcttatataatttaggtataaattctgtgacatgctcttgagctttaccctagttgaacatacatgtgtagatttacacatactgtttcattctaaaatttagaaattgttcattaaatcccatttgaggtataagtcactcaggaagttaaaatatctctacacgtatatttttacattaaaaatacagtgttagcataaatccccttttcaggaagaacaaaaatgtcagtgcatagttagataaaatggtaaaatgttttactgaaagcatacttttttggaaaatagattcatgaagcctttaagtgctgcttctgtcagtcaaacgttaaaaactttaacattttcaaagtgcccagactgtgtacaaagacacatgtaatggagattgtacaggttgtttttttgtttgaacctttgaaagagtttaatcttaacgttttctaattttaaaattttaaaatcttgtttaacaaaagcttgtattaagatactgttttcatttcattacagaattgtttataaaagttcatttgttgaaaaataaggatcctttttaataccacagcatttgtactgttcctttttaatatactgaaaatataaaaggaagggtgtgtgttatttttttttttttatgtcactgacttcagagacattgtacacaaagaattaacatacttttattcactgattgcctgctgtttagaatatcagttctttaattttgagcatcctgaaatacatcttttgtacatatagagcatgatgtttcacaatcagattttcagtgacccctcgattatagcttggagtactttagttaccctcagtggtctctaggagttaaagtacacttagatttcctgtttataaatgaattcagtttttctgtttctaagtaaatgtagctattcaactactcactatagaattaagataaacaatttgtttgcttaagcattttcacagaatttgtttccaatgagattattatttttgggtatcttatccatatgaaaacttagtaggtttgtagatgttaacgaagattaatactgcatgtttgtttttgttttttttttgagacagagtcttgctacgacacccaggctagagtgcaatggcgggatctcaggtcactgcaacctccatatcccgggttcaagtgattctcctgccttagcctcccgagtagctgggattacaggcacccaccaccacgcctggctagtttttgtatttttagtagagatggggtttcaccacattggccaggctggtctcaaactcctgacctcaagtgatccacctaccttggcctaccgaggtgctggaattacaggtgtgagccaccgcgcctggcctaatactgctttattacaacgttatctgtgggtcggatccttttatattggttaacagatgaccctgactcagaataatctttttcaatggctttttgagggaagcttgtgaagttctggtgaatcttctttttcacttcactttcagtgagctgaaagtaaccaaactaaatacatgtattgtgtaaagggacaggacaagacagccttaaaaaattgaatatagttggtgagacaactcagaagtacaggtttgagcatcccttattcaaaatgcttgagaagtgttttgggttctggaatatttgcattaatgcttgccagttgagcatcccaggtccggaaatccacagtgctccaatgagcctttcccctgagtgtcacatctgtattggcactcaaaaagtttcatattttggagcatttcagatttcagatttgggatgcttcatctatattgacagctgcaagaacagaaaggaagaagagattatttttgtgggagaacagtttctcccatagtgtttcctgtggaatgctagtgtctcataaagtcttctaaaaaaaagaaaaaaaaaatcaaatgtttggaagccattttgtgttactgtgtgactttcttttactcaaaaacagcaccataaaatttctgacaagtactataggtaaagaaatccctttatacttaacctagtattttctacctttccccatctaaaataaaatttttataccactttctaattatgttgtgtgtgcccactttccccatacctactgctaccatcttagagtaggcaattttctcaagaggattattccaagaacaccctaatgttttcctgcttccagtcttctttcctcaaatttattccacactcttaagaattgaagatgtaaatctgtcactcgcctgaataaagcttcagtggcctctga

SEQ ID NO: 189314 - DNA, 801 bp, Artificial Sequence
  derived and/or modified sequence
atgggggccgctgccgctgaagccgacagaacgctgtttgtgggtaatttagagacaaaagttactgaagagctattgttcgaacttttccatcaggctggcccagtgataaaggtgaagataccaaaggataaagacggtaagcctaagcagttcgctttcgtcaatttcaaacacgaggtgagtgtcccgtacgcaatgaacctgcttaacggtatcaagttatacgggagacccattaagatccagttccgatctggttctagccatgcccctcaggacgttagtctgagctatccccagcatcatgtgggaaattcttctcctactagtactagcccaagtagatacgagaggaccatggacaacatgacctctagtgctcagataattcagcgaagcttcagctctccagaaaatttccagaggcaggcagtgatgaactccgctctgaggcaaatgagctatgggggaaagtttggctccagtcctctggaccagagtggcttttccccgtccgtgcagagccacagccatagctttaaccagtcttctagttcgcagtggcgccaagggacgcctagtagtcagagaaaagtcagaatgaatagctacccttacttagccgacagacactactcccgtgagcaaaggtataccgaccatggtagcgaccatcactatagagggaagcgggacgatttcttttacgaggaccggaaccatgatgattggtcccacgactacgacaatcgacgagactcaagcagagacgggaaatggagatcaagtagacactag

SEQ ID NO: 189315 - DNA, 801 bp, Artificial Sequence
  derived and/or modified sequence
atgggcgctgctgctgctgaggccgacaggaccctgtttgtgggcaacctggagaccaaggtgacagaggagctgctgtttgagctgttccaccaggccggccctgtgatcaaggtgaagatccccaaggacaaggatggcaagcccaagcagtttgcctttgtgaacttcaagcatgaggtgtctgtgccctatgccatgaacctgctgaatggcatcaagctgtatggccggcccatcaagatccagttccgcagcggcagcagccacgccccccaggatgtgtccctgagctacccccagcaccacgtgggcaacagcagccccaccagcaccagccccagccgctatgaaagaaccatggacaacatgaccagcagcgcccagatcatccagaggagcttcagcagccctgagaacttccagaggcaggccgtgatgaacagcgccctgcggcagatgtcctatggaggcaagtttggcagcagccccctggaccagagcggcttcagccccagcgtgcagagccacagccacagcttcaaccagagcagcagcagccagtggaggcagggcacccccagcagccagaggaaggtgaggatgaacagctacccctacctggccgacagacactacagccgggagcagcgctacacagaccacggcagtgaccaccactaccggggcaagagagatgacttcttctatgaggacaggaaccatgatgactggagccatgactatgacaacagaagagacagcagcagagatggcaagtggaggagcagccgccactag

SEQ ID NO: 189316 - DNA, 801 bp, Artificial Sequence
  derived and/or modified sequence
atgggcgccgccgccgccgaggccgaccggaccctgttcgtgggcaatctggaaactaaagtgacagaggaactcctattcgagttgtttcatcaggccgggccagtgatcaaggtgaaaattcccaaagacaaggacggcaagcccaaacagtttgccttcgtcaacttcaagcacgaggtgtctgtgccctacgccatgaacctgttgaacggcatcaaactgtacgggagacccatcaaaatccagtttagatcagggtctagccacgctccgcaggacgtttcattaagttaccctcagcaccatgtaggtaatagtagcccaactagcacctcacctagccgctacgagaggaccatggataacatgacttcgtccgcccagattatccagagaagcttcagtagccctgagaattttcagcgacaggccgtcatgaatagtgcactgcggcagatgagctacggaggcaaatttggaagctccccactggatcagtctgggttctccccgtcagtgcagagtcatagccactcttttaaccaatcctcatctagtcagtggcggcagggcactccctcttcgcagcgcaaagtgaggatgaactcctacccatatttggctgatcggcactactcccgagagcagcgctataccgatcacggatccgaccaccactataggggaaagagagatgacttcttctatgaggacagaaaccacgacgactggtcacatgattacgacaacaggcgcgattctagtcgggatgggaagtggaggagtagccggcattag

SEQ ID NO: 189317 - DNA, 801 bp, Artificial Sequence
  derived and/or modified sequence
atgggggctgccgctgctgaggcagaccgaaccctgttcgtgggcaacctggaaacaaaagtgaccgaagaactcctattcgaactttttcatcaggccggtcctgtcatcaaggtgaagattccaaaggataaggacggaaagcccaagcagttcgcattcgtcaattttaaacatgaagtcagtgttccttacgccatgaaccttctgaacggaatcaaactgtatggtcgtccaatcaagattcagtttaggagcggctcctctcacgcacctcaagatgtgtcactgtcttatccgcagcatcatgtgggcaattcaagtccaacttccacctctccgagtagatatgagcggaccatggataatatgaccagctctgcacagatcattcagagaagttttagctcccctgaaaacttccagcggcaggctgtcatgaactcagcacttcgacagatgtcctatgggggaaagttcggttcttcacctctggatcagagtggtttttcaccttccgtgcaaagccacagtcactcctttaatcagtccagcagttcacaatggaggcaagggacaccaagtagtcaacgcaaggttagaatgaactcctatccctacctcgcagatcgccactatagcagagaacagcgatacactgaccatgggagcgaccaccattatcgaggcaaaagggacgattttttctacgaggaccgcaaccacgatgactggagccatgattacgataaccggagggactcgagcagggatgggaaatggagatccagtcgccattag

SEQ ID NO: 189318 - DNA, 801 bp, Artificial Sequence
  derived and/or modified sequence
atgggcgccgccgccgccgaggccgacagaaccctgttcgtgggcaacctggagaccaaggtgaccgaggagctgctgttcgagctgttccaccaggccggccccgtgatcaaggtgaagatccccaaggacaaggacggcaagcccaagcagttcgccttcgtgaacttcaagcacgaggtgagcgtgccctacgccatgaacctgctgaacggcatcaagctgtacggcagacccatcaagatccagttcagaagcggcagcagccacgccccccaggacgtgagcctgagctacccccagcaccacgtgggcaacagcagccccaccagcaccagccccagcagatacgagagaaccatggacaacatgaccagcagcgcccagatcatccagagaagcttcagcagccccgagaacttccagagacaggccgtgatgaacagcgccctgagacagatgagctacggcggcaagttcggcagcagccccctggaccagagcggcttcagccccagcgtgcagagccacagccacagcttcaaccagagcagcagcagccagtggagacagggcacccccagcagccagagaaaggtgagaatgaacagctacccctacctggccgacagacactacagcagagagcagagatacaccgaccacggcagcgaccaccactacagaggcaagagagacgacttcttctacgaggacagaaaccacgacgactggagccacgactacgacaacagaagagacagcagcagagacggcaagtggagaagcagcagacactag

SEQ ID NO: 189319 - protein, 185 aa, Artificial Sequence
  derived and/or modified sequence
MDAAEVEFLAEKELVTIIPNFSLDKIYLIGGDLGPFNPGLPVEVPLWLAINLKQRQKCRLLPPEWMDVEKLEKMRDHERKEETFTPMPSPYYMELTKLLLNHASDNIPKADEIRTLVKDMWDTRIAKLRVSADSFVRQQEAHAKLDNLTLMEINTSGTFLTQALNHMYKLRTNLQPLESTQSQDF

SEQ ID NO: 189320 - DNA, 558 bp, Artificial Sequence
  derived and/or modified sequence
atggatgccgctgaggtcgaattcctggcagagaaagagctcgttaccatcattcctaacttctcactggataaaatctatcttatcgggggcgacctaggaccgttcaatccagggctaccggtggaggtgcccctttggttagccatcaatctgaagcaaagacagaagtgccgcctgctccccccagagtggatggacgtcgaaaagctggagaaaatgcgagaccatgagcggaaagaggagacctttaccccaatgccaagtccatactacatggagcttactaaactgctgttgaatcacgcaagcgacaatattcccaaggccgatgagatccggaccctcgttaaggacatgtgggacacgcgtattgccaagcttcgggtctccgcagattcatttgtaaggcaacaagaggcccatgccaagttggataacttgactttaatggagatcaacacatctggcaccttcttgacgcaggcgctgaaccatatgtacaagctcagaaccaacttacagccgttggagtccactcagagtcaggatttctag

SEQ ID NO: 189321 - DNA, 2673 bp, Artificial Sequence
  derived and/or modified sequence
gggctctcgccgtggcgggaaaacggcggccgcggcgtctcctccgggacgctgaggggcccgaggagaccgtgaggctctggcctgcagctcgcgccgccatggacgctgccgaggtcgaattcctcgccgagaaggagctggttaccattatccccaacttcagtctggacaagatctacctcatcgggggggacctggggccttttaaccctggtttacccgtggaagtgcccctgtggctggcgattaacctgaaacaaagacagaaatgtcgcctgctccctccagagtggatggatgtagaaaagttggagaagatgagggatcatgaacgaaaggaagaaacttttaccccaatgcccagcccttactacatggaacttacgaagctcctgttaaatcatgcttcagacaacatcccgaaggcagacgaaatccggaccctggtcaaggatatgtgggacactcgtatagccaaactccgagtgtctgctgacagctttgtgagacagcaggaggcacatgccaagctggataacttgaccttgatggagatcaacaccagcgggactttcctcacacaagcgctcaaccacatgtacaaactccgcacgaacctccagcctctggagagtactcagtctcaggacttctagagaaaggcctggtgcaggcggcttgctgggggatgtgagcgctcaggacgtgatgaggtactcgtggttctggagctctagaaacacttctgatgcatgaaaaatgtgtgatggtgcaaggaatggattcaggatgttgttggagaaacaagtttgtgattagtccttaaaacttagctccctgggacattcttcaattccacatctgtttctagaaaccagccctttttccccccacttttgagaaataaaaaagccttaggtaaataagtcattctccctagcagagccacttgggtctcctgcatggaagccatcacacttgggcaggtgttcagtgactggtaggtgtagatacagcaggagtggccatgtggtccacggctttttaccccttcttgatcctgatttcttgggctgaatttagactctctcacagaggtggctcacagagaaggatggcagatggtgcagccaacaatgctgaccggtgcttatcctctaagccctgatccacaataaaaatggacccaactcagctctgactctctaggtttttgtgctgcgtaactaccaagtaaaaggactgagcctgtggctgagatgactcagtcaacgaaactgaggcacacggcagttaagtggaaactgcagaccaacacctggggtgtctccttctcttggctacttctagctcaggtttaatgggttgcttatcaagaggagagtcaggaaaaaaacgaatccaatgtattgagcatgagtgacaatgtattgagcatgagtgacaatgctagaagaaaagtcactttcagtgctgctcttgatggatttggggaaggattctttgttgtaggtaacagtgggctcaggggaaattatttttttcctaagagaaaattactttattcgtagcattttggaaatgttaggacctttacagaaattacattaccttgagaggtgaaatgatcgtccagcatcatgcaatggatagaaggttctgtaatcagctttaaaaaaaactttaatttttggccgggcacattggcttggctcatgcatgtaatcccagcactttgggaggccaaggcaggtggatcacaaggccaggagattgagactatcctggctaacatggtgaaaccccgtctctattaaaaatacaaaaaaaaaaaaatttgccaggtgtggtggcacacgcctatagtcgcagctactcgggaggctgaggcaggagaatcgcttgaacccgagaggcggaggttgtagtgagccaagattgcaccactgtactcctgcctgggcaacgagagcaagactctgtctcaaacaaaaaaaattttaactttttttttagacagggtctcgttctgtcatccaggctgcagtagagtggcgtgattatagctcactgcagcctcgaactcctgggttcacacagttctcccaccacagcctcccaaagcactgggattgcaagcatgagccgccatgcctggccagcctatttttggctggacaccagtgggccaaaagcagtggggtgctgtctggggagctctgagaatgcgcatgtgtgacaggctgagcctaaagacttatcacccagcatctgccctccagtgtctagcatgctgcacactatcactccatgttgctgcccacgtgtccccgccaggcaggttttggtggttatttggacactgaagggtcagacctggaagactgggaccaaaagatgaggtctccataatttaaggtgctgttcagacttggttcagctcataggacttgttctttcatctcagccttccttggaatcctcctgctttcatctggggatcttttagaatgaaaccacttgttattgtggagggcaaggggtcctaatgccctcctcttagagcctgagccagtggaggcagctccgtctgcggagatgtatagttattgagcttttctttgtttggctttgttttatatcataaaaaagattttcctcttaacataa

SEQ ID NO: 189322 - DNA, 558 bp, Artificial Sequence
  derived and/or modified sequence
atggatgctgctgaggtggagttcctggccgagaaggagctggtgaccatcatccccaacttcagcctggacaagatctacctgattggaggagacctgggccccttcaaccctggcctgcctgtggaggtgcccctgtggctggccatcaacctgaagcagaggcagaagtgccgcctgctgcccccagagtggatggatgtggagaagctggagaagatgagggaccacgagaggaaggaggagaccttcacccccatgcccagcccctactacatggagctgaccaagctgctgctgaaccacgccagtgacaacatccccaaggcagatgagatccgcaccctggtgaaggacatgtgggacaccagaattgccaagctgcgggtgtctgctgacagctttgtgcggcagcaggaggcccacgccaagctggacaacctgaccctgatggagatcaacaccagcggcaccttcctgacccaggccctgaaccacatgtacaagctgcggaccaacctgcagcccctggagagcacccagagccaggacttctag

SEQ ID NO: 189323 - DNA, 558 bp, Artificial Sequence
  derived and/or modified sequence
atggacgccgccgaggtggagttcctggccgagaaggagctggtgacgataattcctaacttctcactggacaaaatttatttaattgggggcgacttaggcccatttaaccctgggctgcccgtggaagtgcccctctggctggccattaatcttaagcagcgccaaaaatgtcggcttttacccccagagtggatggatgtagaaaagctggagaagatgcgggaccacgaaagaaaggaagagactttcactcccatgcccagcccatactatatggagttaacgaagctactgctaaaccacgcttccgacaatatacctaaagctgacgagattcgtacccttgttaaagatatgtgggatacgcggatcgccaaactgagagtgagcgccgactccttcgttaggcagcaagaagcccacgccaagctggacaacctcaccctgatggagatcaacacatctggcacttttctaacccaggctctaaatcatatgtataagctgagaacaaatctccagcctctggaaagcactcagagccaggatttctag

SEQ ID NO: 189324 - DNA, 558 bp, Artificial Sequence
  derived and/or modified sequence
atggacgctgctgaagttgaatttctggctgagaaggaactggtgaccattatcccaaattttagcttggataagatttatttgattggaggcgatttggggccattcaatcccggtctaccagtagaggtgccactgtggctggcaattaacctgaaacagaggcagaaatgcagactattaccgccagagtggatggacgtcgagaaactggaaaaaatgcgggaccacgaaagaaaggaggagactttcacacccatgccttccccctattacatggaactgacaaagctcctcctcaatcacgcttccgataacattccaaaggcagatgaaattaggaccctggtgaaagatatgtgggacacacggattgccaagctgagggtttctgcagattctttcgtcaggcagcaagaggcgcacgccaagctggacaatctcaccctaatggagattaatacttccggaaccttccttacacaggcattaaaccacatgtacaaactgaggaccaacctgcagcctctggaatcgacccagtcacaagacttctag

SEQ ID NO: 189325 - DNA, 558 bp, Artificial Sequence
  derived and/or modified sequence
atggacgccgccgaggtggagttcctggccgagaaggagctggtgaccatcatccccaacttcagcctggacaagatctacctgatcggcggcgacctgggccccttcaaccccggcctgcccgtggaggtgcccctgtggctggccatcaacctgaagcagagacagaagtgcagactgctgccccccgagtggatggacgtggagaagctggagaagatgagagaccacgagagaaaggaggagaccttcacccccatgcccagcccctactacatggagctgaccaagctgctgctgaaccacgccagcgacaacatccccaaggccgacgagatcagaaccctggtgaaggacatgtgggacaccagaatcgccaagctgagagtgagcgccgacagcttcgtgagacagcaggaggcccacgccaagctggacaacctgaccctgatggagatcaacaccagcggcaccttcctgacccaggccctgaaccacatgtacaagctgagaaccaacctgcagcccctggagagcacccagagccaggacttctag

SEQ ID NO: 189326 - protein, 82 aa, Artificial Sequence
  derived and/or modified sequence
MAFTLYSLLQAALLCVNAIAVLHEERFLKNIGWGTDQGIGGFGEEPGIKSQLMNLIRSVRTVMRVPLIIVNSIAIVLLLLFG

SEQ ID NO: 189327 - DNA, 249 bp, Artificial Sequence
  derived and/or modified sequence
atggcattcacgctctatagcctcctacaggcagccctgctgtgcgtcaacgccatagccgtcctgcatgaggagcgcttcctcaagaatatcggctggggcactgatcaaggcataggcggattcggcgaggagcccggaattaagagtcagcttatgaatctgatccgatccgtgcgcactgtgatgcgggtccctctgatcatagttaattctatcgcaattgtcctgctcttgttgtttggctag

SEQ ID NO: 189328 - DNA, 1481 bp, Artificial Sequence
  derived and/or modified sequence
atcggcttccgtaggaaggcgccggccgtggaggcgccacgtcccttgcggcggcgggagagaaatcgcttggacttcggggcggcctcggacggccatggcctttaccctgtactcactgctgcaggcagccctgctctgcgtcaacgccatcgcagtgctgcacgaggagcgattcctcaagaacattggctggggaacagaccagggaattggtggatttggagaagagccgggaattaaatcacagctaatgaaccttattcgatctgtaagaaccgtgatgagagtgccattgataatagtaaactcaattgcaattgtgttacttttattatttggatgaatatcagtggagaaaatggagactcagaagaggacatgccagtagaagttattactttggtcattattggaatatttatatcttagctggctgaccttgcacttgtcaaaaatgtaaagctgaaaataaaaccagggtttctatttatctgtttttttttttaatgttgcacttgtagtttcattacaaaagatcagatcatgaaaggcagtaactctccaggactggaatatctgattgctcagtgttaatagtagttcatgctgtggtgagattgttaaaagggtgcaagactgttgcttctctttttttagatatttttctatctctcacttctcagggatgaaattctttttcaaagttttgaagttccttgcaacttagccatgatgtgagtggttatccctagataaaattaaaaggatttttaaaaagtaattactgcacataaaatgataaataggtaatttgaataattttattttaagctccttggttaattattttgtctattgtctcagctataaattcaaatttatacatactattgagtattaatattctctgatttcagggagaattctgtcagtcacatgatgattatgtttttgtttaacattctttccatgcacttgttattttattaatttgcctgaatgatgagaccagaccagtgtctacagattttcattgtcagaaaaatctataagtctgccctttttacaatgatgatttaaaaaaaacaacagcgtaaatattagcccacaagagcagtcctaaacaatcacaattacactgtactacccaagaagactgtttattgtgaagcatttacctttcaaaaaatcattacatttctatttcttggtggagcagcacattgtggagtgtgattcttaattcttcattgagtttgtcaataggacattgatgctggataggttgtcttttgtttttatgtctcagaccatcttgtgagattgtttgcctatctcataatacagttttatgcagaaaggttgaaactatgtaaatggtttttatggaaattatcagttacaatattttaaaggtgtagaatggcatctttgtttataggagaacatttgtaaataaagttaaatttctaagtcaa

SEQ ID NO: 189329 - DNA, 249 bp, Artificial Sequence
  derived and/or modified sequence
atggccttcaccctgtacagcctgctgcaggccgccctgctgtgtgtgaatgccatcgctgtgctgcacgaggagcgcttcctgaagaacatcggctggggcacagaccagggcattggaggctttggagaggagcccggcatcaagagccagctgatgaacctgatccgctctgtgaggacagtgatgagggtgcccctcatcatcgtgaacagcatcgccatcgtgctgctgctgctgtttggatag

SEQ ID NO: 189330 - DNA, 249 bp, Artificial Sequence
  derived and/or modified sequence
atggccttcaccctgtacagcctgctgcaggccgccctgctgtgcgtcaacgctattgccgtcctgcatgaagagcgctttctgaaaaacatcggctgggggacagaccaagggataggagggttcggtgaggagccgggcatcaagagccagctgatgaatctcattcgctccgtgagaactgtgatgcgcgtcccgttgatcatcgtgaacagtatagctatcgtgctcttgctactgttcggatag

SEQ ID NO: 189331 - DNA, 249 bp, Artificial Sequence
  derived and/or modified sequence
atggcgttcaccttatatagcctcctgcaggcagcactcctgtgtgtgaacgcaatcgcggttctgcacgaggaacgctttttaaagaacattggctggggaaccgaccaaggtattggcggattcggcgaagaaccaggaattaagtcccagcttatgaacttgatccggagcgtccgcactgtcatgcgtgttcctttgataatcgtcaatagcatagctattgtactgcttcttttgttcggctag

SEQ ID NO: 189332 - DNA, 249 bp, Artificial Sequence
  derived and/or modified sequence
atggccttcaccctgtacagcctgctgcaggccgccctgctgtgcgtgaacgccatcgccgtgctgcacgaggagagattcctgaagaacatcggctggggcaccgaccagggcatcggcggcttcggcgaggagcccggcatcaagagccagctgatgaacctgatcagaagcgtgagaaccgtgatgagagtgcccctgatcatcgtgaacagcatcgccatcgtgctgctgctgctgttcggctag

SEQ ID NO: 189333 - protein, 109 aa, Artificial Sequence
  derived and/or modified sequence
MAGALVRKAADYVRSKDFRDYLMSKHFWGPVANWGLPIAAINDMKKSPEIISGRMTFALCCYSLTFMRFAYKVQPRNWLLFACHATNEVAQLIQGGRLIKHEMTKTASA

SEQ ID NO: 189334 - protein, 109 aa, Artificial Sequence
  derived and/or modified sequence
MAGALVRKAADYVRSKDFRDYLMSTHFWGPVANWGLPIAAINDMKKSPEIISGRMTFALCCYSLTFMRFAYKVQPRNWLLFACHATNEVAQLIQGGRLIKHEMTKTASA

SEQ ID NO: 189335 - protein, 66 aa, Artificial Sequence
  derived and/or modified sequence
MKKSPEIISGRMTFALCCYSLTFMRFAYKVQPRNWLLFACHATNEVAQLIQGGRLIKHEMTKTASA

SEQ ID NO: 189336 - DNA, 330 bp, Artificial Sequence
  derived and/or modified sequence
atggccggcgccctggtgagaaaggccgccgactacgtgagaagcaaggacttcagagactacctgatgagcaagcacttctggggccccgtggccaactggggcctgcccatcgccgccatcaacgacatgaagaagagccccgagatcatcagcggcagaatgaccttcgccctgtgctgctacagcctgaccttcatgagattcgcctacaaggtgcagcccagaaactggctgctgttcgcctgccacgccaccaacgaggtggcccagctgatccagggcggcagactgatcaagcacgagatgaccaagaccgccagcgcctag

SEQ ID NO: 189337 - DNA, 330 bp, Artificial Sequence
  derived and/or modified sequence
atggccggcgccctggtgagaaaggccgccgactacgtgagaagcaaggacttcagagactacctgatgagcacccacttctggggccccgtggccaactggggcctgcccatcgccgccatcaacgacatgaagaagagccccgagatcatcagcggcagaatgaccttcgccctgtgctgctacagcctgaccttcatgagattcgcctacaaggtgcagcccagaaactggctgctgttcgcctgccacgccaccaacgaggtggcccagctgatccagggcggcagactgatcaagcacgagatgaccaagaccgccagcgcctag

SEQ ID NO: 189338 - DNA, 330 bp, Artificial Sequence
  derived and/or modified sequence
atggccggagcattggtccgaaaggctgcagactacgtaaggtcaaaggactttagggattatctgatgtctaaacatttttggggtcccgtcgctaattgggggctgccgatagcggcaataaatgatatgaagaagtcaccagaaattatctccggacggatgacgttcgccctgtgctgctactctctgaccttcatgagattcgcgtataaggttcagccgcgcaactggctgttgttcgcctgccacgcgaccaacgaggtagcccagctcatacagggtggacgcttaatcaagcacgaaatgacaaaaaccgctagtgcctag

SEQ ID NO: 189339 - DNA, 330 bp, Artificial Sequence
  derived and/or modified sequence
atggcgggcgccctggtgcgcaaggcagccgattatgtgcggtctaaagatttccgagactatttgatgagcacccacttttggggcccagtcgcaaattggggcttacctattgcagcaataaacgacatgaagaagtctccagaaatcatatctgggaggatgactttcgcactctgttgctattccttgacattcatgaggtttgcatacaaagtgcagccgcgcaactggctacttttcgcttgtcatgctactaacgaggtggcacagctgatccagggtggaaggctgatcaaacatgagatgaccaagaccgctagcgcttag

SEQ ID NO: 189340 - DNA, 330 bp, Artificial Sequence
  derived and/or modified sequence
atggccggggccctggtgaggaaggctgctgactatgtgcgcagcaaggacttccgggactacctgatgagcaagcacttctggggccctgtggccaactggggcctgcccatcgccgccatcaatgacatgaagaagagccctgagatcatcagcggccgcatgacctttgccctgtgctgctacagcctgaccttcatgagatttgcctacaaggtgcagcccaggaactggctgctgtttgcctgccacgccaccaatgaggtggcccagctgatccagggcggccgcctcatcaagcatgagatgaccaagacagccagcgcctag

SEQ ID NO: 189341 - DNA, 330 bp, Artificial Sequence
  derived and/or modified sequence
atggccggggccctggtgaggaaggctgctgactatgtgcgcagcaaggacttccgggactacctgatgagcacccacttctggggccctgtggccaactggggcctgcccatcgccgccatcaatgacatgaagaagagccctgagatcatcagcggccgcatgacctttgccctgtgctgctacagcctgaccttcatgagatttgcctacaaggtgcagcccaggaactggctgctgtttgcctgccacgccaccaatgaggtggcccagctgatccagggcggccgcctcatcaagcatgagatgaccaagacagccagcgcctag

SEQ ID NO: 189342 - DNA, 330 bp, Artificial Sequence
  derived and/or modified sequence
atggccggcgccctggtgcggaaggccgccgactacgtgcggagcaaggattttagggactatttgatgtctaagcatttttggggcccagtagccaactggggacttcccatcgccgctatcaacgacatgaagaagtcccccgaaattatatccggtaggatgacatttgcactgtgctgctacagcctcactttcatgcgtttcgcttataaggtccagcctagaaactggctcctattcgcctgtcacgccacgaatgaggtcgcccagctgattcaaggaggccgtctgattaaacacgaaatgactaagacagccagcgcgtag

SEQ ID NO: 189343 - DNA, 330 bp, Artificial Sequence
  derived and/or modified sequence
atggccggcgccctggtgcggaaggccgccgactacgtgcggagcaaagacttccgggactacctgatgtcaactcacttctgggggcctgtggccaattgggggctcccaattgcagcaattaatgacatgaaaaagtcccctgaaatcatctccgggaggatgacatttgctctgtgttgctacagtttgaccttcatgagatttgcatacaaggttcagcctaggaactggttgctcttcgcatgtcatgccacgaacgaggtggcccagttgattcaagggggcaggctcattaagcacgaaatgactaagaccgcatcggcctag

SEQ ID NO: 189344 - DNA, 330 bp, Artificial Sequence
  derived and/or modified sequence
atggccggagcactcgtgaggaaggccgcagattatgtccgaagcaaggattttagagattacctcatgtccaagcacttctggggtccggttgctaattggggcctgccaattgccgctatcaatgatatgaagaagtccccagaaatcatcagtggccgaatgacctttgctctgtgctgctacagcctaacgtttatgaggttcgcgtataaagtacagccaagaaactggcttcttttcgcatgtcacgcaactaacgaggtggctcagctcatccagggtggccgactgattaagcacgaaatgactaagactgcctcggcctag

SEQ ID NO: 189345 - DNA, 330 bp, Artificial Sequence
  derived and/or modified sequence
atggccggagccctggtgaggaaggctgcagattacgtcagaagtaaagacttccgggattatctaatgtcgacacacttttggggccctgtggcgaattggggcctaccaatcgccgcaattaatgacatgaagaaatctccagaaatcatatctggcagaatgactttcgccctctgctgttatagcctgacattcatgcgatttgcatacaaggtccaacctcgcaactggctcttattcgcttgccacgcaacaaatgaagttgcacagttgatccaaggtgggaggctcataaaacatgaaatgaccaaaacagcttccgcatag

SEQ ID NO: 189346 - DNA, 962 bp, Artificial Sequence
  derived and/or modified sequence
gtcgtgaggcgggccttcgggctggctcgccgtcggctgccggggggttggccggggtgtcattggctctgggaagcggcagcagaggcagggaccactcggggtctggtgtcggcacagccatggcgggcgcgttggtgcggaaagcggcggactatgtccgaagcaaggatttccgggactacctcatgagtaagcacttctggggcccagtagccaactggggtcttcccattgctgccatcaatgatatgaaaaagtctccagagattatcagtgggcggatgacatttgccctctgttgctattctttgacattcatgagatttgcctacaaggtacagcctcggaactggcttctgtttgcatgccacgcaacaaatgaagtagcccagctcatccagggagggcggcttatcaaacacgagatgactaaaacggcatctgcataacaatggaaaaggaagaacaaggtcttgaagggacagcattgccagctgctgctgagtcacagatttcattataaatagcctccctaaggaaaatacactgaatgctatttttactaaccattctatttttatagaaatagctgagagtttctaaaccaactctctgctgccttacaagtattaaatattttacttctttccataaagagtagctcaaaatatgcaattaatttaataatttctgatgatggttttatctgcagtaatatgtatatcatctattagaatttacttaatgaaaaactgaagagaacaaaatttgtaaccactagcacttaagtactcctgattcttaacattgtctttaatgaccacaagacaaccaacagctggccacgtacttaaaattttgtccccactgtttaaaaatgttacctgtgtatttccatgcagtgtatatattgagatgctgtaacttaatggcaataaatgatttaaatatttgttaaa

SEQ ID NO: 189347 - DNA, 962 bp, Artificial Sequence
  derived and/or modified sequence
gtcgtgaggcgggccttcgggctggctcgccgtcggctgccggggggttggccggggtgtcattggctctgggaagcggcagcagaggcagggaccactcggggtctggtgtcggcacagccatggcgggcgcgttggtgcggaaagcggcggactatgtccgaagcaaggatttccgggactacctcatgagtacgcacttctggggcccagtagccaactggggtcttcccattgctgccatcaatgatatgaaaaagtctccagagattatcagtgggcggatgacatttgccctctgttgctattctttgacattcatgagatttgcctacaaggtacagcctcggaactggcttctgtttgcatgccacgcaacaaatgaagtagcccagctcatccagggagggcggcttatcaaacacgagatgactaaaacggcatctgcataacaatggaaaaggaagaacaaggtcttgaagggacagcattgccagctgctgctgagtcacagatttcattataaatagcctccctaaggaaaatacactgaatgctatttttactaaccattctatttttatagaaatagctgagagtttctaaaccaactctctgctgccttacaagtattaaatattttacttctttccataaagagtagctcaaaatatgcaattaatttaataatttctgatgatggttttatctgcagtaatatgtatatcatctattagaatttacttaatgaaaaactgaagagaacaaaatttgtaaccactagcacttaagtactcctgattcttaacattgtctttaatgaccacaagacaaccaacagctggccacgtacttaaaattttgtccccactgtttaaaaatgttacctgtgtatttccatgcagtgtatatattgagatgctgtaacttaatggcaataaatgatttaaatatttgttaaa

SEQ ID NO: 189348 - DNA, 961 bp, Artificial Sequence
  derived and/or modified sequence
gtcgtgaggcgggccttcgggctggctcgccgtcggctgccggggggttggccggggtgtcattggctctgggaagcggcagcagaggcagggaccactcggggtctggtgtcggcacagccatggcgggcgcgttggtgcggaaagcggcggactatgtccgaagcaaggatttccgggactacctcatgagtagcacttctggggcccagtagccaactggggtcttcccattgctgccatcaatgatatgaaaaagtctccagagattatcagtgggcggatgacatttgccctctgttgctattctttgacattcatgagatttgcctacaaggtacagcctcggaactggcttctgtttgcatgccacgcaacaaatgaagtagcccagctcatccagggagggcggcttatcaaacacgagatgactaaaacggcatctgcataacaatggaaaaggaagaacaaggtcttgaagggacagcattgccagctgctgctgagtcacagatttcattataaatagcctccctaaggaaaatacactgaatgctatttttactaaccattctatttttatagaaatagctgagagtttctaaaccaactctctgctgccttacaagtattaaatattttacttctttccataaagagtagctcaaaatatgcaattaatttaataatttctgatgatggttttatctgcagtaatatgtatatcatctattagaatttacttaatgaaaaactgaagagaacaaaatttgtaaccactagcacttaagtactcctgattcttaacattgtctttaatgaccacaagacaaccaacagctggccacgtacttaaaattttgtccccactgtttaaaaatgttacctgtgtatttccatgcagtgtatatattgagatgctgtaacttaatggcaataaatgatttaaatatttgttaaa

SEQ ID NO: 189349 - protein, 178 aa, Artificial Sequence
  derived and/or modified sequence
MTTLRAFTCDDLFRFNNINLDPLTETYGIPFYLQYLAHWPEYFIVAEAPGGELMGYIMGKAEGSVAREEWHGHVTALSVAPEFRRLGLAAKLMELLEEISERKGGFFVDLFVRVSNQVAVNMYKQLGYSVYRTVIEYYSASNGEPDEDAYDMRKALSRDTEKKSIIPLPHPVRPEDIE

SEQ ID NO: 189350 - DNA, 537 bp, Artificial Sequence
  derived and/or modified sequence
atgaccaccctgagagccttcacctgcgacgacctgttcagattcaacaacatcaacctggaccccctgaccgagacctacggcatccccttctacctgcagtacctggcccactggcccgagtacttcatcgtggccgaggcccccggcggcgagctgatgggctacatcatgggcaaggccgagggcagcgtggccagagaggagtggcacggccacgtgaccgccctgagcgtggcccccgagttcagaagactgggcctggccgccaagctgatggagctgctggaggagatcagcgagagaaagggcggcttcttcgtggacctgttcgtgagagtgagcaaccaggtggccgtgaacatgtacaagcagctgggctacagcgtgtacagaaccgtgatcgagtactacagcgccagcaacggcgagcccgacgaggacgcctacgacatgagaaaggccctgagcagagacaccgagaagaagagcatcatccccctgccccaccccgtgagacccgaggacatcgagtag

SEQ ID NO: 189351 - DNA, 1260 bp, Artificial Sequence
  derived and/or modified sequence
tttccttcccaggtgtcgccgcctgctttctgcagccgctgcctgggaggggttccgaggttctgggcagccacagccccggaggccttacaggagcgacctggcaattcccgccgccggccgccagaggaagctgctttgctgctgtcgttgcccagcaactcgtagcccggaagcagtaccccgtctcgctcggttccgcggcggccacgctccgggagacttccggcagggcgggcgcggggtcttggcgaacggtcttcggaagcggcggcggcgcgatgaccacgctacgggcctttacctgcgacgacctgttccgcttcaacaacattaacttggatccacttacagaaacttatgggattcctttctacctacaatacctcgcccactggccagagtatttcattgttgcagaggcacctggtggagaattaatgggttatattatgggtaaagcagaaggctcagtagctagggaagaatggcacgggcacgtcacagctctgtctgttgccccagaatttcgacgccttggtttggctgctaaacttatggagttactagaggagatttcagaaagaaagggtggattttttgtggatctctttgtaagagtatctaaccaagttgcagttaacatgtacaagcagttgggctacagtgtatataggacggtcatagagtactattcggccagcaacggggagcctgatgaggacgcttatgatatgaggaaagcactttccagggatactgagaagaaatccatcataccattacctcatcctgtgaggcctgaagacattgaataaccctgggcagtggttcttaggcagatactctagatgctttatggacaatattattttcattggatgattctggagctctattaggagaaaagtaatcattttaggtcttaaagacttcaagaaaatacaggttatcaatttattttaaatctcattgtttccagttagcaatatcatacctattaaagctgttcattgtaacaaaattcaatcaaaaaggcagctaggtcagaaggaaacataccactctcatggttcatagtattcactgtatgtatgctagggaaaagacttgctccagtctcctcctcagttctgtgcctgagaaccactgctgcatatatttgtttttaaattttgtattgaactgttaattgaagctttaaaagcatatatgaaatgtataaatctaagatgtataatacattattgactctatgaa

SEQ ID NO: 189352 - DNA, 537 bp, Artificial Sequence
  derived and/or modified sequence
atgaccacgctcagggcattcacatgtgacgatttgtttcgattcaacaatattaatctggatccactgactgagacctacggcatccccttctacctgcagtacttagcccattggccggagtactttatcgtggctgaggcccctggcggcgaattgatggggtatatcatggggaaggctgaaggatctgtggcaagggaggagtggcacggacatgtgactgcattgagtgtagcaccggaattcagacgtctcggcctggccgctaaactgatggagctcctggaggagatctccgagcgcaagggtggctttttcgtggaccttttcgtgcgggtatccaaccaagttgccgtcaatatgtacaagcaactgggctacagtgtgtatcgtacagtgatagagtactattccgcatccaacggcgaaccagacgaagacgcttacgacatgcggaaggcactctccagggacacagaaaagaaatccattatcccactgcctcaccccgtgcggcccgaagacatcgaatag

SEQ ID NO: 189353 - DNA, 537 bp, Artificial Sequence
  derived and/or modified sequence
atgaccaccctgcgggccttcacctgtgatgacctcttccgcttcaacaacatcaacctggaccccctgacagagacctacggcatccccttctacctgcagtacctggcccactggccagagtacttcatcgtggccgaggcccctggaggagagctgatgggctacatcatgggcaaggccgagggctctgtggcccgggaggagtggcacggccacgtgacagccctgtctgtggcccctgagttccggcggctgggcctggccgccaagctgatggagctgctggaggagatcagcgagaggaaaggaggcttctttgtggacctgtttgtgcgggtgagcaaccaggtggccgtgaacatgtacaagcagctgggctacagcgtgtacagaacagtgattgagtactacagcgccagcaatggagagccagatgaagatgcctatgacatgaggaaggccctgagccgggacacagagaagaagagcatcatccccctgccccaccctgtgcggccagaagatattgaatag

SEQ ID NO: 189354 - DNA, 537 bp, Artificial Sequence
  derived and/or modified sequence
atgaccaccctgcgggccttcacctgcgacgacctgttccggttcaacaacatcaacctcgatccgctgaccgagacctatggcattccattctatctgcagtacctggcgcactggccagagtacttcatcgtggcagaggccccgggtggtgagctgatgggatatattatgggcaaggcagaggggtccgtggccagagaggagtggcatggtcacgtaactgccctatccgttgctcccgagtttcgtaggctcggcctggcggctaagctaatggagctattggaagagatatccgagaggaagggggggttcttcgtggaccttttcgttagagtgtcaaatcaagtggccgttaacatgtacaaacagttgggctattctgtgtatcgtacagtcattgaatactactctgcaagtaacggggagcccgacgaggatgcgtatgacatgcggaaggccctatctcgggatactgagaagaaatccataataccactcccgcaccctgtgcgccccgaagatatcgaatag

SEQ ID NO: 189355 - DNA, 537 bp, Artificial Sequence
  derived and/or modified sequence
atgaccacactgcgcgctttcacgtgcgacgacctatttagatttaacaatattaatctcgatcccttaaccgagacatacggcattccattttatctgcaatatcttgcccattggcctgaatacttcatcgtcgcagaggcacccggtggggagctcatggggtacattatgggtaaggccgagggatctgtggctagagaggaatggcatggtcacgtaaccgctctatcagtggcccctgaatttcggcgactcggcctagctgctaagctgatggaactgctagaagagatcagtgagaggaaaggtgggttcttcgttgatctctttgttagggtgagcaatcaggtcgccgttaacatgtacaagcagctaggatactccgtctaccgtacagtcatcgagtactatagcgcctccaacggggaaccagacgaggacgcctatgatatgaggaaggccctctccagagataccgaaaagaaatcgatcatcccccttccacatcccgtgcggcctgaggatatcgagtag

SEQ ID NO: 189356 - protein, 550 aa, Artificial Sequence
  derived and/or modified sequence
MPTEENIDRMCQDLRNQLYESYYLNFISAISRSKLEDIANAALAASAVTQVAKVFDQYLNFITLEDDMFVLCNQNKELVSYRAINRPDITDTEMETVMDTIVDSLFCFFVTLGAVPIIRCSRGTAAEMVAVKLDKKLRENLRDARNSLFTGDTLGAGQFSFQRPLLVLVDRNIDLATPLHHTWTYQALVHDVLDFHLNRVNLEESSGVENSPAGARPKRKNKKSYDLTPVDKFWQKHKGSPFPEVAESVQQELESYRAQEDEVKRLKSIMGLEGEDEGAISMLSDNTAKLTSAVSSLPELLEKKRLIDLHTNVATAVLEHIKARKLDVYFEYEEKIMSKTTLDKSLLDIISDPDAGTPEDKMRLFLIYYISTQQAPSEADLEQYKKALTDAGCNLNPLQYIKQWKAFTKMASAPASYGSTTTKPMGLLSRVMNTGSQFVMEGVKNLVLKQQNLPVTRILDNLMEMKSNPETDDYRYFDPKMLRGNDSSVPRNKNPFQEAIVFVVGGGNYIEYQNLVDYIKGKQGKHILYGCSELFNATQFIKQLSQLGQK

SEQ ID NO: 189357 - protein, 642 aa, Artificial Sequence
  derived and/or modified sequence
MAAAAAATAAAAASIRERQTVALKRMLNFNVPHIKNSTGEPVWKVLIYDRFGQDIISPLLSVKELRDMGITLHLLLHSDRDPIPDVPAVYFVMPTEENIDRMCQDLRNQLYESYYLNFISAISRSKLEDIANAALAASAVTQVAKVFDQYLNFITLEDDMFVLCNQNKELVSYRAINRPDITDTEMETVMDTIVDSLFCFFVTLGAVPIIRCSRGTAAEMVAVKLDKKLRENLRDARNSLFTGDTLGAGQFSFQRPLLVLVDRNIDLATPLHHTWTYQALVHDVLDFHLNRVNLEESSGVENSPAGARPKRKNKKSYDLTPVDKFWQKHKGSPFPEVAESVQQELESYRAQEDEVKRLKSIMGLEGEDEGAISMLSDNTAKLTSAVSSLPELLEKKRLIDLHTNVATAVLEHIKARKLDVYFEYEEKIMSKTTLDKSLLDIISDPDAGTPEDKMRLFLIYYISTQQAPSEADLEQYKKALTDAGCNLNPLQYIKQWKAFTKMASAPASYGSTTTKPMGLLSRVMNTGSQFVMEGVKNLVLKQQNLPVTRILDNLMEMKSNPETDDYRYFDPKMLRGNDSSVPRNKNPFQEAIVFVVGGGNYIEYQNLVDYIKGKQGKHILYGCSELFNATQFIKQLSQLGQK

SEQ ID NO: 189358 - protein, 575 aa, Artificial Sequence
  derived and/or modified sequence
MGITLHLLLHSDRDPIPDVPAVYFVMPTEENIDRMCQDLRNQLYESYYLNFISAISRSKLEDIANAALAASAVTQVAKVFDQYLNFITLEDDMFVLCNQNKELVSYRAINRPDITDTEMETVMDTIVDSLFCFFVTLGAVPIIRCSRGTAAEMVAVKLDKKLRENLRDARNSLFTGDTLGAGQFSFQRPLLVLVDRNIDLATPLHHTWTYQALVHDVLDFHLNRVNLEESSGVENSPAGARPKRKNKKSYDLTPVDKFWQKHKGSPFPEVAESVQQELESYRAQEDEVKRLKSIMGLEGEDEGAISMLSDNTAKLTSAVSSLPELLEKKRLIDLHTNVATAVLEHIKARKLDVYFEYEEKIMSKTTLDKSLLDIISDPDAGTPEDKMRLFLIYYISTQQAPSEADLEQYKKALTDAGCNLNPLQYIKQWKAFTKMASAPASYGSTTTKPMGLLSRVMNTGSQFVMEGVKNLVLKQQNLPVTRILDNLMEMKSNPETDDYRYFDPKMLRGNDSSVPRNKNPFQEAIVFVVGGGNYIEYQNLVDYIKGKQGKHILYGCSELFNATQFIKQLSQLGQK

SEQ ID NO: 189359 - DNA, 1653 bp, Artificial Sequence
  derived and/or modified sequence
atgcccaccgaggagaacatcgacagaatgtgccaggacctgagaaaccagctgtacgagagctactacctgaacttcatcagcgccatcagcagaagcaagctggaggacatcgccaacgccgccctggccgccagcgccgtgacccaggtggccaaggtgttcgaccagtacctgaacttcatcaccctggaggacgacatgttcgtgctgtgcaaccagaacaaggagctggtgagctacagagccatcaacagacccgacatcaccgacaccgagatggagaccgtgatggacaccatcgtggacagcctgttctgcttcttcgtgaccctgggcgccgtgcccatcatcagatgcagcagaggcaccgccgccgagatggtggccgtgaagctggacaagaagctgagagagaacctgagagacgccagaaacagcctgttcaccggcgacaccctgggcgccggccagttcagcttccagagacccctgctggtgctggtggacagaaacatcgacctggccacccccctgcaccacacctggacctaccaggccctggtgcacgacgtgctggacttccacctgaacagagtgaacctggaggagagcagcggcgtggagaacagccccgccggcgccagacccaagagaaagaacaagaagagctacgacctgacccccgtggacaagttctggcagaagcacaagggcagccccttccccgaggtggccgagagcgtgcagcaggagctggagagctacagagcccaggaggacgaggtgaagagactgaagagcatcatgggcctggagggcgaggacgagggcgccatcagcatgctgagcgacaacaccgccaagctgaccagcgccgtgagcagcctgcccgagctgctggagaagaagagactgatcgacctgcacaccaacgtggccaccgccgtgctggagcacatcaaggccagaaagctggacgtgtacttcgagtacgaggagaagatcatgagcaagaccaccctggacaagagcctgctggacatcatcagcgaccccgacgccggcacccccgaggacaagatgagactgttcctgatctactacatcagcacccagcaggcccccagcgaggccgacctggagcagtacaagaaggccctgaccgacgccggctgcaacctgaaccccctgcagtacatcaagcagtggaaggccttcaccaagatggccagcgcccccgccagctacggcagcaccaccaccaagcccatgggcctgctgagcagagtgatgaacaccggcagccagttcgtgatggagggcgtgaagaacctggtgctgaagcagcagaacctgcccgtgaccagaatcctggacaacctgatggagatgaagagcaaccccgagaccgacgactacagatacttcgaccccaagatgctgagaggcaacgacagcagcgtgcccagaaacaagaaccccttccaggaggccatcgtgttcgtggtgggcggcggcaactacatcgagtaccagaacctggtggactacatcaagggcaagcagggcaagcacatcctgtacggctgcagcgagctgttcaacgccacccagttcatcaagcagctgagccagctgggccagaagtag

SEQ ID NO: 189360 - DNA, 1929 bp, Artificial Sequence
  derived and/or modified sequence
atggccgccgccgccgccgccaccgccgccgccgccgccagcatcagagagagacagaccgtggccctgaagagaatgctgaacttcaacgtgccccacatcaagaacagcaccggcgagcccgtgtggaaggtgctgatctacgacagattcggccaggacatcatcagccccctgctgagcgtgaaggagctgagagacatgggcatcaccctgcacctgctgctgcacagcgacagagaccccatccccgacgtgcccgccgtgtacttcgtgatgcccaccgaggagaacatcgacagaatgtgccaggacctgagaaaccagctgtacgagagctactacctgaacttcatcagcgccatcagcagaagcaagctggaggacatcgccaacgccgccctggccgccagcgccgtgacccaggtggccaaggtgttcgaccagtacctgaacttcatcaccctggaggacgacatgttcgtgctgtgcaaccagaacaaggagctggtgagctacagagccatcaacagacccgacatcaccgacaccgagatggagaccgtgatggacaccatcgtggacagcctgttctgcttcttcgtgaccctgggcgccgtgcccatcatcagatgcagcagaggcaccgccgccgagatggtggccgtgaagctggacaagaagctgagagagaacctgagagacgccagaaacagcctgttcaccggcgacaccctgggcgccggccagttcagcttccagagacccctgctggtgctggtggacagaaacatcgacctggccacccccctgcaccacacctggacctaccaggccctggtgcacgacgtgctggacttccacctgaacagagtgaacctggaggagagcagcggcgtggagaacagccccgccggcgccagacccaagagaaagaacaagaagagctacgacctgacccccgtggacaagttctggcagaagcacaagggcagccccttccccgaggtggccgagagcgtgcagcaggagctggagagctacagagcccaggaggacgaggtgaagagactgaagagcatcatgggcctggagggcgaggacgagggcgccatcagcatgctgagcgacaacaccgccaagctgaccagcgccgtgagcagcctgcccgagctgctggagaagaagagactgatcgacctgcacaccaacgtggccaccgccgtgctggagcacatcaaggccagaaagctggacgtgtacttcgagtacgaggagaagatcatgagcaagaccaccctggacaagagcctgctggacatcatcagcgaccccgacgccggcacccccgaggacaagatgagactgttcctgatctactacatcagcacccagcaggcccccagcgaggccgacctggagcagtacaagaaggccctgaccgacgccggctgcaacctgaaccccctgcagtacatcaagcagtggaaggccttcaccaagatggccagcgcccccgccagctacggcagcaccaccaccaagcccatgggcctgctgagcagagtgatgaacaccggcagccagttcgtgatggagggcgtgaagaacctggtgctgaagcagcagaacctgcccgtgaccagaatcctggacaacctgatggagatgaagagcaaccccgagaccgacgactacagatacttcgaccccaagatgctgagaggcaacgacagcagcgtgcccagaaacaagaaccccttccaggaggccatcgtgttcgtggtgggcggcggcaactacatcgagtaccagaacctggtggactacatcaagggcaagcagggcaagcacatcctgtacggctgcagcgagctgttcaacgccacccagttcatcaagcagctgagccagctgggccagaagtag

SEQ ID NO: 189361 - DNA, 1374 bp, Artificial Sequence
  derived and/or modified sequence
atggagaccgtgatggacaccatcgtggacagcctgttctgcttcttcgtgaccctgggcgccgtgcccatcatcagatgcagcagaggcaccgccgccgagatggtggccgtgaagctggacaagaagctgagagagaacctgagagacgccagaaacagcctgttcaccggcgacaccctgggcgccggccagttcagcttccagagacccctgctggtgctggtggacagaaacatcgacctggccacccccctgcaccacacctggacctaccaggccctggtgcacgacgtgctggacttccacctgaacagagtgaacctggaggagagcagcggcgtggagaacagccccgccggcgccagacccaagagaaagaacaagaagagctacgacctgacccccgtggacaagttctggcagaagcacaagggcagccccttccccgaggtggccgagagcgtgcagcaggagctggagagctacagagcccaggaggacgaggtgaagagactgaagagcatcatgggcctggagggcgaggacgagggcgccatcagcatgctgagcgacaacaccgccaagctgaccagcgccgtgagcagcctgcccgagctgctggagaagaagagactgatcgacctgcacaccaacgtggccaccgccgtgctggagcacatcaaggccagaaagctggacgtgtacttcgagtacgaggagaagatcatgagcaagaccaccctggacaagagcctgctggacatcatcagcgaccccgacgccggcacccccgaggacaagatgagactgttcctgatctactacatcagcacccagcaggcccccagcgaggccgacctggagcagtacaagaaggccctgaccgacgccggctgcaacctgaaccccctgcagtacatcaagcagtggaaggccttcaccaagatggccagcgcccccgccagctacggcagcaccaccaccaagcccatgggcctgctgagcagagtgatgaacaccggcagccagttcgtgatggagggcgtgaagaacctggtgctgaagcagcagaacctgcccgtgaccagaatcctggacaacctgatggagatgaagagcaaccccgagaccgacgactacagatacttcgaccccaagatgctgagaggcaacgacagcagcgtgcccagaaacaagaaccccttccaggaggccatcgtgttcgtggtgggcggcggcaactacatcgagtaccagaacctggtggactacatcaagggcaagcagggcaagcacatcctgtacggctgcagcgagctgttcaacgccacccagttcatcaagcagctgagccagctgggccagaagtag

SEQ ID NO: 189362 - DNA, 1728 bp, Artificial Sequence
  derived and/or modified sequence
atgggcatcaccctgcacctgctgctgcacagcgacagagaccccatccccgacgtgcccgccgtgtacttcgtgatgcccaccgaggagaacatcgacagaatgtgccaggacctgagaaaccagctgtacgagagctactacctgaacttcatcagcgccatcagcagaagcaagctggaggacatcgccaacgccgccctggccgccagcgccgtgacccaggtggccaaggtgttcgaccagtacctgaacttcatcaccctggaggacgacatgttcgtgctgtgcaaccagaacaaggagctggtgagctacagagccatcaacagacccgacatcaccgacaccgagatggagaccgtgatggacaccatcgtggacagcctgttctgcttcttcgtgaccctgggcgccgtgcccatcatcagatgcagcagaggcaccgccgccgagatggtggccgtgaagctggacaagaagctgagagagaacctgagagacgccagaaacagcctgttcaccggcgacaccctgggcgccggccagttcagcttccagagacccctgctggtgctggtggacagaaacatcgacctggccacccccctgcaccacacctggacctaccaggccctggtgcacgacgtgctggacttccacctgaacagagtgaacctggaggagagcagcggcgtggagaacagccccgccggcgccagacccaagagaaagaacaagaagagctacgacctgacccccgtggacaagttctggcagaagcacaagggcagccccttccccgaggtggccgagagcgtgcagcaggagctggagagctacagagcccaggaggacgaggtgaagagactgaagagcatcatgggcctggagggcgaggacgagggcgccatcagcatgctgagcgacaacaccgccaagctgaccagcgccgtgagcagcctgcccgagctgctggagaagaagagactgatcgacctgcacaccaacgtggccaccgccgtgctggagcacatcaaggccagaaagctggacgtgtacttcgagtacgaggagaagatcatgagcaagaccaccctggacaagagcctgctggacatcatcagcgaccccgacgccggcacccccgaggacaagatgagactgttcctgatctactacatcagcacccagcaggcccccagcgaggccgacctggagcagtacaagaaggccctgaccgacgccggctgcaacctgaaccccctgcagtacatcaagcagtggaaggccttcaccaagatggccagcgcccccgccagctacggcagcaccaccaccaagcccatgggcctgctgagcagagtgatgaacaccggcagccagttcgtgatggagggcgtgaagaacctggtgctgaagcagcagaacctgcccgtgaccagaatcctggacaacctgatggagatgaagagcaaccccgagaccgacgactacagatacttcgaccccaagatgctgagaggcaacgacagcagcgtgcccagaaacaagaaccccttccaggaggccatcgtgttcgtggtgggcggcggcaactacatcgagtaccagaacctggtggactacatcaagggcaagcagggcaagcacatcctgtacggctgcagcgagctgttcaacgccacccagttcatcaagcagctgagccagctgggccagaagtag

SEQ ID NO: 189363 - DNA, 1653 bp, Artificial Sequence
  derived and/or modified sequence
atgcccacagaggagaatatcgatcgaatgtgtcaggacctccggaaccaactgtatgaaagttattacttaaacttcatttccgccatcagccggagcaaactagaggatatcgccaacgccgccctagcagcatctgctgtaacccaggtggctaaggtgttcgatcagtacttaaatttcataactcttgaagacgatatgtttgtattgtgtaatcaaaataaggagctggtgagttatcgcgccatcaatagacccgatattactgacacagaaatggagaccgtcatggacacgatagttgactcactcttttgcttttttgtgactctgggagccgtgcctattatcaggtgctctcgtggaacagccgccgaaatggtcgctgtgaaactcgataaaaaattacgggagaatcttcgtgatgcgaggaactccctctttaccggcgacactcttggggccggacagtttagcttccagcgcccactactggtcctggtcgacagaaacattgacctcgctaccccccttcaccatacatggacttaccaagcgctggtacacgatgtgctagactttcacctgaatcgggtcaatctggaagagagctctggtgtggagaactctccagcaggcgcacgccccaaacgaaagaataagaaatcttacgatctgacccccgtggacaagttctggcagaaacataaggggtccccattccccgaagtggcggagtccgtccaacaagagttggaaagctaccgggcgcaggaggatgaagtaaagcgacttaagagcattatgggactggagggggaggacgagggcgcaatttcaatgctgtcagacaataccgccaagctgacttcggccgtgtcatccttgcctgaacttctggaaaaaaagcgcctgattgaccttcacaccaacgtcgctactgcagtcctggagcacattaaggcacgcaagctcgacgtttacttcgaatacgaggaaaagatcatgtccaagacaacactggacaaatctttactggacattatttcggaccccgacgccggtacccctgaagacaaaatgagattgtttctgatctactatatctcaactcaacaggctccatctgaggctgacctggagcagtataaaaaggctcttacagatgccggctgtaacctcaaccccctgcagtacattaaacagtggaaggcatttacgaaaatggccagcgcgccagcctcttatggttctactactacaaagcccatggggctactgtccagagtgatgaataccggttcccaatttgtgatggagggcgtaaagaatctggtgttgaaacagcagaatttgcctgtcacaagaatcctagacaatctgatggaaatgaaatctaatcccgagacagacgactaccgatacttcgatcccaaaatgcttcgaggcaacgactcttcagtacccaggaataagaaccccttccaggaggctatcgtcttcgtggtgggtggaggtaattatatagagtaccaaaacctcgtggactacattaagggtaagcaggggaagcacattctctacggctgtagtgaattgttcaatgcgacgcagtttattaagcagcttagtcagcttggccagaagtag

SEQ ID NO: 189364 - DNA, 1929 bp, Artificial Sequence
  derived and/or modified sequence
atggcagcggcagccgcagcaaccgctgctgccgcagcctctattcgtgagcggcaaacagtggctctgaagcgaatgctgaacttcaacgtaccacacatcaagaactcgaccggagaacccgtctggaaggttttgatctacgatcggtttgggcaagacatcattagtcccctgctgtccgtcaaggagctcagagacatgggcattacgctgcacttgctgctgcactccgacagggacccaataccagacgttcccgctgtttacttcgttatgcccactgaggagaacattgatcggatgtgccaggacctccgaaaccagctgtatgagagttactacctaaatttcatcagcgctattagtagaagtaagctggaggacatcgctaatgcagccttggccgcaagcgctgttacccaggtggccaaagtctttgatcagtacctgaacttcatcactttggaagacgacatgtttgtgttgtgtaatcagaacaaggagctcgtgtcgtaccgcgcaattaataggcctgacataacagacactgagatggagacagtgatggacactatagtggatagtctattttgttttttcgtgacactgggcgcagttcccattatacgctgttccagaggaactgctgccgagatggtagcagtgaagttagacaagaagctgagagagaatctccgcgacgccaggaacagcctctttactggagacacactcggcgcgggacagttctcattccaaaggccccttttggtgctggtcgaccgaaatatcgacctggctacccccctacaccatacctggacttatcaagccctagtgcacgacgtactagactttcacctgaatcgtgtcaatttagaggaatcctccggtgttgagaattctcctgctggcgctcgaccaaaaagaaaaaataagaaatcatatgacctgaccccagtggataagttctggcaaaaacacaaaggctccccttttccggaggtggccgagagtgtgcagcaggaactagagagctacagggcgcaggaagacgaggtgaaaaggctgaaaagcattatgggactggagggtgaggacgagggcgcaatttcaatgctatctgataataccgctaaacttacttccgccgttagctcgctgcccgagttgctggagaaaaagcgcttaattgatttgcacaccaatgtggcaaccgctgtcctggagcacataaaggcccgcaaactggatgtgtatttcgagtatgaggaaaagatcatgagtaaaacaaccctggataagtcccttctggacatcatctcagaccctgacgctggcaccccggaggacaaaatgcgactcttcctgatctattatatctccacccagcaggcaccaagtgaagccgaccttgaacaatacaaaaaagccctgacagacgcaggttgcaacctgaatccactccagtatatcaaacagtggaaggcgtttacaaaaatggcaagtgcacccgcctcatatggctcaaccactactaaacccatgggcctcctgtctcgcgtgatgaacactggtagccaatttgtgatggagggcgtgaagaacctggttctaaaacagcagaacctgcctgtcacacgcattttggataacctgatggagatgaaatcaaatcccgagacggacgactaccgttactttgaccccaagatgctgaggggcaacgacagcagcgtgccccgcaacaagaatccctttcaggaagctatcgtatttgtggtgggaggagggaattacatagaataccagaatctagtcgattacatcaagggcaaacagggtaaacacatcctgtacggatgcagcgagctgtttaacgcgacccagtttatcaaacagctatcccagctgggccaaaagtag

SEQ ID NO: 189365 - DNA, 1374 bp, Artificial Sequence
  derived and/or modified sequence
atggagacagttatggacacaattgtggatagcctcttttgcttctttgtcacgctgggcgctgtgccaatcatccgttgttccagagggacggcagccgaaatggtcgccgtaaagttggataagaagctgcgagaaaacctgcgcgacgcccggaactcgctgtttaccggcgacaccttgggcgctggccaattctccttccaaaggcccctcctcgttcttgtggatcggaatattgacctagctacccctctacaccatacatggacgtaccaggcactcgtgcatgacgtgttagattttcatcttaacagagtgaatctggaggagagctcaggcgttgagaacagcccagccggcgcaaggcccaaaagaaagaacaaaaaaagttatgacctaaccccagtcgacaaattctggcagaagcacaaaggaagcccgttcccggaggtagccgagagtgttcagcaggagctggagagttatcgtgcacaggaggatgaggtgaagaggcttaagtctattatgggattggaaggtgaggatgagggcgcgatctccatgctatctgacaacaccgccaaactaacttcagctgtttcctctctcccggagttgctcgaaaagaagcgcctgatagacctccataccaatgtcgccaccgccgtgttagaacatattaaagctagaaaactggacgtttatttcgaatatgaggaaaagatcatgtccaaaacgacactggataaaagtttacttgacataatatcagacccggacgccggcacccccgaggataagatgcgcttgtttttaatctactacatcagtacccagcaagctcccagcgaggctgatttggaacaatacaagaaggcccttacagacgctggctgtaatctgaatccgctgcaatacattaaacaatggaaggcatttaccaaaatggcctcagctcccgcttcctacggatctacgaccactaaacccatgggtcttctcagccgcgttatgaacactggctcacagttcgtgatggaaggggtgaagaacttggtgttgaaacagcaaaatttaccagtgacccgtattttggacaatctgatggaaatgaaatccaaccccgaaacagacgactaccgttacttcgaccctaagatgctgagggggaacgatagctcagtgccacggaataagaacccgttccaagaagcaattgtgtttgtggtcggcgggggtaattatatagagtatcagaatctagttgattatatcaaaggcaagcaagggaaacacatcctgtacggttgctcagaactatttaatgccacacagttcatcaaacagctctcccagctgggacaaaagtag

SEQ ID NO: 189366 - DNA, 1728 bp, Artificial Sequence
  derived and/or modified sequence
atgggaattaccttacatttgctactccattctgaccgagacccaattccagacgtaccagccgtgtatttcgttatgccaaccgaggagaacattgatcgaatgtgtcaagatctgcgaaaccagctgtatgagtcatactacttaaattttatttctgctatcagccgaagcaaattggaagatatcgcaaatgcagcactcgctgcttccgcggtaacacaagtcgccaaagttttcgaccagtatcttaatttcataaccttggaggatgatatgtttgtgctatgtaatcaaaataaagaactagtctcgtatcgcgcaattaacagaccagatattactgacacagagatggagacggttatggacacgattgtggattcgctgttttgtttttttgtgaccctgggtgcagtccctattatacggtgcagcaggggcaccgcagcagagatggtggccgtcaagcttgataaaaaactgcgggagaacttacgagatgcccgaaactcactcttcactggcgatacactcggagccgggcaattttcttttcagcggccactgctcgtgctggtagacagaaacatcgacctggcaacccccttacaccatacttggacctaccaggcactggtccatgatgtgctcgattttcacctgaatagggttaacctggaagaatcctcaggtgtcgagaattctcccgctggagcccgtcctaagagaaagaataaaaaaagttatgacctgactcctgtggataagttttggcagaaacacaagggctccccattccctgaggtggccgaaagcgtgcagcaagaactagagtcttaccgagcacaggaggacgaagtgaagcgacttaagtcgataatgggcctggaaggcgaggatgagggcgccatctctatgctctcagataataccgctaaactgaccagtgcggtaagttctctgcctgagcttttggaaaaaaagaggctgatcgacctccatacgaatgtcgccaccgccgtcttggaacacatcaaggcccggaagctggacgtgtactttgaatacgaggagaagatcatgagcaaaacaacccttgataaatcactcttagacataatttcagatcccgatgccgggacgcccgaagataagatgaggctgttcctgatctactacatttctacgcagcaggcgccgtctgaggcagacctggaacaatataaaaaggcacttaccgacgccggatgcaaccttaacccactccaatatataaagcagtggaaagctttcaccaaaatggcaagtgcccctgcatcctacgggagcacgactacaaaacctatgggacttctctcccgtgttatgaataccggctcccagtttgtcatggagggggtgaaaaatctggtcctcaaacaacagaatcttccggtgacacgcattcttgataaccttatggagatgaagtctaacccggaaaccgatgattatcggtatttcgatcccaaaatgctgaggggtaatgactcctctgtccctcgcaataaaaacccttttcaggaagcaatagtgtttgtcgtcggaggtggcaactacatcgagtaccaaaacctagtggactacattaagggtaaacaggggaagcacattctatatggctgttcagaactttttaacgccacacagttcatcaagcagctcagccagctcggtcagaagtag

SEQ ID NO: 189367 - DNA, 1653 bp, Artificial Sequence
  derived and/or modified sequence
atgcccacagaagaaaatattgacaggatgtgccaggacctgaggaaccagctgtatgagagctactacctgaacttcatcagcgccatcagccgcagcaagctggaggacatcgccaatgctgccctggccgccagcgctgtgacccaggtggccaaggtgtttgaccagtacctgaacttcatcaccctggaggatgacatgtttgtgctgtgcaaccagaacaaggagctggtgtcctaccgggccatcaacagaccagacatcacagacacagagatggagaccgtgatggacaccatcgtggacagcctcttctgcttctttgtgaccctgggcgctgtgcccatcatccgctgcagccggggcacagctgctgagatggtggccgtgaagctggacaagaagctgcgggagaacctgagagatgccaggaacagcctcttcaccggggacaccctgggcgccggccagttctccttccagaggcccctgctggtgctggtggacagaaatattgacctggccacccccctgcaccacacctggacctaccaggccctggtgcatgatgtgctggacttccacctgaacagagtgaacctggaggagagcagcggcgtggagaacagccctgctggggcccggcccaagaggaagaacaagaagagctatgacctgacccctgtggacaagttctggcagaagcacaagggcagccccttccctgaggtggccgagagcgtgcagcaggagctggagagctaccgggcccaggaggatgaggtgaagaggctgaagagcatcatgggcctggagggagaagatgagggcgccatctccatgctgagtgacaacacagccaagctgaccagcgctgtgagcagcctgcctgagctgctggagaagaagaggctgattgacctgcacaccaacgtggccacagctgtgctggagcacatcaaggccaggaagctggatgtgtactttgaatatgaggagaagatcatgagcaagaccaccctggacaagagcctgctggacatcatcagtgaccctgatgctggcaccccagaggacaagatgaggctcttcctgatctactacatcagcacccagcaggcccccagcgaggccgacctggagcagtacaagaaggccctgacagatgctggctgcaacctgaaccccctgcagtacatcaagcagtggaaggccttcaccaagatggccagcgccccagccagctatggcagcaccaccaccaagcccatgggcctgctgagccgggtgatgaacacaggcagccagtttgtgatggagggcgtgaagaacctggtgctgaagcagcagaacctgcctgtgacccgcatcctggacaacctgatggagatgaagagcaaccctgagacagatgactaccgctactttgaccccaagatgctgcggggaaatgacagctctgtgcccaggaacaagaaccccttccaggaggccatcgtgtttgtggtgggcggcggcaactacatcgagtaccagaacctggtggactacatcaagggcaagcagggcaagcacatcctgtatggctgcagcgagctgttcaatgccacccagttcatcaagcagctgagccagctgggccagaagtag

SEQ ID NO: 189368 - DNA, 1929 bp, Artificial Sequence
  derived and/or modified sequence
atggctgctgctgctgctgccacagctgctgctgctgccagcatccgggagcggcagacagtggccctgaagaggatgctgaacttcaacgtgccccacatcaagaacagcactggagagcctgtgtggaaggtgctgatctatgacagatttggccaggacatcatcagccccctgctgtctgtgaaggagctgcgggacatgggcatcaccctgcacctgctgctgcacagcgaccgggaccccatcccagatgtgcctgctgtgtactttgtgatgcccacagaagaaaatattgacaggatgtgccaggacctgaggaaccagctgtatgagagctactacctgaacttcatcagcgccatcagccgcagcaagctggaggacatcgccaatgctgccctggccgccagcgctgtgacccaggtggccaaggtgtttgaccagtacctgaacttcatcaccctggaggatgacatgtttgtgctgtgcaaccagaacaaggagctggtgtcctaccgggccatcaacagaccagacatcacagacacagagatggagaccgtgatggacaccatcgtggacagcctcttctgcttctttgtgaccctgggcgctgtgcccatcatccgctgcagccggggcacagctgctgagatggtggccgtgaagctggacaagaagctgcgggagaacctgagagatgccaggaacagcctcttcaccggggacaccctgggcgccggccagttctccttccagaggcccctgctggtgctggtggacagaaatattgacctggccacccccctgcaccacacctggacctaccaggccctggtgcatgatgtgctggacttccacctgaacagagtgaacctggaggagagcagcggcgtggagaacagccctgctggggcccggcccaagaggaagaacaagaagagctatgacctgacccctgtggacaagttctggcagaagcacaagggcagccccttccctgaggtggccgagagcgtgcagcaggagctggagagctaccgggcccaggaggatgaggtgaagaggctgaagagcatcatgggcctggagggagaagatgagggcgccatctccatgctgagtgacaacacagccaagctgaccagcgctgtgagcagcctgcctgagctgctggagaagaagaggctgattgacctgcacaccaacgtggccacagctgtgctggagcacatcaaggccaggaagctggatgtgtactttgaatatgaggagaagatcatgagcaagaccaccctggacaagagcctgctggacatcatcagtgaccctgatgctggcaccccagaggacaagatgaggctcttcctgatctactacatcagcacccagcaggcccccagcgaggccgacctggagcagtacaagaaggccctgacagatgctggctgcaacctgaaccccctgcagtacatcaagcagtggaaggccttcaccaagatggccagcgccccagccagctatggcagcaccaccaccaagcccatgggcctgctgagccgggtgatgaacacaggcagccagtttgtgatggagggcgtgaagaacctggtgctgaagcagcagaacctgcctgtgacccgcatcctggacaacctgatggagatgaagagcaaccctgagacagatgactaccgctactttgaccccaagatgctgcggggaaatgacagctctgtgcccaggaacaagaaccccttccaggaggccatcgtgtttgtggtgggcggcggcaactacatcgagtaccagaacctggtggactacatcaagggcaagcagggcaagcacatcctgtatggctgcagcgagctgttcaatgccacccagttcatcaagcagctgagccagctgggccagaagtag

SEQ ID NO: 189369 - DNA, 1374 bp, Artificial Sequence
  derived and/or modified sequence
atggagaccgtgatggacaccatcgtggacagcctcttctgcttctttgtgaccctgggcgctgtgcccatcatccgctgcagccggggcacagctgctgagatggtggccgtgaagctggacaagaagctgcgggagaacctgagagatgccaggaacagcctcttcaccggggacaccctgggcgccggccagttctccttccagaggcccctgctggtgctggtggacaggaacatcgacctggccacccccctgcaccacacctggacctaccaggccctggtgcatgatgtgctggacttccacctgaacagagtgaacctggaggagagcagtggagtggagaacagccctgctggggcccggcccaagaggaagaacaagaagagctatgacctgacccctgtggacaagttctggcagaagcacaagggcagccccttccctgaggtggccgagagcgtgcagcaggagctggagagctaccgggcccaggaggatgaggtgaagaggctgaagagcatcatgggcctggagggggaggatgaaggagccatctccatgctgagtgacaacacagccaagctgaccagcgctgtgagcagcctgcctgagctgctggagaagaagaggctgattgacctgcacaccaacgtggccacagctgtgctggagcacatcaaggccaggaagctggatgtgtactttgaatatgaggagaagatcatgagcaagaccaccctggacaagagcctgctggacatcatcagtgaccctgatgctggcaccccagaggacaagatgaggctcttcctgatctactacatcagcacccagcaggcccccagcgaggccgacctggagcagtacaagaaggccctgacagatgctggctgcaacctgaaccccctgcagtacatcaagcagtggaaggccttcaccaagatggccagcgccccagccagctatggcagcaccaccaccaagcccatgggcctgctgagccgggtgatgaacacaggcagccagtttgtgatggagggcgtgaagaacctggtgctgaagcagcagaacctgcctgtgacccgcatcctggacaacctgatggagatgaagagcaaccctgagacagatgactaccgctactttgaccccaagatgctgcggggaaatgacagctctgtgcccaggaacaagaaccccttccaggaggccatcgtgtttgtggtgggcggcggcaactacatcgagtaccagaacctggtggactacatcaagggcaagcagggcaagcacatcctgtatggctgcagcgagctgttcaatgccacccagttcatcaagcagctgagccagctgggccagaagtag

SEQ ID NO: 189370 - DNA, 1728 bp, Artificial Sequence
  derived and/or modified sequence
atgggcatcaccctgcacctgctgctgcacagcgaccgggaccccatcccagatgtgcctgctgtgtactttgtgatgcccacagaggagaacatcgacaggatgtgccaggacctgaggaaccagctgtatgagagctactacctgaacttcatcagcgccatcagccgcagcaagctggaggacatcgccaatgctgccctggccgccagcgctgtgacccaggtggccaaggtgtttgaccagtacctgaacttcatcaccctggaggatgacatgtttgtgctgtgcaaccagaacaaggagctggtgtcctaccgggccatcaacagaccagacatcacagacacagagatggagaccgtgatggacaccatcgtggacagcctcttctgcttctttgtgaccctgggcgctgtgcccatcatccgctgcagccggggcacagctgctgagatggtggccgtgaagctggacaagaagctgcgggagaacctgagagatgccaggaacagcctcttcaccggggacaccctgggcgccggccagttctccttccagaggcccctgctggtgctggtggacaggaacatcgacctggccacccccctgcaccacacctggacctaccaggccctggtgcatgatgtgctggacttccacctgaacagagtgaacctggaggagagcagtggagtggagaacagccctgctggggcccggcccaagaggaagaacaagaagagctatgacctgacccctgtggacaagttctggcagaagcacaagggcagccccttccctgaggtggccgagagcgtgcagcaggagctggagagctaccgggcccaggaggatgaggtgaagaggctgaagagcatcatgggcctggagggggaggatgaaggagccatctccatgctgagtgacaacacagccaagctgaccagcgctgtgagcagcctgcctgagctgctggagaagaagaggctgattgacctgcacaccaacgtggccacagctgtgctggagcacatcaaggccaggaagctggatgtgtactttgaatatgaggagaagatcatgagcaagaccaccctggacaagagcctgctggacatcatcagtgaccctgatgctggcaccccagaggacaagatgaggctcttcctgatctactacatcagcacccagcaggcccccagcgaggccgacctggagcagtacaagaaggccctgacagatgctggctgcaacctgaaccccctgcagtacatcaagcagtggaaggccttcaccaagatggccagcgccccagccagctatggcagcaccaccaccaagcccatgggcctgctgagccgggtgatgaacacaggcagccagtttgtgatggagggcgtgaagaacctggtgctgaagcagcagaacctgcctgtgacccgcatcctggacaacctgatggagatgaagagcaaccctgagacagatgactaccgctactttgaccccaagatgctgcggggaaatgacagctctgtgcccaggaacaagaaccccttccaggaggccatcgtgtttgtggtgggcggcggcaactacatcgagtaccagaacctggtggactacatcaagggcaagcagggcaagcacatcctgtatggctgcagcgagctgttcaatgccacccagttcatcaagcagctgagccagctgggccagaagtag

SEQ ID NO: 189371 - DNA, 1653 bp, Artificial Sequence
  derived and/or modified sequence
atgcccaccgaggagaacatcgaccggatgtgccaggacctgcggaaccagctgtacgagagctactacctcaactttatttccgctatcagtagaagtaaactagaagacatcgcaaacgcagcgttggccgcgtctgcggttacccaggtcgcaaaggtctttgaccagtatctaaattttatcaccctcgaggacgacatgttcgtgctgtgtaaccaaaataaggaattggtttcctacagggcaataaataggcccgatataacggataccgaaatggagacagtgatggacaccattgtggacagcctcttttgtttttttgtgactctaggtgccgtgcctatcatccgatgctctagggggaccgccgccgaaatggtggcggtgaaactagataaaaagctgcgtgagaaccttcgcgacgcgcgaaactccttatttacaggagatactctgggggctggtcaattcagttttcagaggcctctcctcgtcctcgtagaccgaaacatcgatctggccaccccgctgcatcatacttggacctatcaggcactggtacatgacgttctggacttccacctcaatagagtgaatctggaagaaagcagcggagtggaaaattctcctgccggggctcgccccaaaagaaagaacaaaaagagctacgacctgacaccagttgataaattctggcagaaacacaagggatcaccattccccgaggtcgccgagtccgtgcagcaggagctcgagtcctacagagctcaggaggatgaggtgaagcggctgaaatctattatggggctggaaggtgaagacgagggagccatttctatgctctccgataatacagccaagctgacctccgccgtgtcgagcctgcccgagctcttggagaagaaaagactgattgatcttcatactaatgtggctacggctgttctcgagcatattaaggcccggaagcttgacgtatattttgaatacgaggaaaaaataatgtccaaaaccaccctggacaaaagcctgttagatatcataagtgatccagacgccggaactccagaagataagatgcgactcttcttgatctattacatctctacgcagcaggcccccagtgaagcggatctggagcaatacaagaaagcactgaccgatgccgggtgtaatctcaatccactgcagtacattaagcagtggaaggcgttcacgaaaatggcgtcagccccagcttcctacggctcaacaactactaaacctatgggacttctgtccagagttatgaatactggatcacagtttgttatggaaggcgtgaagaatctagtgctaaaacaacagaacctgcccgttacaaggatcttggacaatctgatggagatgaagtccaatcctgagacggatgattaccggtatttcgatcctaagatgcttagaggcaacgattcatctgtgccacggaataagaatcccttccaggaggccatcgtcttcgtggtgggcggtgggaattatattgaatatcagaacttagtagactatattaaaggcaagcagggtaagcacattttatacggttgtagtgagctgttcaacgcaacccaattcattaagcaattatcacagctcggacagaaatag

SEQ ID NO: 189372 - DNA, 1929 bp, Artificial Sequence
  derived and/or modified sequence
atggccgccgccgccgccgccaccgccgccgccgccgccagcatccgagagcgacagactgtcgccctgaagagaatgctgaatttcaatgtgccacacatcaaaaactccaccggggagccagtgtggaaggtgctgatctatgatcggttcggccaggatattatcagcccacttctgtccgttaaggagctgcgcgacatggggatcacacttcatctgctgctacatagcgaccgtgaccccattccggacgtgcctgctgtgtacttcgtgatgccaacagaggaaaacattgacagaatgtgtcaagacctgcgcaatcagctgtacgagtcatactatctgaactttatatctgccataagcagatctaagctagaggacatcgctaacgcagctctcgcagcttccgccgtgacacaggtggcaaaggtctttgaccagtacctcaatttcataaccctggaggacgatatgttcgttctgtgcaaccaaaacaaggagttggtatcctaccgggctataaatcgtcctgatattacagatacggaaatggagaccgtgatggacactatcgttgacagtctcttctgtttcttcgtaacgctgggcgccgttcctattataaggtgcagccgcggaactgccgccgagatggtcgccgttaagctcgacaagaaattgagggagaatctgcgcgacgcccggaacagcctgttcacaggcgacacactgggtgcaggacagtttagttttcagaggccactccttgtgctcgtggatcgcaatattgatctggctacgccccttcaccacacatggacctaccaggccctggtccatgatgtgctagacttccaccttaatagagtgaacctggaagagagttcaggtgttgagaactcacctgcaggagctcggcctaagcggaaaaataagaaatcatatgaccttacccccgtagacaagttctggcagaaacataaaggctctccgtttcctgaagtcgcagaatcagtgcagcaagagctcgagtcttatagagctcaggaagacgaagtgaagcgactgaagagcatcatgggcctggaaggtgaggacgagggagccatcagtatgctttcagataatacagcgaaactaacgtccgccgtgtcttcactgcccgaattgcttgaaaagaaacggttgattgatttacacacgaacgtcgccaccgcagtgttagagcatattaaagctcgcaagcttgacgtctactttgagtatgaggagaagataatgtccaagacgacgcttgataaatcactgctggatatcatatcagaccctgatgctgggaccccggaggacaagatgagactttttcttatctattatattagcactcagcaggctccatctgaggccgaccttgaacagtacaaaaaggccctgacagatgctggatgcaacttaaacccactgcaatacataaagcagtggaaagccttcactaaaatggcctctgctccagctagctacggctcaaccacaactaagccaatgggacttctttctcgagtaatgaatacgggaagccagttcgttatggagggcgttaaaaatcttgtgttaaagcaacagaatctgccggtcacccggatcctagataatctgatggaaatgaagagcaatccggagaccgacgattaccggtatttcgatccaaaaatgctgcgtggcaatgacagctcagtcccccgtaacaagaaccccttccaggaggccattgtcttcgtagttggcggcggcaactacatagagtaccagaatctggtcgactacataaaaggtaagcagggaaagcacatcctgtacggatgctctgagctcttcaacgctacacaatttatcaagcagctttcacaactgggtcagaagtag

SEQ ID NO: 189373 - DNA, 1374 bp, Artificial Sequence
  derived and/or modified sequence
atggagaccgtgatggacaccatcgtggacagcctgttctgcttcttcgtgacccttggcgccgtccctatcatcagatgttctcgcggcacagccgcggagatggtggctgtgaaattggataaaaaactgcgagagaatctgcgagatgcacgaaatagtttgttcacaggcgacactttgggagccggacaattttcctttcaacgtccactgctggtgcttgtagacaggaacattgacttagcaaccccgttgcatcacacatggacataccaagccttggtgcacgatgtgcttgacttccacctcaaccgggtcaaccttgaggagtcatcaggcgttgagaactcccctgctggcgccaggccaaaacgcaagaacaagaaatcctacgatcttacccccgtagataagttctggcagaagcacaagggatccccttttcccgaggttgccgaatctgtacagcaagagctggagtcttacagggcgcaggaagatgaggtgaaacgcctgaagtccataatggggctcgagggtgaagatgagggtgctatatctatgctgagtgacaacacagccaagctgacgagcgctgtgtctagcttgcccgagctgttagaaaaaaagaggctgattgatctccataccaacgtggcaactgcagtccttgagcacataaaggcaagaaagctggatgtgtacttcgaatatgaggaaaaaataatgtccaaaaccacgctggataagtctctgctggacattatctccgatcccgacgctgggactcccgaggataaaatgcggctttttttaatctactacatttcaacacaacaagccccctccgaagcagatctggaacagtacaagaaggctttgactgatgctggatgcaatctaaacccactgcagtacattaagcagtggaaggcgttcacaaagatggcaagcgctcccgctagttacgggagtacgaccacaaaaccaatggggctgctgagccgcgtcatgaacacaggctcccaatttgtcatggaaggagtgaaaaacttagtgctgaagcagcagaacctgcctgttactaggatcttggataacttgatggagatgaaaagtaacccagagacggacgactaccgttattttgaccctaaaatgctccgaggcaatgacagttctgtgccaagaaacaagaatccctttcaagaggccattgtctttgtagtagggggagggaattacatcgagtatcagaatttggtggactatataaaaggcaaacagggcaaacatattctgtacggatgtagcgagctcttcaatgctacccagtttatcaagcaactctcccagctagggcaaaagtag

SEQ ID NO: 189374 - DNA, 1728 bp, Artificial Sequence
  derived and/or modified sequence
atgggcatcaccctgcacctgctgctgcacagcgaccgggaccccattcccgatgtacccgccgtatattttgtgatgcccaccgaggagaatattgatcgtatgtgccaggatttaaggaaccaattatatgaaagctattacctgaatttcatttcagcgatctcaaggtctaagcttgaggatatagctaatgctgcactggcagcgagcgccgtgactcaggttgctaaggtgttcgaccagtatcttaactttataacgcttgaagatgatatgttcgtactgtgcaaccagaataaagagttggtgtcctacagagcgattaacagacccgacattacagatacggagatggaaactgtaatggacactattgtcgacagcctgttctgcttcttcgtcaccttaggcgccgtccctatcatccgatgttctagagggactgcagctgagatggtggctgtgaaactcgataagaagctgcgagagaacctgcgggatgccaggaactccctgtttacaggagacacgctgggggctggccagttctccttccaacgacccttactcgtccttgtggatcgcaacattgaccttgctactcccctgcaccatacgtggacttaccaggctttggtgcacgacgtgctggactttcacctaaaccgggtgaaccttgaggagagcagtggggtggaaaatagccccgccggcgcccggcctaaaaggaaaaataagaaatcttacgacttaacaccggtggacaagttttggcagaaacacaaaggctctccttttcccgaggttgcagaatccgtgcaacaagagcttgagtcttaccgggctcaggaggacgaggtaaaaaggctgaagagtattatgggattggagggcgaggacgaaggggccataagtatgctgtccgacaacaccgccaagctgacctctgctgtgtcatctttgcccgaattactggagaaaaagcgcctgatagatctgcataccaatgtcgctacagctgtgcttgagcatattaaggctcgaaaactagatgtgtacttcgagtatgaggagaagattatgagtaagaccaccctggataagagccttctggatatcatctcagatccggacgcggggacgcccgaggataagatgagactgttcttgatttactatatttcaactcagcaagcacccagcgaggctgacttggagcaatacaagaaggcactcaccgatgctggatgcaatctgaaccccctgcaatacatcaaacagtggaaagccttcaccaaaatggctagtgcccccgcatcttacggctcaaccactacaaagcccatgggactactcagtagagttatgaatacaggcagccagttcgttatggaaggcgtcaagaacctggttctcaaacagcagaacttgcctgttacaagaattttggataatctcatggaaatgaagtccaatccggaaactgatgactaccgatactttgatcctaagatgttgaggggcaatgactcgtccgttcctagaaataagaatccatttcaggaagctattgttttcgtggttggtggcgggaattacatcgagtatcagaacttggtagactacattaaaggaaaacagggaaagcacatcctgtacgggtgctctgagctgtttaatgccacccagtttataaaacagctttcccagctcggtcagaagtag

SEQ ID NO: 189375 - DNA, 1653 bp, Artificial Sequence
  derived and/or modified sequence
atgccgacagaagagaatatcgatagaatgtgccaggatctgaggaaccagttgtatgagtcctattacctgaacttcatctcagccatttcgagaagcaaactcgaagatatcgccaacgccgctctggcagcctctgccgtgactcaagtggccaaagtcttcgaccagtatctcaatttcatcaccctggaggacgacatgttcgtgctatgcaaccaaaataaagagctggtctcatatcgggctataaatcgccctgacatcaccgacacagagatggaaactgtcatggacacgatcgtggacagcctattctgcttcttcgtcacactcggagccgtccctatcatcagatgctcaaggggcacagctgcagaaatggtggctgtgaagctcgacaaaaagctgcgggaaaatctgagagacgcacgcaactccctcttcacaggagacacgctgggcgctggacagtttagcttccaacgaccgttgttagttctggtagacagaaacatcgatctggctactcctctccaccatacctggacctaccaggccctcgtgcacgatgtcctggactttcatctgaatcgggtaaaccttgaggagtcgtccggcgttgaaaactctcctgccggtgctaggcccaagagaaagaacaaaaagagctacgatctgactcccgtggataaattctggcaaaagcataaaggttctccgtttccggaagtcgccgagagcgtacagcaggaactggagtcttatcgagcccaggaggacgaagtgaagagactcaaatctatcatggggctggagggcgaggacgaaggcgctatttcaatgctatccgacaacaccgcaaaactcactagcgccgtgtcctctcttcccgagctactggagaagaaaagactgattgatctgcacacaaatgtggctaccgctgtgctagaacacatcaaagctagaaagctcgacgtgtattttgagtacgaggagaagattatgagtaagaccaccctggacaagagcctgctggacatcatatctgatccagatgcgggaactcctgaggacaagatgagactttttctgatctactatattagtacacagcaagccccatctgaggccgacttggagcagtacaaaaaggccctgacagacgccggttgcaatcttaaccctctgcagtacatcaagcagtggaaagctttcactaagatggcctccgcccctgcctcctatgggtctacaaccactaaacccatgggccttttgagtcgagttatgaacactggaagccagttcgtgatggaaggcgtgaaaaatctggtcctcaagcagcaaaacctacctgtaacacgcatcctggataacttgatggagatgaaaagcaaccctgaaacagacgattacaggtactttgaccccaaaatgctgcgcggaaacgactccagtgtgccaagaaataagaaccccttccaggaagccattgtttttgttgtagggggtggcaattatatagagtatcaaaacctcgtggactacataaaaggaaagcagggcaagcatatactatatgggtgtagcgagctcttcaacgcaactcaattcattaaacagttatcccagttaggtcagaaatag

SEQ ID NO: 189376 - DNA, 1929 bp, Artificial Sequence
  derived and/or modified sequence
atggctgctgccgctgcagccactgccgcagcagcggcttccatcagggaacgacaaacggtggcgctgaaacggatgctaaattttaatgtgcctcatatcaagaactctacaggggaacccgtgtggaaggtgctgatttacgatcggtttggccaggacataatcagtcctctattgtccgtcaaggagcttagggacatggggattacccttcaccttctcctgcacagcgacagggaccccataccagacgtgcctgcagtctatttcgttatgccaaccgaggaaaacatagatcggatgtgtcaagatttaaggaaccagctgtacgagtcgtactacttgaactttatttctgccattagtcggtctaagcttgaagacattgctaacgctgccctggctgcttccgcagtgacgcaggttgcgaaggtgtttgatcaatacctaaacttcataacattggaggatgacatgttcgtgttatgtaaccagaataaagaactcgtgtcttaccgtgcaatcaacagaccagatataactgataccgaaatggaaaccgttatggacaccattgtggattccctcttctgttttttcgtgacgctgggtgctgttccaattattaggtgctcccgtgggaccgcagccgaaatggttgccgtcaagctggataagaagctgcgcgagaacctgagggacgccaggaactccctcttcacgggcgatacactcggggcaggacaatttagctttcagcgacccctgttggttctcgttgatagaaatattgatctcgctacgccactacatcacacctggacctatcaggctctcgtccatgatgtgttagacttccatctgaatcgggtgaacctcgaggaatccagcggtgtggaaaactcccctgccggagcgaggccaaaaagaaaaaataaaaagtcatatgacctgacccctgttgataaattttggcagaagcacaaaggatcaccctttccagaggtggctgagtcagtgcagcaggaattggagagttatagagcccaggaagacgaggtgaaaaggctcaagagcatcatgggccttgagggcgaggacgaaggggctattagtatgctgtctgacaacacagctaagcttactagcgcagtgagtagtctgccagagttgttggagaagaagcggctgatagatctgcacacaaatgtggcaactgctgtgctcgagcacatcaaagctcgtaagcttgatgtttacttcgagtacgaggaaaaaattatgagtaaaaccacccttgacaagagcctgttggatattatttctgacccggatgccggtaccccggaggataaaatgaggctattccttatttattacattagcacgcagcaagccccatctgaagcggacctggaacaatacaaaaaagcactgaccgacgctggatgtaatcttaacccactacagtatattaagcagtggaaagctttcaccaagatggcgagcgctcccgcaagctatggctccacaaccacaaaacccatgggtctcctttcccgcgtcatgaacacgggctcacaattcgtgatggagggggtgaaaaacctggtccttaagcaacagaacctcccagtgacacggatactcgataacctaatggaaatgaaatcaaatcccgagaccgacgactatcgctacttcgaccccaaaatgctgcgcggaaacgactcttctgtgccgagaaacaagaaccccttccaggaggccattgtatttgtggtcggcggaggtaactacatagagtatcagaatctcgtggattacattaaaggtaaacaggggaaacacatcttgtacggctgtagcgagttgttcaacgccacgcagtttataaagcaactcagtcagctcggacagaaatag

SEQ ID NO: 189377 - DNA, 1374 bp, Artificial Sequence
  derived and/or modified sequence
atggaaaccgtcatggacaccattgtggattcgctcttttgctttttcgttactctaggcgctgtgcccattatacgctgtagccgaggcaccgcagcagaaatggtcgcagtgaaattggataagaagcttcgcgagaacttacgcgatgccaggaactcactatttactggcgacactctcggggctggtcaattttcatttcagagacctcttctggtgttggtggaccgcaacatcgatctcgcaacccccctccaccacacttggacataccaggcattagttcacgatgttctcgactttcacttgaacagggtcaatctggaagagagttcaggggtggagaattcacccgcaggagctcggcctaaaagaaagaataaaaagagctacgacctcaccccagtcgataagttttggcagaaacataagggttcacctttccccgaagtcgcggagagcgtgcagcaggagttagagagctaccgggcacaggaggatgaagtaaaacgtctcaagtccattatgggcctcgaaggggaagacgaaggcgctatatccatgctcagcgacaacacagctaagctcaccagcgcggtcagtagcctgcctgaactgctggagaaaaagcgtctgattgacttgcataccaacgtggcaactgccgtcttagagcacattaaggctcggaaattggacgtgtactttgagtacgaagaaaaaattatgtccaagacgacactcgataagtctcttcttgatatcattagcgaccccgatgcaggaacccctgaagataagatgaggttattcctcatttactatataagcacccagcaggcacccagcgaagcagacctcgaacaatacaaaaaagccctaaccgatgcaggttgtaatctgaacccactgcaatacatcaaacagtggaaagcctttactaaaatggcatccgcacccgctagttatggctccacaaccacaaaacccatgggactgctgtctcgggtcatgaacactggcagccagttcgttatggagggcgttaaaaacctggtgctaaagcagcagaacctccctgtgacccgaatactggacaatctaatggagatgaaaagcaatcctgagacggatgactaccgttattttgaccctaagatgttgagaggcaacgattcctccgtgcccaggaacaagaacccctttcaggaggcaattgtgtttgtcgtcggcggtggcaattatatagagtaccagaatctggtcgattacataaagggcaaacagggaaagcatatcctctacggctgttcagaactgtttaatgcaactcagttcattaaacagttgtcccagctcggtcagaagtag

SEQ ID NO: 189378 - DNA, 1728 bp, Artificial Sequence
  derived and/or modified sequence
atggggatcaccttacacttgctcctacactcagatcgcgatccaataccagatgtgcccgctgtctatttcgtcatgcccacggaagaaaacattgacagaatgtgccaggatctgcgcaaccaattatacgagtcttattacctgaatttcatctccgctatctctcggagcaaactggaggacatagccaatgcagctctggctgccagcgccgtcacacaggtggctaaagtcttcgatcagtatctcaacttcattacattagaagatgacatgtttgtactttgcaaccagaataaagagctagtgtcataccgggcaattaaccgcccagatataaccgatacagagatggagacggtgatggataccatcgttgatagcctattttgttttttcgtgacacttggcgcagtgcctattattcgctgctctcgcggtacagccgctgaaatggtggctgtgaaattagataaaaaactacgcgagaatctcagggacgccaggaattccttgttcacgggcgatactctgggagcaggacagttctcttttcaacgacccctgttggtgttggtggacagaaacatcgacctggctacacccctccaccacacttggacgtaccaggcgctagttcacgatgttttagatttccatctcaatagagtcaacctcgaggaatcttcgggcgttgaaaattctccggcaggcgctagacctaagagaaaaaataaaaagagctatgatttgacaccagtagataagttctggcagaaacataagggaagtccatttcctgaagtcgccgaatcggtccagcaggaactcgaatcttaccgggctcaggaggatgaggtcaaaagactgaaatcgatcatggggttagaaggggaggatgagggcgcaatttccatgctgtctgacaatacagctaaactgacttcggctgtgagctccctgcctgaattactagagaagaaacgcctcatcgacctgcataccaacgtggctacagctgttttagaacacatcaaggcccgaaagctggacgtctacttcgaatatgaggagaagattatgtcgaagacgactctggataagagtctgctagacatcatatctgatcctgacgctggcacacctgaagacaagatgcgcctttttttgatctactatattagcacgcaacaagcaccatctgaagcggacctcgagcagtacaagaaggcgctcactgacgctgggtgcaaccttaatcctctgcagtacatcaaacagtggaaagcttttactaaaatggcctccgccccagcctcttacgggtccacaactacaaaacccatgggactattgtctagggtcatgaatacaggctcccagtttgtgatggaaggagttaagaacctggtactgaagcagcagaatctccctgtgacacgaatcttagacaacttgatggaaatgaaaagcaatccggaaaccgacgattataggtacttcgacccgaagatgctgagaggcaatgactcgagcgtgccaaggaacaaaaatccctttcaggaagctattgtcttcgtggtgggagggggtaattatatcgaatatcagaacctggtcgactatattaaaggcaagcagggtaaacacatactgtacggttgctctgagctgttcaatgccacccaatttatcaagcagctctcccagcttggtcaaaagtag

SEQ ID NO: 189379 - DNA, 2021 bp, Artificial Sequence
  derived and/or modified sequence
agccaagatggcggcggcggcggcagcgacagcagcagcagcagccagtattcgggaaaggcagacaggtactgacttattctcttctccttgaagcttcgtgactgccccgacgacatccttctcctctggcttttacactctgatcgagatcctattccagatgttcctgcagtatactttgtaatgccaactgaagaaaatattgacagaatgtgccaggatcttcgaaatcaactatatgaatcatattatttaaattttatttctgctatttcaagaagtaaactggaagatattgcaaatgcagcgttagcagctagtgcagtaacacaagtagccaaggtttttgaccaatatctcaattttattactttggaagatgatatgtttgtattatgtaatcaaaataaggagcttgtttcatatcgtgccattaacaggccagatatcacagacacggaaatggaaactgttatggacactatagttgacagcctcttctgcttttttgttactctgggtgctgttcctataatcagatgttcaagaggaacagcagcagaaatggtagcagtgaaactagacaagaaacttcgagaaaatctaagagatgcaagaaacagtctttttacaggtgatacacttggagctggccaattcagcttccagaggcccttattagtccttgttgacagaaacatagatttggcaactcctttacatcatacttggacatatcaagcattggtgcacgatgtactggatttccatttaaacagggttaatttggaagaatcttcaggagtggaaaactctccagctggtgctagaccaaagagaaaaaacaagaagtcttatgatttaactccggttgataaattttggcaaaaacataaaggaagtccattcccagaagttgcagaatcagttcagcaagaactagaatcttacagagcacaggaagatgaggtcaaacgacttaaaagcattatgggactagaaggggaagatgaaggagccataagtatgctttctgacaataccgctaagctaacatcagctgttagttctttgccagaactccttgagaaaaaaagacttattgatctccatacaaatgttgccactgctgttttagaacatataaaggcaagaaaattggatgtatattttgaatatgaagaaaaaataatgagcaaaactactctggataaatctcttctagatataatatcagaccctgatgcaggaactccagaagataaaatgaggttgtttcttatctattatataagcacacagcaagcaccttctgaggctgatttggagcaatataaaaaagctttaactgatgcaggatgcaaccttaatcctttacaatatatcaaacagtggaaggcttttaccaagatggcctcagctccggccagctatggcagcactaccactaaaccaatgggtcttttatcacgagtcatgaatacaggatcacagtttgtgatggaaggagtgaagaacctggttttgaaacagcaaaatctacctgttactcgtattttggacaatcttatggagatgaagtcaaaccccgaaactgatgactatagatattttgatcccaaaatgctgcggggcaatgacagctcagttcccagaaataaaaatccattccaagaggccattgtttttgtggtgggaggaggcaactacattgaatatcagaatcttgttgactacataaaggggaaacaaggcaaacacattttatatggctgcagtgagctttttaatgctacacagttcataaaacagttgtcacaacttggacaaaagtaacacagaagaaccttactatgataatctacttggaatgtggataaatgtaaaaagaagaaaagttagaagagcaatatgtttccttctctgtaacagtgtcctaacagtgaaaatcagagttatttgttaatttttaaggaaattatatacttaatatgtattgattaaaagaaacatttcag

SEQ ID NO: 189380 - DNA, 2359 bp, Artificial Sequence
  derived and/or modified sequence
aggataaaaactcttagtattcgcctaacattacgggccactgaattaacctgcaccgggtctcccagttctaccgagagtggaggtcttcctggaggaggtggggtccggaactcaggcacaccctttggccccgcccttccgggctttgcttccggggcggtaagggcagccacgtcatccccccgctccgctccccagccgggcagtggctcgtgggagccaagatggcggcggcggcggcagcgacagcagcagcagcagccagtattcgggaaaggcagacagtggctttgaagcgtatgttgaatttcaatgtgcctcatattaaaaacagcacaggagaaccagtatggaaggtactcatttatgacagatttggccaagatataatctctcctctgctatctgtgaaggagctaagagacatgggaatcactctgcatctgcttttacactctgatcgagatcctattccagatgttcctgcagtatactttgtaatgccaactgaagaaaatattgacagaatgtgccaggatcttcgaaatcaactatatgaatcatattatttaaattttatttctgctatttcaagaagtaaactggaagatattgcaaatgcagcgttagcagctagtgcagtaacacaagtagccaaggtttttgaccaatatctcaattttattactttggaagatgatatgtttgtattatgtaatcaaaataaggagcttgtttcatatcgtgccattaacaggccagatatcacagacacggaaatggaaactgttatggacactatagttgacagcctcttctgcttttttgttactctgggtgctgttcctataatcagatgttcaagaggaacagcagcagaaatggtagcagtgaaactagacaagaaacttcgagaaaatctaagagatgcaagaaacagtctttttacaggtgatacacttggagctggccaattcagcttccagaggcccttattagtccttgttgacagaaacatagatttggcaactcctttacatcatacttggacatatcaagcattggtgcacgatgtactggatttccatttaaacagggttaatttggaagaatcttcaggagtggaaaactctccagctggtgctagaccaaagagaaaaaacaagaagtcttatgatttaactccggttgataaattttggcaaaaacataaaggaagtccattcccagaagttgcagaatcagttcagcaagaactagaatcttacagagcacaggaagatgaggtcaaacgacttaaaagcattatgggactagaaggggaagatgaaggagccataagtatgctttctgacaataccgctaagctaacatcagctgttagttctttgccagaactccttgagaaaaaaagacttattgatctccatacaaatgttgccactgctgttttagaacatataaaggcaagaaaattggatgtatattttgaatatgaagaaaaaataatgagcaaaactactctggataaatctcttctagatataatatcagaccctgatgcaggaactccagaagataaaatgaggttgtttcttatctattatataagcacacagcaagcaccttctgaggctgatttggagcaatataaaaaagctttaactgatgcaggatgcaaccttaatcctttacaatatatcaaacagtggaaggcttttaccaagatggcctcagctccggccagctatggcagcactaccactaaaccaatgggtcttttatcacgagtcatgaatacaggatcacagtttgtgatggaaggagtgaagaacctggttttgaaacagcaaaatctacctgttactcgtattttggacaatcttatggagatgaagtcaaaccccgaaactgatgactatagatattttgatcccaaaatgctgcggggcaatgacagctcagttcccagaaataaaaatccattccaagaggccattgtttttgtggtgggaggaggcaactacattgaatatcagaatcttgttgactacataaaggggaaacaaggcaaacacattttatatggctgcagtgagctttttaatgctacacagttcataaaacagttgtcacaacttggacaaaagtaacacagaagaaccttactatgataatctacttggaatgtggataaatgtaaaaagaagaaaagttagaagagcaatatgtttccttctctgtaacagtgtcctaacagtgaaaatcagagttatttgttaatttttaaggaaattatatacttaatatgtattgattaaaagaaacatttcagaaataaaatttcaacattgtt

SEQ ID NO: 189381 - DNA, 2016 bp, Artificial Sequence
  derived and/or modified sequence
gtgggagccaagatggcggcggcggcggcagcgacagcagcagcagcagccagtattcgggaaaggcagacagtggctttgaagcgtatgttgaatttcaatgtgcctcatattaaaaacagcacaggagaaccagtatggaaggtactcatttatgacagatttggccaagatataatctctcctctgctatctgtgaaggagctaagagacatgggaatcactctgcatctgcttttacactctgatcgagatcctattccagatgttcctgcagtatactttgtaatgccaactgaagaaaatattgacagaatgtgccaggatcttcgaaatcaactatatgaatcatattatttaaattttatttctgctatttcaagaagtaaactggaagatattgcaaatgcagcgttagcagctagtgcagtaacacaagtagccaagccattaacaggccagatatcacagacacggaaatggaaactgttatggacactatagttgacagcctcttctgcttttttgttactctgggtgctgttcctataatcagatgttcaagaggaacagcagcagaaatggtagcagtgaaactagacaagaaacttcgagaaaatctaagagatgcaagaaacagtctttttacaggtgatacacttggagctggccaattcagcttccagaggcccttattagtccttgttgacagaaacatagatttggcaactcctttacatcatacttggacatatcaagcattggtgcacgatgtactggatttccatttaaacagggttaatttggaagaatcttcaggagtggaaaactctccagctggtgctagaccaaagagaaaaaacaagaagtcttatgatttaactccggttgataaattttggcaaaaacataaaggaagtccattcccagaagttgcagaatcagttcagcaagaactagaatcttacagagcacaggaagatgaggtcaaacgacttaaaagcattatgggactagaaggggaagatgaaggagccataagtatgctttctgacaataccgctaagctaacatcagctgttagttctttgccagaactccttgagaaaaaaagacttattgatctccatacaaatgttgccactgctgttttagaacatataaaggcaagaaaattggatgtatattttgaatatgaagaaaaaataatgagcaaaactactctggataaatctcttctagatataatatcagaccctgatgcaggaactccagaagataaaatgaggttgtttcttatctattatataagcacacagcaagcaccttctgaggctgatttggagcaatataaaaaagctttaactgatgcaggatgcaaccttaatcctttacaatatatcaaacagtggaaggcttttaccaagatggcctcagctccggccagctatggcagcactaccactaaaccaatgggtcttttatcacgagtcatgaatacaggatcacagtttgtgatggaaggagtgaagaacctggttttgaaacagcaaaatctacctgttactcgtattttggacaatcttatggagatgaagtcaaaccccgaaactgatgactatagatattttgatcccaaaatgctgcggggcaatgacagctcagttcccagaaataaaaatccattccaagaggccattgtttttgtggtgggaggaggcaactacattgaatatcagaatcttgttgactacataaaggggaaacaaggcaaacacattttatatggctgcagtgagctttttaatgctacacagttcataaaacagttgtcacaacttggacaaaagtaacacagaagaaccttactatgataatctacttggaatgtggataaatgtaaaaagaagaaaagttagaagagcaatatgtttccttctctgtaacagtgtcctaacagtgaaaatcagagttatttgttaatttttaaggaaattatatacttaatatgtattg

SEQ ID NO: 189382 - DNA, 2058 bp, Artificial Sequence
  derived and/or modified sequence
agtggctcgtgggagccaagatggcggcggcggcggcagcgacagcagcagcagcagccagtattcgggaaaggcagacaggtactcatttatgacagatttggccaagatataatctctcctctgctatctgtgaaggagctaagagacatgggaatcactctgcatctgcttttacactctgatcgagatcctattccagatgttcctgcagtatactttgtaatgccaactgaagaaaatattgacagaatgtgccaggatcttcgaaatcaactatatgaatcatattatttaaattttatttctgctatttcaagaagtaaactggaagatattgcaaatgcagcgttagcagctagtgcagtaacacaagtagccaaggtttttgaccaatatctcaattttattactttggaagatgatatgtttgtattatgtaatcaaaataaggagcttgtttcatatcgtgccattaacaggccagatatcacagacacggaaatggaaactgttatggacactatagttgacagcctcttctgcttttttgttactctgggtgctgttcctataatcagatgttcaagaggaacagcagcagaaatggtagcagtgaaactagacaagaaacttcgagaaaatctaagagatgcaagaaacagtctttttacaggtgatacacttggagctggccaattcagcttccagaggcccttattagtccttgttgacagaaacatagatttggcaactcctttacatcatacttggacatatcaagcattggtgcacgatgtactggatttccatttaaacagggttaatttggaagaatcttcaggagtggaaaactctccagctggtgctagaccaaagagaaaaaacaagaagtcttatgatttaactccggttgataaattttggcaaaaacataaaggaagtccattcccagaagttgcagaatcagttcagcaagaactagaatcttacagagcacaggaagatgaggtcaaacgacttaaaagcattatgggactagaaggggaagatgaaggagccataagtatgctttctgacaataccgctaagctaacatcagctgttagttctttgccagaactccttgagaaaaaaagacttattgatctccatacaaatgttgccactgctgttttagaacatataaaggcaagaaaattggatgtatattttgaatatgaagaaaaaataatgagcaaaactactctggataaatctcttctagatataatatcagaccctgatgcaggaactccagaagataaaatgaggttgtttcttatctattatataagcacacagcaagcaccttctgaggctgatttggagcaatataaaaaagctttaactgatgcaggatgcaaccttaatcctttacaatatatcaaacagtggaaggcttttaccaagatggcctcagctccggccagctatggcagcactaccactaaaccaatgggtcttttatcacgagtcatgaatacaggatcacagtttgtgatggaaggagtgaagaacctggttttgaaacagcaaaatctacctgttactcgtattttggacaatcttatggagatgaagtcaaaccccgaaactgatgactatagatattttgatcccaaaatgctgcggggcaatgacagctcagttcccagaaataaaaatccattccaagaggccattgtttttgtggtgggaggaggcaactacattgaatatcagaatcttgttgactacataaaggggaaacaaggcaaacacattttatatggctgcagtgagctttttaatgctacacagttcataaaacagttgtcacaacttggacaaaagtaacacagaagaaccttactatgataatctacttggaatgtggataaatgtaaaaagaagaaaagttagaagagcaatatgtttccttctctgtaacagtgtcctaacagtgaaaatcagagttatttgttaatttttaaggaaattatatacttaatatgtattgattaaaagaaacatttc

SEQ ID NO: 189383 - protein, 1074 aa, Artificial Sequence
  derived and/or modified sequence
MIPICPVVSFTYVPSRLGEDAKMATGNYFGFTHSGAAAAAAAAQYSQQPASGVAYSHPTTVASYTVHQAPVAAHTVTAAYAPAAATVAVARPAPVAVAAAATAAAYGGYPTAHTATDYGYTQRQQEAPPPPPPATTQNYQDSYSYVRSTAPAVAYDSKQYYQQPTATAAAVAAAAQPQPSVAETYYQTAPKAGYSQGATQYTQAQQTRQVTAIKPATPSPATTTFSIYPVSSTVQPVAAAATVVPSYTQSATYSTTAVTYSGTSYSGYEAAVYSAASSYYQQQQQQQKQAAAAAAAAAATAAWTGTTFTKKAPFQNKQLKPKQPPKPPQIHYCDVCKISCAGPQTYKEHLEGQKHKKKEAALKASQNTSSSNSSTRGTQNQLRCELCDVSCTGADAYAAHIRGAKHQKVVKLHTKLGKPIPSTEPNVVSQATSSTAVSASKPTASPSSIAANNCTVNTSSVATSSMKGLTTTGNSSLNSTSNTKVSAVPTNMAAKKTSTPKINFVGGNKLQSTGNKAEDIKGTECVKSTPVTSAVQIPEVKQDTVSEPVTPASLAALQSDVQPVGHDYVEEVRNDEGKVIRFHCKLCECSFNDPNAKEMHLKGRRHRLQYKKKVNPDLQVEVKPSIRARKIQEEKMRKQMQKEEYWRRREEEERWRMEMRRYEEDMYWRRMEEEQHHWDDRRRMPDGGYPHGPPGPLGLLGVRPGMPPQPQGPAPLRRPDSSDDRYVMTKHATIYPTEEELQAVQKIVSITERALKLVSDSLSEHEKNKNKEGDDKKEGGKDRALKGVLRVGVLAKGLLLRGDRNVNLVLLCSEKPSKTLLSRIAENLPKQLAVISPEKYDIKCAVSEAAIILNSCVEPKMQVTITLTSPIIREENMREGDVTSGMVKDPPDVLDRQKCLDALAALRHAKWFQARANGLQSCVIIIRILRDLCQRVPTWSDFPSWAMELLVEKAISSASSPQSPGDALRRVFECISSGIILKGSPGLLDPCEKDPFDTLATMTDQQREDITSSAQFALRLLAFRQIHKVLGMDPLPQMSQRFNIHNNRKRRRDSDGVDGFEAEGKKDKKDYDNF

SEQ ID NO: 189384 - protein, 189 aa, Artificial Sequence
  derived and/or modified sequence
MIPICPVVSFTYVPSRLGEDAKMATGNYFGFTHSGAAAAAAAAQYSQQPASGVAYSHPTTVASYTVHQAPVAAHTVTAAYAPAAATVAVARPAPVAVAAAATAAAYGGYPTAHTATDYGYTQRQQEAPPPPPPATTQNYQDSYSYVRSTAPAVAYDSKQYYQQPAATEAGSSSSCCCCCNSCLDRDHLY

SEQ ID NO: 189385 - protein, 1056 aa, Artificial Sequence
  derived and/or modified sequence
MATGNYFGFTHSGAAAAAAAAQYSQQPASGVAYSHPTTVASYTVHQAPVAAHTVTAAYAPAAATVAVARPAPVAVAAAATAAAYGGYPTAHTATDYGYTQRQQEAPPPPPPATTQNYQDSYSYVRSTAPAVAYDSKQYYQQPTATAAAVAAAAQPQPSVAETYYQTAPKAGYSQGATQYTQAQQTRQVTAIKPATPSPATTTFSIYPVSSTVQPVAAAATVVPSYTQSATYSTTAVTYSGTSYSGYEAAVYSAASSYYQQQQQQQKQAAAAAAAAAATAAWTGTTFTKKAPFQNKQLKPKQPPKPPQIHYCDVCKISCAGPQTYKEHLEGQKHKKKEAALKASQNTSSSNSSTRGTQNQLRCELCDVSCTGADAYAAHIRGAKHQKVVKLHTKLGKPIPSTEPNVVSQATSSTAVSASKPTASPSSIAANNCTVNTSSVATSSMKGLTTTGNSSLNSTSNTKVSAVPTNMAAKKTSTPKINFVGGNKLQSTGNKAEDIKGTECVKSTPVTSAVQIPEVKQDTVSEPVTPASLAALQSDVQPVGHDYVEEVRNDEGKVIRFHCKLCECSFNDPNAKEMHLKGRRHRLQYKKKVNPDLQVEVKPSIRARKIQEEKMRKQMQKEEYWRRREEEERWRMEMRRYEEDMYWRRMEEEQHHWDDRRRMPDGGYPHGPPGPLGLLGVRPGMPPQPQGPAPLRRPDSSDDRYVMTKHATIYPTEEELQAVQKIVSITERALKLVSDSLSEHEKNKNKEGDDKKEGGKDRALKGVLRVGVLAKGLLLRGDRNVNLVLLCSEKPSKTLLSRIAENLPKQLAVISPEKYDIKCAVSEAAIILNSCVEPKMQVTITLTSPIIREENMREGDVTSGMVKDPPDVLDRQKCLDALAALRHAKWFQQARANGLQSCVIIIRILRDLCQRVPTWSDFPSWAMELLVEKAISSASSPQSPGDALRRVFECISSGIILKGSPGLLDPCEKDPFDTLATMTDQQREDITSSAQFALRLLAFRQIHKVLGMDPLPQMSQRFNIHNNRKRRRDSDGMDLKLRGKKTKKIMITFKKCL

SEQ ID NO: 189386 - DNA, 4746 bp, Artificial Sequence
  derived and/or modified sequence
gttctccgctgaggaggagcggggcagaggagggaggcagcgggtgagagttcagagttcagcagcagcagcccgagcccatgattcccatatgccctgtagtttctttcacctatgtgcccagccggctgggggaagatgccaaaatggcgaccggcaactactttggattcacccacagcggggcggcggcggcggcggctgcggcccaatatagccagcagccagcttcgggtgtagcctattctcatccaactacagttgctagctacactgtccatcaggctccagtagctgctcacacagttactgctgcctatgcaccagcagccgccacagttgcagttgccaggcctgctccagtagctgttgcagctgctgcaacagctgctgcttatggaggctaccccactgcacacacagcaactgactatggttatactcagaggcaacaagaagcaccaccaccaccacccccagctactacacaaaactaccaggattcatactcatatgtaaggtccacagctcctgctgtagcttatgatagtaagcaatactaccaacaaccaacagcaactgctgctgctgtagctgccgctgcccaacctcagccttctgttgctgaaacttactatcagacagcccccaaagcaggttacagccaaggtgcaactcagtatactcaagcccagcaaactcgacaagtgacagccataaaaccagccacaccaagtccagctaccactactttctccatctatcctgtatcctccaccgtacagccagtagcagctgcggctactgtggtgccatcctatactcagagtgctacttacagtaccacagcagttacatattctggtacgtcttattcaggttatgaagcagcagtgtattcagctgcatcttcctactatcaacagcagcagcagcaacagaagcaggcagcagcagcagctgctgctgctgctgcaacagctgcctggacagggaccacctttactaaaaaagcaccattccaaaataaacaactgaaaccaaaacagcctcccaaaccaccacagattcactattgtgatgtttgtaagatcagctgtgctggaccacagacttataaagaacatttagaaggacagaaacataaaaaaaaagaagctgcattgaaagcctcacaaaataccagcagcagcaacagttctactcgtgggactcaaaatcagctacgttgtgagctctgcgatgtgtcttgtacaggagcagatgcgtatgctgcccacattcgtggtgctaagcatcagaaagtggttaagttacacacaaaacttggtaaacccattccatcaacagaaccaaatgttgttagccaagctacttcttcaacagctgtatctgcttcaaagccgactgcctctccttcaagcattgcagcaaacaattgtactgtgaatacgtcatcagttgcaacgtcttcaatgaagggtcttacgactacaggaaactcgtctcttaatagcacatctaacactaaagtatcagcagtgcctacaaatatggctgccaagaaaacatctacccccaaaataaattttgttggtggtaataagctgcagtcaacaggaaataaagcagaagacataaaaggaaccgaatgtgttaaaagtactcctgtcacttctgctgtgcagattcctgaagtaaagcaagacacagtgtcagaaccagtcacacctgcatctcttgctgctttacagagtgatgtgcagccagtgggccatgattatgtggaagaggtacgaaatgatgaaggaaaagtaattcggttccattgtaaattatgcgagtgcagctttaatgatcccaatgctaaggagatgcacttaaaagggcgaagacacagacttcaatataaaaaaaaagtaaatccagatttgcaagtagaagtaaagcctagtattcgagcaagaaagattcaagaagagaaaatgaggaagcaaatgcagaaggaggagtactggcgaagacgagaagaagaggagcgttggagaatggaaatgagacgttatgaagaggacatgtactggaggagaatggaggaagaacaacatcattgggatgatcgccgccgaatgccagatggaggttatcctcatggtcctccaggcccattaggccttctgggagtccgaccaggcatgcctcctcagcctcaggggcctgcacccttacgtcgtcctgactcatctgatgaccgttatgtaatgacaaaacatgccaccatttatccaactgaagaggagttacaggcagttcagaaaattgtttctattactgaacgtgctttaaaactcgtttcagacagtttgtctgaacatgagaagaacaagaacaaagagggagatgataagaaagagggaggtaaagacagagctttgaaaggagttttgcgagtgggagtattggcaaaaggattacttctccgaggagatagaaatgtcaaccttgttttgctgtgctcagagaaaccttcaaagacattattaagccgtattgcagaaaacctacccaaacagcttgctgttataagccctgagaagtatgacataaaatgtgctgtatctgaagcggcaataattttgaattcatgtgtggaacccaaaatgcaagtcactatcacactgacatctccaattattcgagaagagaacatgagggaaggagatgtaacctcgggtatggtgaaagacccaccggacgtcttggacaggcaaaaatgccttgacgctctggctgctctacgccacgctaagtggttccaggctagagctaatggtctgcagtcctgtgtgattatcatacgcattcttcgagacctctgtcagcgagttccaacttggtctgattttccaagctgggctatggagttactagtagagaaagcaatcagcagtgcttctagccctcagagccctggggatgcactgagaagagtttttgaatgcatttcttcagggattattcttaaaggtagtcctggacttctggatccttgtgaaaaggatccctttgataccttggcaacaatgactgaccagcagcgtgaagacatcacatccagtgcacagtttgcattgagactccttgcattccgccagatacacaaagttctaggcatggatccattaccgcaaatgagccaacgttttaacatccacaacaacaggaaacgaagaagagatagtgatggagttgatggatttgaagctgaggggaaaaaagacaaaaaagattatgataacttttaaaaagtgtctgtaaatcttcagtgttaaaaaaacagatgcccatttgttggctgtttttcattcataataatgtctacattgaaaaatttatcaagaatttaaaggatttcatggaagaaccaagtttttctatgatattaaaaaatgtacagtgttaggtattatttgaatggaaagacacccaaaaaaaaaaatgtgctccgactagggggaaaacagtagttccgattttttcccattatttttattttattttctggttgccctagcttccccccctatttttgtgtcttttattaactagtgcattgtcttattaaatcttcactgtatttaatgcaggatgtgtgcttcagttgctctgtgtattttgatattttaatttagaggttttgtttgctttttgacactagttgtaagttactttgttatagatggtatcctttaccccttcttaatattttacagcagtacgtttttttgtaacgtgagactgcagagtttgtttttctatatgtgaaggattacaacacaaaaagttatcctgccattcgagtgctcagaactgaatgtttctgcagatcttgtggcatttgtctctagtgtgatatataaaggtgtaattaagacagagttctgttaatctaatcaagtttgctgttagttgtgcattagcagtataaaagctaatatatactatatggtcttgcaacagttttaaagcctctgcataattgataataaaaatgcatgacattcttgtttttaatagacttttaaaatcataattttaggtttaacacgtagatctttgtacagttgactttttgacatagcaaggccaaaaataactttctgaatatttttttcttgtgtataagtggaaagggcatttttcacatataagtgggctaaccaatattttcaaaagaacttcatcattgtacaactaacaacagtaactagcccttaattatggtgacagttccttattggtgtgtgtgagattactctagcaactattacagtataacacagatgatcttctccacacaccccatcacccagataatttacagttctgttaacagtgaggttgataaagtattactgataaaaaattatctaaggaaaaaaacagaaaattatttggtgtggccatcttacctgcttatgtctcctacacaaagctaaatattctagcagtgatgtaatgaaaaattacatcttactgttgatatatgtatgctctggtacacagatgtcattttgttgtcacagcactacagtgaaatacacaaaaaatgaaattcatataatgacttaaatgtattatatgttagaattgacaacataaactacttttgctttgaaatgatgtatgcttcagtaaaatcatattcaaatttaaaaaaaaaaaaaaaaaaaaaaaaaaaaaaaa

SEQ ID NO: 189387 - DNA, 4738 bp, Artificial Sequence
  derived and/or modified sequence
agtgcggtcggaggcggcggtctgttctccgctgaggaggagcggggcagaggagggaggcagcgggtgagagttcagagttcagcagcagcagcccgagcccatgattcccatatgccctgtagtttctttcacctatgtgcccagccggctgggggaagatgccaaaatggcgaccggcaactactttggattcacccacagcggggcggcggcggcggcggctgcggcccaatatagccagcagccagcttcgggtgtagcctattctcatccaactacagttgctagctacactgtccatcaggctccagtagctgctcacacagttactgctgcctatgcaccagcagccgccacagttgcagttgccaggcctgctccagtagctgttgcagctgctgcaacagctgctgcttatggaggctaccccactgcacacacagcaactgactatggttatactcagaggcaacaagaagcaccaccaccaccacccccagctactacacaaaactaccaggattcatactcatatgtaaggtccacagctcctgctgtagcttatgatagtaagcaatactaccaacaaccaacagcaactgctgctgctgtagctgccgctgcccaacctcagccttctgttgctgaaacttactatcagacagcccccaaagcaggttacagccaaggtgcaactcagtatactcaagcccagcaaactcgacaagtgacagccataaaaccagccacaccaagtccagctaccactactttctccatctatcctgtatcctccaccgtacagccagtagcagctgcggctactgtggtgccatcctatactcagagtgctacttacagtaccacagcagttacatattctggtacgtcttattcaggttatgaagcagcagtgtattcagctgcatcttcctactatcaacagcagcagcagcaacagaagcaggcagcagcagcagctgctgctgctgctgcaacagctgcctggacagggaccacctttactaaaaaagcaccattccaaaataaacaactgaaaccaaaacagcctcccaaaccaccacagattcactattgtgatgtttgtaagatcagctgtgctggaccacagacttataaagaacatttagaaggacagaaacataaaaaaaaagaagctgcattgaaagcctcacaaaataccagcagcagcaacagttctactcgtgggactcaaaatcagctacgttgtgagctctgcgatgtgtcttgtacaggagcagatgcgtatgctgcccacattcgtggtgctaagcatcagaaagtggttaagttacacacaaaacttggtaaacccattccatcaacagaaccaaatgttgttagccaagctacttcttcaacagctgtatctgcttcaaagccgactgcctctccttcaagcattgcagcaaacaattgtactgtgaatacgtcatcagttgcaacgtcttcaatgaagggtcttacgactacaggaaactcgtctcttaatagcacatctaacactaaagtatcagcagtgcctacaaatatggctgccaagaaaacatctacccccaaaataaattttgttggtggtaataagctgcagtcaacaggaaataaagcagaagacataaaaggaaccgaatgtgttaaaagtactcctgtcacttctgctgtgcagattcctgaagtaaagcaagacacagtgtcagaaccagtcacacctgcatctcttgctgctttacagagtgatgtgcagccagtgggccatgattatgtggaagaggtacgaaatgatgaaggaaaagtaattcggttccattgtaaattatgcgagtgcagctttaatgatcccaatgctaaggagatgcacttaaaagggcgaagacacagacttcaatataaaaaaaaagtaaatccagatttgcaagtagaagtaaagcctagtattcgagcaagaaagattcaagaagagaaaatgaggaagcaaatgcagaaggaggagtactggcgaagacgagaagaagaggagcgttggagaatggaaatgagacgttatgaagaggacatgtactggaggagaatggaggaagaacaacatcattgggatgatcgccgccgaatgccagatggaggttatcctcatggtcctccaggcccattaggccttctgggagtccgaccaggcatgcctcctcagcctcaggggcctgcacccttacgtcgtcctgactcatctgatgaccgttatgtaatgacaaaacatgccaccatttatccaactgaagaggagttacaggcagttcagaaaattgtttctattactgaacgtgctttaaaactcgtttcagacagtttgtctgaacatgagaagaacaagaacaaagagggagatgataagaaagagggaggtaaagacagagctttgaaaggagttttgcgagtgggagtattggcaaaaggattacttctccgaggagatagaaatgtcaaccttgttttgctgtgctcagagaaaccttcaaagacattattaagccgtattgcagaaaacctacccaaacagcttgctgttataagccctgagaagtatgacataaaatgtgctgtatctgaagcggcaataattttgaattcatgtgtggaacccaaaatgcaagtcactatcacactgacatctccaattattcgagaagagaacatgagggaaggagatgtaacctcgggtatggtgaaagacccaccggacgtcttggacaggcaaaaatgccttgacgctctggctgctctacgccacgctaagtggttccaggctagagctaatggtctgcagtcctgtgtgattatcatacgcattcttcgagacctctgtcagcgagttccaacttggtctgattttccaagctgggctatggagttactagtagagaaagcaatcagcagtgcttctagccctcagagccctggggatgcactgagaagagtttttgaatgcatttcttcagggattattcttaaaggtagtcctggacttctggatccttgtgaaaaggatccctttgataccttggcaacaatgactgaccagcagcgtgaagacatcacatccagtgcacagtttgcattgagactccttgcattccgccagatacacaaagttctaggcatggatccattaccgcaaatgagccaacgttttaacatccacaacaacaggaaacgaagaagagatagtgatggagttgatggatttgaagctgaggggaaaaaagacaaaaaagattatgataacttttaaaaagtgtctgtaaatcttcagtgttaaaaaaacagatgcccatttgttggctgtttttcattcataataatgtctacattgaaaaatttatcaagaatttaaaggatttcatggaagaaccaagtttttctatgatattaaaaaatgtacagtgttaggtattatttgaatggaaagacacccaaaaaaaaaaatgtgctccgactagggggaaaacagtagttccgattttttcccattatttttattttattttctggttgccctagcttccccccctatttttgtgtcttttattaactagtgcattgtcttattaaatcttcactgtatttaatgcaggatgtgtgcttcagttgctctgtgtattttgatattttaatttagaggttttgtttgctttttgacactagttgtaagttactttgttatagatggtatcctttaccccttcttaatattttacagcagtacgtttttttgtaacgtgagactgcagagtttgtttttctatatgtgaaggattacaacacaaaaagttatcctgccattcgagtgctcagaactgaatgtttctgcagatcttgtggcatttgtctctagtgtgatatataaaggtgtaattaagacagagttctgttaatctaatcaagtttgctgttagttgtgcattagcagtataaaagctaatatatactatatggtcttgcaacagttttaaagcctctgcataattgataataaaaatgcatgacattcttgtttttaatagacttttaaaatcataattttaggtttaacacgtagatctttgtacagttgactttttgacatagcaaggccaaaaataactttctgaatatttttttcttgtgtataagtggaaagggcatttttcacatataagtgggctaaccaatattttcaaaagaacttcatcattgtacaactaacaacagtaactagcccttaattatggtgacagttccttattggtgtgtgtgagattactctagcaactattacagtataacacagatgatcttctccacacaccccatcacccagataatttacagttctgttaacagtgaggttgataaagtattactgataaaaaattatctaaggaaaaaaacagaaaattatttggtgtggccatcttacctgcttatgtctcctacacaaagctaaatattctagcagtgatgtaatgaaaaattacatcttactgttgatatatgtatgctctggtacacagatgtcattttgttgtcacagcactacagtgaaatacacaaaaaatgaaattcatataatgacttaaatgtattatatgttagaattgacaacataaactacttttgctttgaaatgatgtatgcttcagtaaaatcatattcaaattta

SEQ ID NO: 189388 - DNA, 650 bp, Artificial Sequence
  derived and/or modified sequence
gttctccgctgaggaggagcggggcagaggagggaggcagcgggtgagagttcagagttcagcagcagcagcccgagcccatgattcccatatgccctgtagtttctttcacctatgtgcccagccggctgggggaagatgccaaaatggcgaccggcaactactttggattcacccacagcggggcggcggcggcggcggctgcggcccaatatagccagcagccagcttcgggtgtagcctattctcatccaactacagttgctagctacactgtccatcaggctccagtagctgctcacacagttactgctgcctatgcaccagcagccgccacagttgcagttgccaggcctgctccagtagctgttgcagctgctgcaacagctgctgcttatggaggctaccccactgcacacacagcaactgactatggttatactcagaggcaacaagaagcaccaccaccaccacccccagctactacacaaaactaccaggattcatactcatatgtaaggtccacagctcctgctgtagcttatgatagtaagcaatactaccaacaaccagcagcaacagaagcaggcagcagcagcagctgctgctgctgctgcaacagctgcctggacagggaccacctttactaa

SEQ ID NO: 189389 - DNA, 3317 bp, Artificial Sequence
  derived and/or modified sequence
gttctccgctgaggaggagcggggcagaggagggaggcagcgggtgagagttcagagttcagcagcagcagcccgagcccatgattcccatatgccctgtagtttctttcacctatgtgcccagccggctgggggaagatgccaaaatggcgaccggcaactactttggattcacccacagcggggcggcggcggcggcggctgcggcccaatatagccagcagccagcttcgggtgtagcctattctcatccaactacagttgctagctacactgtccatcaggctccagtagctgctcacacagttactgctgcctatgcaccagcagccgccacagttgcagttgccaggcctgctccagtagctgttgcagctgctgcaacagctgctgcttatggaggctaccccactgcacacacagcaactgactatggttatactcagaggcaacaagaagcaccaccaccaccacccccagctactacacaaaactaccaggattcatactcatatgtaaggtccacagctcctgctgtagcttatgatagtaagcaatactaccaacaaccaacagcaactgctgctgctgtagctgccgctgcccaacctcagccttctgttgctgaaacttactatcagacagcccccaaagcaggttacagccaaggtgcaactcagtatactcaagcccagcaaactcgacaagtgacagccataaaaccagccacaccaagtccagctaccactactttctccatctatcctgtatcctccaccgtacagccagtagcagctgcggctactgtggtgccatcctatactcagagtgctacttacagtaccacagcagttacatattctggtacgtcttattcaggttatgaagcagcagtgtattcagctgcatcttcctactatcaacagcagcagcagcaacagaagcaggcagcagcagcagctgctgctgctgctgcaacagctgcctggacagggaccacctttactaaaaaagcaccattccaaaataaacaactgaaaccaaaacagcctcccaaaccaccacagattcactattgtgatgtttgtaagatcagctgtgctggaccacagacttataaagaacatttagaaggacagaaacataaaaaaaaagaagctgcattgaaagcctcacaaaataccagcagcagcaacagttctactcgtgggactcaaaatcagctacgttgtgagctctgcgatgtgtcttgtacaggagcagatgcgtatgctgcccacattcgtggtgctaagcatcagaaagtggttaagttacacacaaaacttggtaaacccattccatcaacagaaccaaatgttgttagccaagctacttcttcaacagctgtatctgcttcaaagccgactgcctctccttcaagcattgcagcaaacaattgtactgtgaatacgtcatcagttgcaacgtcttcaatgaagggtcttacgactacaggaaactcgtctcttaatagcacatctaacactaaagtatcagcagtgcctacaaatatggctgccaagaaaacatctacccccaaaataaattttgttggtggtaataagctgcagtcaacaggaaataaagcagaagacataaaaggaaccgaatgtgttaaaagtactcctgtcacttctgctgtgcagattcctgaagtaaagcaagacacagtgtcagaaccagtcacacctgcatctcttgctgctttacagagtgatgtgcagccagtgggccatgattatgtggaagaggtacgaaatgatgaaggaaaagtaattcggttccattgtaaattatgcgagtgcagctttaatgatcccaatgctaaggagatgcacttaaaagggcgaagacacagacttcaatataaaaaaaaagtaaatccagatttgcaagtagaagtaaagcctagtattcgagcaagaaagattcaagaagagaaaatgaggaagcaaatgcagaaggaggagtactggcgaagacgagaagaagaggagcgttggagaatggaaatgagacgttatgaagaggacatgtactggaggagaatggaggaagaacaacatcattgggatgatcgccgccgaatgccagatggaggttatcctcatggtcctccaggcccattaggccttctgggagtccgaccaggcatgcctcctcagcctcaggggcctgcacccttacgtcgtcctgactcatctgatgaccgttatgtaatgacaaaacatgccaccatttatccaactgaagaggagttacaggcagttcagaaaattgtttctattactgaacgtgctttaaaactcgtttcagacagtttgtctgaacatgagaagaacaagaacaaagagggagatgataagaaagagggaggtaaagacagagctttgaaaggagttttgcgagtgggagtattggcaaaaggattacttctccgaggagatagaaatgtcaaccttgttttgctgtgctcagagaaaccttcaaagacattattaagccgtattgcagaaaacctacccaaacagcttgctgttataagccctgagaagtatgacataaaatgtgctgtatctgaagcggcaataattttgaattcatgtgtggaacccaaaatgcaagtcactatcacactgacatctccaattattcgagaagagaacatgagggaaggagatgtaacctcgggtatggtgaaagacccaccggacgtcttggacaggcaaaaatgccttgacgctctggctgctctacgccacgctaagtggttccagcaagctagagctaatggtctgcagtcctgtgtgattatcatacgcattcttcgagacctctgtcagcgagttccaacttggtctgattttccaagctgggctatggagttactagtagagaaagcaatcagcagtgcttctagccctcagagccctggggatgcactgagaagagtttttgaatgcatttcttcagggattattcttaaaggtagtcctggacttctggatccttgtgaaaaggatccctttgataccttggcaacaatgactgaccagcagcgtgaagacatcacatccagtgcacagtttgcattgagactccttgcattccgccagatacacaaagttctaggcatggatccattaccgcaaatgagccaacgttttaacatccacaacaacaggaaacgaagaagagatagtgatggaatggatttgaagctgaggggaaaaaagacaaaaaagattatgataacttttaaaaagtgtctgtaa

SEQ ID NO: 189390 - DNA, 3171 bp, Artificial Sequence
  derived and/or modified sequence
atggccaccggcaactacttcggcttcacccacagcggcgccgccgccgccgccgccgccgcccagtacagccagcagcccgccagcggcgtggcctacagccaccccaccaccgtggccagctacaccgtgcaccaggcccccgtggccgcccacaccgtgaccgccgcctacgcccccgccgccgccaccgtggccgtggccagacccgcccccgtggccgtggccgccgccgccaccgccgccgcctacggcggctaccccaccgcccacaccgccaccgactacggctacacccagagacagcaggaggccccccccccccccccccccgccaccacccagaactaccaggacagctacagctacgtgagaagcaccgcccccgccgtggcctacgacagcaagcagtactaccagcagcccaccgccaccgccgccgccgtggccgccgccgcccagccccagcccagcgtggccgagacctactaccagaccgcccccaaggccggctacagccagggcgccacccagtacacccaggcccagcagaccagacaggtgaccgccatcaagcccgccacccccagccccgccaccaccaccttcagcatctaccccgtgagcagcaccgtgcagcccgtggccgccgccgccaccgtggtgcccagctacacccagagcgccacctacagcaccaccgccgtgacctacagcggcaccagctacagcggctacgaggccgccgtgtacagcgccgccagcagctactaccagcagcagcagcagcagcagaagcaggccgccgccgccgccgccgccgccgccgccaccgccgcctggaccggcaccaccttcaccaagaaggcccccttccagaacaagcagctgaagcccaagcagccccccaagcccccccagatccactactgcgacgtgtgcaagatcagctgcgccggcccccagacctacaaggagcacctggagggccagaagcacaagaagaaggaggccgccctgaaggccagccagaacaccagcagcagcaacagcagcaccagaggcacccagaaccagctgagatgcgagctgtgcgacgtgagctgcaccggcgccgacgcctacgccgcccacatcagaggcgccaagcaccagaaggtggtgaagctgcacaccaagctgggcaagcccatccccagcaccgagcccaacgtggtgagccaggccaccagcagcaccgccgtgagcgccagcaagcccaccgccagccccagcagcatcgccgccaacaactgcaccgtgaacaccagcagcgtggccaccagcagcatgaagggcctgaccaccaccggcaacagcagcctgaacagcaccagcaacaccaaggtgagcgccgtgcccaccaacatggccgccaagaagaccagcacccccaagatcaacttcgtgggcggcaacaagctgcagagcaccggcaacaaggccgaggacatcaagggcaccgagtgcgtgaagagcacccccgtgaccagcgccgtgcagatccccgaggtgaagcaggacaccgtgagcgagcccgtgacccccgccagcctggccgccctgcagagcgacgtgcagcccgtgggccacgactacgtggaggaggtgagaaacgacgagggcaaggtgatcagattccactgcaagctgtgcgagtgcagcttcaacgaccccaacgccaaggagatgcacctgaagggcagaagacacagactgcagtacaagaagaaggtgaaccccgacctgcaggtggaggtgaagcccagcatcagagccagaaagatccaggaggagaagatgagaaagcagatgcagaaggaggagtactggagaagaagagaggaggaggagagatggagaatggagatgagaagatacgaggaggacatgtactggagaagaatggaggaggagcagcaccactgggacgacagaagaagaatgcccgacggcggctacccccacggcccccccggccccctgggcctgctgggcgtgagacccggcatgcccccccagccccagggccccgcccccctgagaagacccgacagcagcgacgacagatacgtgatgaccaagcacgccaccatctaccccaccgaggaggagctgcaggccgtgcagaagatcgtgagcatcaccgagagagccctgaagctggtgagcgacagcctgagcgagcacgagaagaacaagaacaaggagggcgacgacaagaaggagggcggcaaggacagagccctgaagggcgtgctgagagtgggcgtgctggccaagggcctgctgctgagaggcgacagaaacgtgaacctggtgctgctgtgcagcgagaagcccagcaagaccctgctgagcagaatcgccgagaacctgcccaagcagctggccgtgatcagccccgagaagtacgacatcaagtgcgccgtgagcgaggccgccatcatcctgaacagctgcgtggagcccaagatgcaggtgaccatcaccctgaccagccccatcatcagagaggagaacatgagagagggcgacgtgaccagcggcatggtgaaggacccccccgacgtgctggacagacagaagtgcctggacgccctggccgccctgagacacgccaagtggttccagcaggccagagccaacggcctgcagagctgcgtgatcatcatcagaatcctgagagacctgtgccagagagtgcccacctggagcgacttccccagctgggccatggagctgctggtggagaaggccatcagcagcgccagcagcccccagagccccggcgacgccctgagaagagtgttcgagtgcatcagcagcggcatcatcctgaagggcagccccggcctgctggacccctgcgagaaggaccccttcgacaccctggccaccatgaccgaccagcagagagaggacatcaccagcagcgcccagttcgccctgagactgctggccttcagacagatccacaaggtgctgggcatggaccccctgccccagatgagccagagattcaacatccacaacaacagaaagagaagaagagacagcgacggcatggacctgaagctgagaggcaagaagaccaagaagatcatgatcaccttcaagaagtgcctgtag

SEQ ID NO: 189391 - DNA, 570 bp, Artificial Sequence
  derived and/or modified sequence
atgatccccatctgccccgtggtgagcttcacctacgtgcccagcagactgggcgaggacgccaagatggccaccggcaactacttcggcttcacccacagcggcgccgccgccgccgccgccgccgcccagtacagccagcagcccgccagcggcgtggcctacagccaccccaccaccgtggccagctacaccgtgcaccaggcccccgtggccgcccacaccgtgaccgccgcctacgcccccgccgccgccaccgtggccgtggccagacccgcccccgtggccgtggccgccgccgccaccgccgccgcctacggcggctaccccaccgcccacaccgccaccgactacggctacacccagagacagcaggaggccccccccccccccccccccgccaccacccagaactaccaggacagctacagctacgtgagaagcaccgcccccgccgtggcctacgacagcaagcagtactaccagcagcccgccgccaccgaggccggcagcagcagcagctgctgctgctgctgcaacagctgcctggacagagaccacctgtactag

SEQ ID NO: 189392 - DNA, 3225 bp, Artificial Sequence
  derived and/or modified sequence
atgatacctatctgcccagtggtatccttcacatatgtgccgtcacgcctgggcgaagacgccaagatggccacaggcaactatttcgggtttactcatagcggagcagctgcggccgccgccgctgcccaatactcacagcaacccgctagtggagtggcttattcgcacccaactactgtggccagttacactgtccaccaggcccccgtcgctgcccacacagtgaccgccgcgtatgcccccgctgccgcaacggtggctgtggcaagaccagcccccgtggccgtggccgcagccgccacagcagccgcctatggcggctatccgactgctcatacagctacggattacggttacacacagcgacagcaggaggctccacctccccctcccccagccactacccaaaactatcaagactcttattcctatgtgcgttctaccgcccctgccgtggcctatgactctaagcagtattatcagcaacccacagctaccgcggccgctgtggcagctgctgctcagcctcagccctctgtcgctgagacttattaccagactgcgcccaaagccggctatagccaaggcgcaacccagtatactcaggcacaacagactaggcaggttacagccattaagcctgcaaccccctctcctgccacaactacattcagcatctaccccgtgtcttcaaccgtccagccagtggcagccgccgccaccgtggttcccagctacacacagtcagccacatatagtaccacagctgtgacttatagcggcacctcatactccggatatgaggccgcggtgtacagcgccgcgagctcttactatcagcagcagcagcagcagcagaagcaagcagccgcagcagctgccgccgctgcagccaccgccgcatggacaggtacaacttttacaaaaaaagctcccttccagaacaagcagctaaagccgaagcagcctccaaaaccccctcagatccattactgtgatgtgtgcaaaatttcatgtgccggaccacagacctataaagagcatctcgagggccagaaacataaaaagaaagaggcagcactcaaagcttcccagaacacatcttccagcaactcatcaaccaggggaacgcagaatcaactgaggtgtgaactatgtgacgtttcttgtaccggtgctgatgcttacgccgcccacatcagaggggccaagcatcaaaaagtagttaagctgcacacaaagttgggtaagcccatcccctcgactgaacctaacgtagtatcccaagccacctcctctactgccgtctccgcgtctaaacctaccgctagtccctcttcaattgcagccaacaactgcactgtcaacactagttccgtggctaccagcagtatgaagggcctgaccaccaccggtaacagcagtctgaactctacaagtaatactaaggtctcagcagtgcctacaaatatggctgctaaaaaaacctctacacctaagattaacttcgtaggaggaaataaactccagtcaacagggaataaagctgaggatatcaaaggaaccgaatgcgtaaagtctacccctgtgacctctgctgtgcagattcccgaggtgaagcaggacacagtatccgaaccagtgacacccgcttctctggcagcactccagagcgatgtgcagcctgtaggtcacgattatgtagaggaggtcaggaatgatgagggcaaggtcatcagattccactgtaaactgtgtgaatgcagcttcaacgacccaaacgcgaaagaaatgcacctgaagggaagaagacatcgcttgcagtataagaaaaaagtcaaccctgaccttcaggtagaagtgaagcctagtattagggcgagaaagatacaggaagagaagatgaggaaacagatgcaaaaggaggaatactggaggcgtagggaagaggaagaacgatggcggatggaaatgagacgatatgaagaagatatgtactggcgaagaatggaagaggagcaacaccactgggatgacaggcggcggatgccagacggcggatacccccacggtcccccaggccccttggggttgctgggagtgcgtcccgggatgccccctcagcctcagggtccggcaccacttcgcaggccagactctagcgatgataggtatgttatgacaaaacacgctacaatctatccaactgaagaagaactccaagcggtgcagaaaattgttagcatcactgagagggcccttaaattggtttcagacagtctgtcagaacatgaaaagaacaaaaataaagaaggagacgacaagaaggagggggggaaggaccgggccctcaaaggtgtcttgagggtgggtgtgcttgccaaagggcttcttctccggggtgaccgtaacgtcaatctggtgctgctgtgttctgagaagccctcaaaaactcttctctctagaattgccgagaacctgccaaagcagctcgctgtgatttcacccgagaagtacgatattaaatgtgctgtaagcgaggccgctatcatccttaacagttgcgtagagcccaagatgcaggtaaccatcactctgacctccccaatcatccgcgaagaaaacatgcgcgagggggatgtgactagcggcatggtcaaagaccctcccgacgtcctcgaccggcagaagtgtctggatgctctggcggcactgcggcacgctaaatggttccaggctagagccaatggacttcagtcctgtgtgatcataattcgcattctcagagatctgtgtcaacgcgtccctacttggtccgactttccttcctgggctatggagttacttgtggaaaaggctattagctccgcgagctcgccacagtcaccaggggatgcattgcgacgcgtgtttgaatgtattagctctggaatcattcttaagggatctcctgggctccttgatccttgcgaaaaggaccccttcgacacattggcgacaatgactgaccaacagcgggaagatatcacttcctcagcccagtttgcgctccggcttttggcttttcgacagattcacaaagtgcttggcatggatcctctgccccagatgagtcagcgctttaacattcataacaacagaaagcggcgacgcgactctgatggggtcgatggcttcgaagccgaggggaaaaaagataagaaggactacgacaatttttag

SEQ ID NO: 189393 - DNA, 3171 bp, Artificial Sequence
  derived and/or modified sequence
atggcaactgggaattacttcggatttacgcatagcggtgctgccgccgctgcagccgcagcccaatatagccagcaacccgcaagcggtgtggcctactcccacccaactactgttgccagctataccgttcaccaggccccagtggccgcccacacagtgacggccgcctacgcccccgctgcagcaacggttgctgtggcacgaccagcgcccgtggccgtggccgctgcagccacagctgctgcctacgggggataccccactgctcacacagcaaccgactacgggtacacccagcggcagcaggaggcaccaccacccccccctcctgccacaacccagaattatcaggattcttacagttacgtacggtccaccgcccctgccgtggcctacgactcaaaacagtattatcaacagcctacagccacggccgcggccgttgctgccgccgcccaacctcagccatcagtggctgaaacttattaccagactgcacccaaagcgggatactcccagggggctacccagtatacccaggcccagcagacgcgtcaggttacagcgattaagccagctacacccagcccagccacgacaactttctcaatctatccggtcagctctactgtgcaaccagtcgcagctgccgcgaccgtcgttccgagctacacacagagcgccacctacagcactacagcggtgacctatagtggaacgtcgtactcagggtacgaagcagcagtgtacagcgctgcatctagttattaccagcagcaacaacagcaacagaagcaggccgcagcagcagccgcagccgccgcagccacagcagcatggaccggcacgacgttcactaaaaaagccccgtttcagaacaaacagttaaaacccaagcaaccacccaagcctccccagattcactactgcgacgtgtgcaaaattagctgcgcgggaccacaaacgtataaagaacacttagaaggtcagaagcataaaaagaaggaagctgccctgaaagcatcccagaacacctcttctagcaactccagtaccaggggcacacagaaccagctccgctgcgaattgtgcgacgtgtcatgcaccggtgcagacgcttatgcagcccacataagaggggctaagcaccagaaggttgtcaagcttcacaccaagctcggaaagccgatacccagcacagagcccaacgtagtttctcaggccacatcctctacagctgtgagcgcctccaagccaactgcatcgccgtccagcattgcagcaaacaattgtactgtgaacacgtcttcagtcgccacatcctcaatgaagggactgacaacaactggcaattcctccctgaatagcacttccaacacgaaggtcagcgccgtgcccactaacatggcggccaaaaagacctccaccccaaagattaactttgtggggggaaataagctgcagagcacagggaacaaagctgaggatatcaaagggaccgagtgtgtgaagtcaacgcccgtaacctccgctgtccagataccagaagtcaagcaggacactgtgagcgagcccgtgacccctgcctctctggccgcccttcaatcagatgtgcagccagtaggacatgactatgttgaggaggtccggaacgatgaaggaaaggtcatcagattccattgtaagctgtgtgaatgctcctttaatgaccccaacgccaaggaaatgcacttgaaaggcaggaggcacagactgcagtacaaaaagaaagtgaatcctgacctgcaggtcgaagtaaaacccagtatacgagccagaaaaatccaagaagaaaaaatgcggaagcagatgcagaaggaagaatactggcggaggcgagaagaggaagagagatggcgtatggagatgcgccgctatgaggaggacatgtactggagacgtatggaggaggaacagcatcattgggacgacagacggcgtatgccagatggcggatacccccacggtcccccaggaccgctgggattgcttggtgtgagaccaggtatgcctccgcagccacagggacctgctcctctgagacgacccgattcatcggacgataggtacgtgatgacgaagcacgccacaatatacccaactgaggaggagttgcaagccgtccagaaaatcgtcagcattaccgagcgggcacttaaattagtatcagacagcctgtcagaacacgagaagaataagaataaagagggcgatgataagaaagagggaggaaaagatagggcgctcaaaggcgtcctgcgcgttggtgtgttagccaaggggctgctcctgagaggcgacagaaacgttaacctggtactgttatgttcagaaaaaccatccaagaccctcctctcgcgcatcgccgaaaacctcccgaagcagctggcggtgatctctccggagaagtacgacatcaaatgtgccgttagtgaggccgccattatcctcaactcatgtgtcgagcccaagatgcaggtgacaataacgctcaccagcccaataatccgagaagaaaatatgcgcgagggcgacgtgacgtccggaatggtgaaagatccccctgatgtcctggataggcagaaatgtttggacgctctggcggctctcagacacgcaaaatggttccaacaagctagagccaacggcttgcaatcctgcgtcattatcatccgaatcctcagagatctgtgtcagcgggtcccgacctggtctgattttccctcctgggccatggaactgctagtggaaaaagcaatttctagtgctagctctcctcaaagtccgggagatgccttgcgaagggttttcgagtgtattagttccgggatcatcctcaaggggtctcccggcctgttagacccctgcgaaaaagatccctttgatacccttgcaacaatgaccgaccagcagagagaagacatcacatcctcagcacagttcgctctgcggcttctggcatttcgccaaatccacaaagttctgggcatggatccgctcccgcaaatgagtcaaaggttcaacattcacaataaccggaaaagacgccgcgatagcgatgggatggacctgaagcttagaggaaagaaaacgaagaaaatcatgattacctttaagaagtgtctgtag

SEQ ID NO: 189394 - DNA, 570 bp, Artificial Sequence
  derived and/or modified sequence
atgatcccaatttgccctgttgtgtccttcacctatgttccatcccgcctcggcgaggacgcaaaaatggctaccggcaattacttcggcttcacccactcaggagctgctgccgccgccgcagccgcgcagtactcgcagcagcctgcttcaggcgtcgcctattcccatccgaccacggtggcttcctacacagtgcaccaggcccccgtcgccgcacacactgtcacagcggcttacgcaccagcggccgcaacagtggcggtagcgaggcccgcgcccgttgcagtggctgctgctgccacagccgcagcttatggggggtaccctaccgcacacacagctacagactacgggtacacacaacggcagcaggaagccccaccccctccaccacccgccacaacccagaattaccaggatagctactcttacgtccgatcaacagcccccgcagtggcgtatgatagcaagcagtactatcagcagccagcagccactgaagctggaagctcttccagctgttgctgttgctgtaattcatgcctggatagggatcatctgtattag

SEQ ID NO: 189395 - DNA, 3225 bp, Artificial Sequence
  derived and/or modified sequence
atgatccccatctgccctgtggtgtccttcacctacgtgcccagccggctgggagaagatgccaagatggccactggaaactacttcggcttcacccacagcggggctgctgctgctgctgctgctgcccagtacagccagcagcctgccagcggcgtggcctacagccaccccaccaccgtggccagctacacagtgcaccaggcccctgtggccgcccacacagtgacagctgcctatgccccagctgctgccaccgtggccgtggcccggcctgcccctgtggccgtggccgccgccgccacagctgctgcctacggcggctaccccacagcccacacagccacagattatggctacacccagaggcagcaggaggcccctcctcctcctcctccagccaccacccagaactaccaggacagctacagctatgtgcgcagcacagccccagctgtggcctatgacagcaagcagtactaccagcagcccacagccacagctgctgctgtggccgccgccgcccagccccagcccagcgtggccgagacctactaccagacagcccccaaggccggctacagccagggcgccacccagtacacccaggcccagcagacccggcaggtgacagccatcaagccagccacccccagccctgccaccaccaccttcagcatctaccctgtgagcagcacagtgcagcctgtggccgccgccgccaccgtggtgcccagctacacccagagcgccacctacagcaccacagctgtgacctacagcggcaccagctacagcggctatgaggccgctgtgtacagcgctgccagcagctactaccagcagcagcagcagcagcagaagcaggccgctgctgctgctgctgctgctgctgccacagctgcctggacaggcaccaccttcaccaagaaggcccccttccagaacaagcagctgaagcccaagcagccccccaagccaccccagatccactactgtgatgtgtgcaagatcagctgtgccggcccccagacctacaaggagcacctggagggccagaagcacaagaagaaggaggccgccctgaaggccagccagaacaccagcagcagcaacagcagcacccggggcacccagaaccagctgcgctgtgagctgtgtgatgtgtcctgcaccggggctgatgcctatgctgcccacatccggggggccaagcaccagaaggtggtgaagctgcacaccaagctgggcaagcccatccccagcacagagcccaacgtggtgtcccaggccaccagcagcacagctgtgtctgccagcaagcccacagccagccccagcagcattgctgccaacaactgcaccgtgaacaccagctctgtggccaccagctccatgaagggcctgaccaccaccggcaacagcagcctgaacagcaccagcaacaccaaggtgtctgctgtgcccaccaacatggccgccaagaagaccagcacccccaagatcaactttgtgggcggcaacaagctgcagagcactggaaacaaggccgaggacatcaagggcacagaatgtgtgaagagcacccctgtgaccagcgctgtgcagatccctgaggtgaagcaggacacagtgtctgagcctgtgaccccagccagcctggccgccctgcagagtgatgtgcagcctgtgggccatgactatgtggaggaggtgagaaatgatgagggcaaggtgatccgcttccactgcaagctgtgtgagtgcagcttcaatgaccccaatgccaaggagatgcacctgaagggccgccgccaccggctgcagtacaagaagaaggtgaacccagacctgcaggtggaggtgaagcccagcatccgggccaggaagatccaggaggagaagatgaggaagcagatgcagaaggaggagtactggaggcggcgggaggaggaggagcgctggaggatggagatgagaagatatgaggaggacatgtactggaggaggatggaggaggagcagcaccactgggatgacagaagaaggatgccagatggcggctacccccacggccccccaggccccctgggcctgctgggcgtgcggcccggcatgccaccccagccccagggccctgcccccctgcggcggccagacagcagtgatgaccgctacgtgatgaccaagcacgccaccatctaccccacagaggaggagctgcaggccgtgcagaagatcgtgtccatcacagagcgggccctgaagctggtgtctgacagcctgtctgaacatgagaagaacaagaacaaggagggagatgacaagaaggagggcggcaaggaccgggccctgaagggcgtgctgcgggtgggcgtgctggccaagggcctgctgctgcggggggacagaaatgtgaacctggtgctgctgtgcagcgagaagcccagcaagaccctgctgagcagaattgctgagaacctgcccaagcagctggccgtcatcagccctgagaagtatgacatcaagtgtgctgtgtctgaggccgccatcatcctgaacagctgtgtggagcccaagatgcaggtgaccatcaccctgaccagccccatcatccgggaggagaacatgagagaaggagatgtgaccagcggcatggtgaaggaccccccagatgtgctggaccggcagaagtgcctggatgccctggccgccctgcggcatgccaagtggttccaggcccgggccaacggcctgcagagctgtgtgatcatcatccgcatcctgcgggacctgtgccagagggtgcccacctggagcgacttccccagctgggccatggagctgctggtggagaaggccatcagcagcgccagcagcccccagagccctggagatgccctgcggcgggtgtttgagtgcatcagcagcggcatcatcctgaagggcagccctggcctgctggacccctgtgagaaggacccctttgacaccctggccaccatgacagaccagcagcgggaggacatcaccagcagcgcccagtttgccctgcggctgctggccttccggcagatccacaaggtgctgggcatggaccccctgccccagatgagccagcgcttcaacatccacaacaacaggaagagaagaagagacagtgatggagtggatggctttgaggccgagggcaagaaggacaagaaggactatgacaacttctag

SEQ ID NO: 189396 - DNA, 3171 bp, Artificial Sequence
  derived and/or modified sequence
atggccactggaaactacttcggcttcacccacagcggggctgctgctgctgctgctgctgcccagtacagccagcagcctgccagcggcgtggcctacagccaccccaccaccgtggccagctacacagtgcaccaggcccctgtggccgcccacacagtgacagctgcctatgccccagctgctgccaccgtggccgtggcccggcctgcccctgtggccgtggccgccgccgccacagctgctgcctacggcggctaccccacagcccacacagccacagattatggctacacccagaggcagcaggaggcccctcctcctcctcctccagccaccacccagaactaccaggacagctacagctatgtgcgcagcacagccccagctgtggcctatgacagcaagcagtactaccagcagcccacagccacagctgctgctgtggccgccgccgcccagccccagcccagcgtggccgagacctactaccagacagcccccaaggccggctacagccagggcgccacccagtacacccaggcccagcagacccggcaggtgacagccatcaagccagccacccccagccctgccaccaccaccttcagcatctaccctgtgagcagcacagtgcagcctgtggccgccgccgccaccgtggtgcccagctacacccagagcgccacctacagcaccacagctgtgacctacagcggcaccagctacagcggctatgaggccgctgtgtacagcgctgccagcagctactaccagcagcagcagcagcagcagaagcaggccgctgctgctgctgctgctgctgctgccacagctgcctggacaggcaccaccttcaccaagaaggcccccttccagaacaagcagctgaagcccaagcagccccccaagccaccccagatccactactgtgatgtgtgcaagatcagctgtgccggcccccagacctacaaggagcacctggagggccagaagcacaagaagaaggaggccgccctgaaggccagccagaacaccagcagcagcaacagcagcacccggggcacccagaaccagctgcgctgtgagctgtgtgatgtgtcctgcaccggggctgatgcctatgctgcccacatccggggggccaagcaccagaaggtggtgaagctgcacaccaagctgggcaagcccatccccagcacagagcccaacgtggtgtcccaggccaccagcagcacagctgtgtctgccagcaagcccacagccagccccagcagcattgctgccaacaactgcaccgtgaacaccagctctgtggccaccagctccatgaagggcctgaccaccaccggcaacagcagcctgaacagcaccagcaacaccaaggtgtctgctgtgcccaccaacatggccgccaagaagaccagcacccccaagatcaactttgtgggcggcaacaagctgcagagcactggaaacaaggccgaggacatcaagggcacagaatgtgtgaagagcacccctgtgaccagcgctgtgcagatccctgaggtgaagcaggacacagtgtctgagcctgtgaccccagccagcctggccgccctgcagagtgatgtgcagcctgtgggccatgactatgtggaggaggtgagaaatgatgagggcaaggtgatccgcttccactgcaagctgtgtgagtgcagcttcaatgaccccaatgccaaggagatgcacctgaagggccgccgccaccggctgcagtacaagaagaaggtgaacccagacctgcaggtggaggtgaagcccagcatccgggccaggaagatccaggaggagaagatgaggaagcagatgcagaaggaggagtactggaggcggcgggaggaggaggagcgctggaggatggagatgagaagatatgaggaggacatgtactggaggaggatggaggaggagcagcaccactgggatgacagaagaaggatgccagatggcggctacccccacggccccccaggccccctgggcctgctgggcgtgcggcccggcatgccaccccagccccagggccctgcccccctgcggcggccagacagcagtgatgaccgctacgtgatgaccaagcacgccaccatctaccccacagaggaggagctgcaggccgtgcagaagatcgtgtccatcacagagcgggccctgaagctggtgtctgacagcctgtctgaacatgagaagaacaagaacaaggagggagatgacaagaaggagggcggcaaggaccgggccctgaagggcgtgctgcgggtgggcgtgctggccaagggcctgctgctgcggggggacagaaatgtgaacctggtgctgctgtgcagcgagaagcccagcaagaccctgctgagcagaattgctgagaacctgcccaagcagctggccgtcatcagccctgagaagtatgacatcaagtgtgctgtgtctgaggccgccatcatcctgaacagctgtgtggagcccaagatgcaggtgaccatcaccctgaccagccccatcatccgggaggagaacatgagagaaggagatgtgaccagcggcatggtgaaggaccccccagatgtgctggaccggcagaagtgcctggatgccctggccgccctgcggcatgccaagtggttccagcaggcccgggccaacggcctgcagagctgtgtgatcatcatccgcatcctgcgggacctgtgccagagggtgcccacctggagcgacttccccagctgggccatggagctgctggtggagaaggccatcagcagcgccagcagcccccagagccctggagatgccctgcggcgggtgtttgagtgcatcagcagcggcatcatcctgaagggcagccctggcctgctggacccctgtgagaaggacccctttgacaccctggccaccatgacagaccagcagcgggaggacatcaccagcagcgcccagtttgccctgcggctgctggccttccggcagatccacaaggtgctgggcatggaccccctgccccagatgagccagcgcttcaacatccacaacaacaggaagagaagaagagacagtgatggcatggacctgaagctgcggggcaagaagaccaagaagatcatgatcaccttcaagaagtgcctgtag

SEQ ID NO: 189397 - DNA, 570 bp, Artificial Sequence
  derived and/or modified sequence
atgatccccatctgccctgtggtgtccttcacctacgtgcccagccggctgggagaagatgccaagatggccactggaaactacttcggcttcacccacagcggggctgctgctgctgctgctgctgcccagtacagccagcagcctgccagcggcgtggcctacagccaccccaccaccgtggccagctacacagtgcaccaggcccctgtggccgcccacacagtgacagctgcctatgccccagctgctgccaccgtggccgtggcccggcctgcccctgtggccgtggccgccgccgccacagctgctgcctacggcggctaccccacagcccacacagccacagattatggctacacccagaggcagcaggaggcccctcctcctcctcctccagccaccacccagaactaccaggacagctacagctatgtgcgcagcacagccccagctgtggcctatgacagcaagcagtactaccagcagcctgctgccacagaagctggcagcagcagcagctgctgctgctgctgcaacagctgcctggaccgggaccacctgtactag

SEQ ID NO: 189398 - DNA, 3225 bp, Artificial Sequence
  derived and/or modified sequence
atgatccccatctgccccgtggtgagcttcacctacgtgcccagccgattgggggaagacgccaagatggctacaggcaactactttggatttacacactcaggcgctgcagccgcggccgccgccgcccaatacagccagcagcctgcatctggagttgcttattcccaccctaccacggtcgcaagctacactgtgcatcaggcgcctgtggccgcccacacggtcacagcggcctatgcaccagccgcggccactgtggcggtcgccagaccggctccagtggctgtggcagccgccgctaccgctgcggcttatgggggatatccaacggcccacactgctacggattacggctatacacaaagacagcaggaggcccctcctcctccgccccctgctacgacacagaattatcaggatagttattcctatgtcaggtccaccgcccctgctgtcgcttacgatagcaaacagtactatcagcaacctacagcaaccgccgccgccgtggcggctgcggcccaaccccaaccaagtgttgctgaaacttattaccagaccgctcctaaggccggatacagccagggggctacccagtacacccaggcccagcagacgcgccaggtgaccgctatcaagcctgcaacccccagtcccgcaaccacaactttttcaatataccccgtgtcttctaccgtacagccagtggccgctgctgcgactgtggtacccagctatacccagtctgctacctactctacaaccgcagtgacctactcgggtacctcctatagcggctacgaagcggctgtgtattccgccgcctcttcatactatcagcaacagcagcagcagcagaaacaggccgccgcggccgccgcagcggctgcagctacagcagcgtggaccggcaccaccttcacaaagaaggcaccattccaaaacaaacagctgaagcccaagcagccaccaaagcccccccaaattcactattgcgacgtctgcaagatctcttgtgcaggtccacaaacatataaagagcacctcgaaggtcaaaagcacaagaagaaagaggccgcactgaaagcatcccagaacacaagctcctccaacagctccacccgcggaacccagaatcagcttagatgtgaactgtgcgacgtgtcatgcacaggagcagatgcatacgctgcccacatcaggggcgccaagcatcagaaagtggttaaactacatactaagttgggcaaaccgatccctagcaccgagcctaacgtggtttcccaagcaacaagttctacagctgtttcagcgtcaaaacccactgccagcccctcatcaatcgctgctaacaattgcaccgtcaacacgtccagtgtggctacttcttcaatgaaggggctgactacgacgggcaactcaagtctcaactccacatccaatacaaaggtctctgcggtgcctacaaatatggctgccaagaaaacttctacccccaaaatcaacttcgtgggtggcaataaactgcagagtactggaaacaaggctgaggacatcaaaggcacagaatgcgtgaaatctacacccgtgacaagtgccgtccaaatccctgaagtgaagcaggacacagtctccgagcccgtcacaccagcgagcttagccgcactacaatccgacgtgcagccagtgggccatgactacgtggaggaggttcgcaacgatgaaggaaaggtgattcgtttccattgtaaactttgcgaatgcagtttcaatgacccaaatgccaaagaaatgcacttgaaaggcagacggcatcgtctgcagtataagaaaaaggttaaccccgatctccaagtggaagtcaaaccgagcatccgggcgagaaaaatacaggaggagaaaatgcgaaaacagatgcagaaggaagagtactggcgccgaagagaggaggaagagaggtggcgcatggagatgcgaagatacgaggaggatatgtattggagacggatggaagaggagcagcaccattgggacgatcgccgccgaatgcctgacggcggttatccacacggccctcctggacctctgggactcctgggagttcggcccgggatgcctccacaacctcagggaccggctcctctgcgtagaccagattcctctgatgaccgctatgtcatgactaagcacgccactatctaccctaccgaagaagagttgcaagctgtccagaaaattgtgtccattactgagagggccctcaaacttgtctccgatagcctcagtgaacacgagaaaaacaagaacaaggagggggacgacaagaaggagggaggcaaggatcgggcccttaagggtgtcttgcgcgtaggggtgcttgcaaagggactgctcctgaggggtgacagaaacgtcaacttggttctgctgtgctccgaaaaacccagtaagaccctactctcacgaattgccgagaatttgcctaaacagttagcagttatctcccctgaaaaatatgacattaagtgcgcggtgagtgaagcagctattatcctgaattcttgtgtcgagcctaagatgcaggtgaccataacccttactagccccattatccgggaagagaatatgcgggaaggcgatgtgacatccggcatggtaaaagacccacccgatgtgctggatcgccagaaatgtctggatgcactcgccgccctgcgtcacgcgaaatggtttcaagcgagagctaacggactgcagagctgtgtcatcatcattcgcattctgcgggatctttgccagagggtgcccacctggagtgatttcccctcatgggccatggaattgctggtcgagaaggccatatcgtctgcctctagccctcagtctcctggcgatgcactgagacgggtgtttgagtgtattagctctgggatcattctcaaaggttccccaggcctgttggacccctgtgagaaggatccctttgacacattggcaactatgaccgatcagcaacgtgaggatatcacctcttccgctcagttcgccctaaggcttttggcctttcgacagatccacaaggtacttggcatggacccactccctcagatgagtcagcggttcaatattcataacaatagaaagagaagacgcgatagcgacggcgtggatggcttcgaagcagaaggcaaaaaggataagaaggattacgataacttctag

SEQ ID NO: 189399 - DNA, 3171 bp, Artificial Sequence
  derived and/or modified sequence
atggccaccggcaactacttcggcttcacccacagcggcgccgccgctgctgctgctgcagctcagtatagccagcagccagcaagtggggtggcctactctcaccccactacagtggctagctacactgttcatcaggctcctgtggccgcccacaccgtgaccgccgcgtatgctcccgctgccgccaccgtagcggtcgccaggccagcccctgtggctgtggctgctgctgctaccgcagccgcctatggtgggtaccctacagcccacacggctaccgactacggctatacgcagaggcaacaggaggccccccctccgcctccacccgccacaacccagaattatcaggattcctacagttacgtgagatcaacagcacccgccgtagcttacgactccaaacagtattaccagcagccaaccgccaccgcagccgccgtagcagccgccgcgcagccacagcctagtgtggcagagacgtactatcagactgcgcccaaagccggatattctcagggggcaactcaatacacccaagctcagcagacgcggcaggtgacagctattaaacccgccacaccatccccagcaactactaccttctctatctaccctgtgagttctacagtccagcccgtggccgcggctgcgacagtcgtgcccagctatacccagtcagcgacctatagcactaccgcagtgacctactctggcacctcttacagtggctatgaggcagccgtatatagcgccgcatcctcctactatcaacagcaacagcagcagcaaaagcaggcagctgctgccgcagccgctgccgcggcaactgccgcctggacaggcaccacatttacaaagaaggcgccattccagaacaagcaactgaagcctaaacaaccccccaaaccaccccaaatccactattgtgatgtgtgcaaaataagctgtgcaggccctcaaacatacaaagagcacctggagggccagaagcacaaaaagaaagaggcagctctgaaagcatcccagaatactagctcaagcaacagcagcaccagggggacccagaatcagcttaggtgcgaactatgcgacgtgagttgtactggcgccgatgcgtacgccgcacacattcgaggcgccaagcaccaaaaagtggtgaaactccacactaaattaggcaaacccattcccagtacggagcccaacgttgtttctcaagctaccagctccactgccgtcagcgcctctaagcccaccgcttcgcccagctccattgcagccaataactgtacggttaatacgagctctgtggctacaagcagcatgaaagggctgaccaccacagggaactccagccttaactccacttcaaatactaaagtgtctgctgtacctacaaatatggctgccaagaagacatctaccccgaagataaatttcgtcggggggaacaaattgcaatccaccgggaataaggccgaagacatcaaaggaaccgaatgcgtgaaatctaccccagtaactagcgctgtgcagattccggaagtcaaacaggacacagtttcggaaccagtgactcccgcatcgctcgctgctctccaatccgatgttcagcctgtgggccacgattatgtcgaagaagtgcggaatgatgagggtaaggtgatccgctttcactgcaagctctgtgaatgtagttttaacgaccctaatgccaaggagatgcacctgaagggccggaggcataggttgcagtacaaaaaaaaggttaaccctgatctgcaggtggaggtaaaaccatcgattagggcccgcaagatccaggaggaaaagatgcggaagcagatgcagaaagaggagtattggagaaggcgggaggaggaggaaaggtggagaatggagatgcggagatatgaggaggatatgtattggcgaagaatggaagaggaacagcaccactgggatgacagaagaagaatgcctgatggcggctatccccatggcccccccggcccccttggacttcttggcgtgaggccaggaatgcctccacagcctcagggtccagccccgctgcgacggcctgactccagtgatgaccggtacgtgatgactaaacacgccactatctaccctactgaagaagaactacaggccgtgcagaagatcgtctcaattaccgaacgtgccctgaaactggtaagtgacagcttgtccgagcacgagaagaataaaaataaggaaggggatgataagaaagaagggggtaaggacagggccctgaagggtgtgcttagggtgggagtgctcgctaaggggttacttctcaggggagaccgaaatgtgaatctagtgttactctgctccgagaaacccagcaagacacttctctctagaatcgccgaaaacttgccaaagcaactcgcggttatctctccggagaaatacgacattaaatgcgctgtgagtgaagcagccattatcttaaacagttgtgttgagcccaagatgcaggtaacgatcaccttgacgagtcccattatcagagaagagaatatgagggaaggggacgtcacatctgggatggtgaaggatccgcccgacgtgttggacagacaaaaatgtcttgatgcattagcagcccttaggcacgccaagtggttccagcaggcccgcgccaacggcctccaatcctgcgtcataataatccggatcttgcgggatctatgtcagagggtccctacttggtcggattttccatcttgggcaatggagctgttggtcgaaaaggcgatttcgtccgcctcaagccctcagtcaccgggggacgccctacggagggtttttgagtgtatttcctcaggtatcattctaaaaggcagcccgggcctcctggacccctgcgagaaagacccgtttgataccctcgcaactatgactgatcagcagcgcgaagatatcacaagcagcgcccagtttgctttgaggctactggcattccgccagatccataaagtgttgggcatggacccactgccacagatgtcccagcggttcaatattcacaataacagaaaaagacgcagggatagcgacggaatggacctgaagcttcgggggaaaaagacgaagaagatcatgattaccttcaaaaaatgtctttag

SEQ ID NO: 189400 - DNA, 570 bp, Artificial Sequence
  derived and/or modified sequence
atgatccccatctgccccgtggtgagcttcacctacgtgcccagcaggctgggcgaagatgcaaaaatggccactggaaattatttcgggtttacacacagcggagctgccgcagctgctgcagccgctcaatactcacagcaacccgcttctggggttgcgtattcccaccccaccacagtggcatcctataccgtccaccaggctcccgttgccgcacatacagtgactgcggcttacgcacccgccgctgccacggtcgctgtcgctcgacccgcacccgttgccgtagccgctgcagctaccgctgctgcatacgggggctaccccacagcacacaccgcaactgactatggatacacacagagacaacaggaggcacctcccccgcctccaccggctacaacccaaaattaccaggactcttactcttacgtacggtctaccgctcctgcagttgcctacgacagcaagcaatactatcagcaacccgccgccaccgaagctggttccagtagctcctgttgttgttgctgcaatagctgcttagatagggaccatctttattag

SEQ ID NO: 189401 - DNA, 3225 bp, Artificial Sequence
  derived and/or modified sequence
atgattccgatctgcccagtcgtgagtttcacttacgtcccgtctaggcttggcgaagacgctaaaatggctacaggcaactacttcggttttacacattccggagccgctgcagccgctgctgcagcacagtactcacagcagcccgcttccggtgtggcctacagccaccccacaactgtagcatcttataccgtccatcaggctcccgtggccgcacacaccgtgacagccgcatacgctcccgctgccgctactgtcgcagtcgcccgaccagccccagtggcagtcgccgcagcagctacagccgctgcatacggtggttacccaactgcacacaccgctacagactacgggtacactcaaagacaacaggaagcgcctcccccacctcctccagcgacgacccaaaattatcaggactcttactcatatgtccgaagcacggcccctgctgtggcatatgactccaagcagtactaccagcagccaaccgccacagccgctgccgtcgctgcagctgctcagccacagccctcagtcgcggagacgtactatcagaccgcacctaaggccggatacagccaaggcgctacccagtatacccaagctcaacagacacgccaggtgactgccatcaaacccgcaacccccagccctgcaacaactacattttccatctaccctgtgtcgagcacagtgcagccagtcgccgctgctgccaccgtcgtaccgagctacacccagagtgctacctacagcacaaccgccgtcacgtattcagggacaagctattcaggatatgaggccgcagtgtacagcgcagcttcatcctattatcagcagcagcagcaacaacagaagcaggctgctgccgcagctgccgctgctgctgctactgctgcctggacgggcacgacgtttactaaaaaagctccttttcaaaataagcagttaaagcctaagcaaccacccaagcctccccagatccattactgtgatgtttgtaaaatttcctgcgcaggaccccagacgtataaagaacacctagaaggacagaaacacaagaagaaggaggctgcacttaaggcgtctcagaatacgtctagctctaattcctccacacggggtactcagaatcagctgcggtgcgaattgtgtgacgttagctgcaccggagctgacgcctatgccgctcatatcagaggggctaagcaccagaaagttgttaagcttcataccaagctggggaagcccattccttccactgaaccgaacgttgtctcacaggcaacatcgtcgaccgctgtgagcgcgtctaagccaacagcatccccatctagtattgccgctaataactgtacagtgaatactagtagcgtggctacttcctcaatgaagggcctgacaaccacaggcaactctagcctaaatagcacgtctaacaccaaggtgtctgctgtccccacgaacatggccgcaaaaaagacaagcacccccaaaattaacttcgtgggcggaaataagttgcagtcaactggaaataaggccgaagatattaagggcacagagtgtgtcaaatccacccccgtcactagtgccgtgcagatccctgaggtgaagcaggacaccgttagcgaacctgtgacgccagccagcttggctgctctccaaagcgatgtgcagccagtgggccacgactacgtcgaggaagtacgaaatgatgaaggcaaggtcatacgctttcactgcaagctatgcgagtgcagcttcaatgacccaaacgccaaagaaatgcatttgaaagggaggaggcacaggttgcagtacaagaaaaaagtcaaccctgacctgcaggtggaagtcaagcccagcatcagggccaggaagatccaagaggaaaagatgcgaaaacagatgcagaaggaggagtactggcgacgcagggaggaagaggagcgttggagaatggaaatgaggagatacgaggaggatatgtattggcggcgaatggaagaggaacaacaccattgggacgacaggcggagaatgcctgacggcggatatcctcacggaccccctgggcctcttgggctgctgggtgttcggccaggaatgcctccacagccccagggacctgcccctctgaggcgccctgatagctctgatgatagatacgttatgaccaagcatgccactatttacccaactgaagaggagttgcaggccgtgcagaagatcgtgagtatcaccgaacgtgctttaaagctggtgtccgactctctcagcgagcatgaaaagaataagaacaaggagggcgatgacaagaaggaggggggaaaagatcgggctctaaagggagtgctgcgggtcggcgtccttgcaaaagggctgttgctgagaggcgacaggaacgtcaatttagttttattatgcagcgagaagccttcaaagactctattgtctagaatagccgaaaatctccccaaacaattggcagtcatcagcccggaaaagtatgatattaaatgcgccgtgagtgaggcagctatcatcctgaacagttgcgtcgagcccaagatgcaggtgaccattaccctgacatcccctatcattagggaggaaaacatgcgggaaggtgatgttacgagcggcatggtcaaagaccctcctgacgtgctggacaggcaaaagtgtctggatgcactggccgctttgcgacacgccaaatggttccaggctcgcgctaatggactccagagctgcgtgatcattatcagaattctccgcgatttatgccagcgcgtgccgacttggtccgacttcccaagctgggccatggagttgctggtagaaaaggccatttcaagcgcatcctcaccccagagccctggcgatgcccttcgccgagtcttcgagtgcatctcttcaggcataattctcaaaggcagccctggcctgttggacccttgtgaaaaagatcctttcgatactctcgcaacaatgactgaccagcagagagaagacataaccagtagcgctcagttcgccctgcgattgctggcctttaggcaaatccacaaagtgctggggatggatcccctccctcagatgtctcaaagatttaacatccataacaaccgtaagagacggcgagacagtgatggtgttgacggttttgaggcggaaggcaaaaaagataaaaaagactatgacaatttttag

SEQ ID NO: 189402 - DNA, 3171 bp, Artificial Sequence
  derived and/or modified sequence
atggcaactgggaactacttcggcttcactcattcaggagctgcggcagccgctgccgctgctcaatattctcagcagccagcttccggggtggcctattcccacccaactaccgtggccagctacacagtgcatcaggccccagtggccgctcatacagtcaccgcagcctatgcacctgcagccgcaacagtcgcagtggctcgccctgcccctgtcgcggttgccgcagcagccactgccgcagcctacggcggataccctactgctcacacagccacagactacgggtacacgcaacgacaacaagaggcaccacccccacctccacctgccactacccaaaattatcaagacagctattcttatgtccgaagcacagcaccggctgtggcctatgacagcaagcagtactatcagcaaccgacagcaaccgccgctgccgtcgcagcggctgcccagccccagcctagcgtggcagagacctactatcagacagctcctaaagcgggatactcccagggcgctacacaatacactcaggcccagcagaccagacaggtcaccgctatcaagcccgctaccccaagcccagccacaacgacatttagtatttatcccgtaagctctactgtccagccagtggccgctgcagccacagtagtgccatcatacacccagtcagccacctattccactacggcagtgacttatagtgggacgtcctattcaggctacgaggcagccgtatactctgctgcttcctcatactatcaacagcagcaacagcaacagaaacaggctgcggctgccgctgccgctgccgctgccacagccgcttggactggaaccacctttaccaaaaaagctccatttcagaacaaacagctaaagcccaagcagcccccaaagcccccacagatccattattgcgacgtgtgtaagatttcatgcgcagggccacagacctacaaagagcacctcgaaggccagaagcataaaaaaaaggaggccgctctaaaagcctcccagaatactagttcttcaaattcaagcacacgaggaactcaaaatcagttacgatgcgagttatgcgacgtttcctgcacaggtgccgatgcgtatgctgcacacattcggggagcaaagcaccagaaggtggtgaagctgcacaccaaacttgggaaaccaattccaagtacagagcctaatgtcgtgagccaagccacctcttcaacagctgtgagtgcgtccaagcctactgcgagtccatcatctatcgctgccaacaattgtaccgtgaatacttcttccgtggctactagcagcatgaaaggtctgaccactacaggtaatagtagtctgaactctacatccaataccaaggtttcggccgtgcccactaatatggctgcaaagaaaacaagcacaccaaagatcaacttcgtgggcggaaacaagcttcagtccacagggaataaggccgaagatattaaagggactgagtgcgtgaagtccactcccgtgacatctgccgtgcagatccctgaagtcaagcaagacaccgtctcagaacccgtgactcctgcttccttggcagctctgcagagcgatgttcagccagtcgggcatgattacgtggaagaggttagaaatgatgaggggaaggttatacgatttcattgcaagttgtgcgagtgctccttcaacgatccgaatgctaaggagatgcacctcaagggccgtagacatcggctacagtataagaagaaggtgaaccccgatctccaggtggaagtgaagccctctatcagggcccgaaaaattcaggaagaaaaaatgagaaaacaaatgcagaaggaagaatattggagaagacgggaggaggaagagcgctggcgtatggagatgaggagatacgaggaggacatgtactggaggagaatggaggaggagcagcatcactgggacgatagaaggcgcatgcctgacggaggatacccccacggcccacctggacctcttggactcctaggagtgaggcccggaatgccaccccagccacaaggccctgcaccactacggcgtcctgactctagcgatgacagatacgtaatgactaagcacgctacgatttaccctacagaggaagagctgcaggcggtccagaaaatcgtctcaattacggaacgggctctcaagcttgtctcagacagcctctccgagcacgaaaagaacaaaaataaagagggggacgataagaaggagggagggaaggatcgcgcactcaagggtgttctccgcgtgggcgtgttggcaaagggcttgctgttgcggggagacaggaatgtgaacctcgtgctgctctgttccgagaaaccctctaaaaccctgctgtcaagaatcgctgagaatctgcctaaacagttagctgttatctcccccgagaagtatgatatcaaatgcgccgtgtccgaggcggctattatcctgaacagctgcgtggagccaaagatgcaggtcaccataacgctgaccagccccataatcagggaggaaaatatgagagagggggacgtcaccagcggcatggtaaaggacccccctgacgtacttgaccggcagaagtgcctggacgccctggccgctctgcgccatgccaagtggtttcagcaggcccgagctaacggactccaatcatgtgtgataatcattagaatcctgcgggatctttgccagagagtgccgacctggagtgacttcccgtcgtgggcaatggagctcctggtggagaaggcgatttcttcggccagctccccacagagccctggggacgccctgaggagagtttttgagtgtatctcttctggaattatactcaaggggtcccctggcctgcttgatccatgcgaaaaagatccattcgatacgctggcgactatgactgaccagcagagggaggacatcactagctccgcacaatttgcactcaggcttttagctttccggcagatacacaaggtcctgggcatggatccactgccgcagatgtcccagcgcttcaacattcacaataataggaaaaggagacgcgactccgatgggatggacttaaaactgagaggcaagaagaccaagaagattatgatcacgttcaaaaagtgtctctag

SEQ ID NO: 189403 - DNA, 570 bp, Artificial Sequence
  derived and/or modified sequence
atgatacctatttgcccagtcgtgtccttcacgtacgtccccagccggcttggcgaggatgccaaaatggcaactgggaactactttggttttacccacagcggcgctgcggctgctgctgctgcagcccagtatagccagcagcctgcctccggggtcgcttatagccacccaacaacagttgcgtcctatacagtgcaccaggcaccagtggccgctcacacagtgacggccgcttacgctcctgccgctgccactgtcgcagtggcgagacccgcacccgtggctgtggcggcagctgccacggctgccgcatacgggggttatcccaccgctcacaccgcaaccgactacggctatacccaaaggcagcaggaggccccaccccctccgccaccggctacaactcagaactatcaggactcatacagctacgtgcggagcacagctccagctgtggcctacgacagtaaacaatactaccagcagcccgctgccacagaggcaggttcgagttccagctgctgttgctgttgtaacagctgcctggatagggaccatctctattag

SEQ ID NO: 189404 - DNA, 3225 bp, Artificial Sequence
  derived and/or modified sequence
atgatccccatctgccccgtggtgagcttcacctacgtgcccagcagactgggcgaggacgccaagatggccaccggcaactacttcggcttcacccacagcggcgccgccgccgccgccgccgccgcccagtacagccagcagcccgccagcggcgtggcctacagccaccccaccaccgtggccagctacaccgtgcaccaggcccccgtggccgcccacaccgtgaccgccgcctacgcccccgccgccgccaccgtggccgtggccagacccgcccccgtggccgtggccgccgccgccaccgccgccgcctacggcggctaccccaccgcccacaccgccaccgactacggctacacccagagacagcaggaggccccccccccccccccccccgccaccacccagaactaccaggacagctacagctacgtgagaagcaccgcccccgccgtggcctacgacagcaagcagtactaccagcagcccaccgccaccgccgccgccgtggccgccgccgcccagccccagcccagcgtggccgagacctactaccagaccgcccccaaggccggctacagccagggcgccacccagtacacccaggcccagcagaccagacaggtgaccgccatcaagcccgccacccccagccccgccaccaccaccttcagcatctaccccgtgagcagcaccgtgcagcccgtggccgccgccgccaccgtggtgcccagctacacccagagcgccacctacagcaccaccgccgtgacctacagcggcaccagctacagcggctacgaggccgccgtgtacagcgccgccagcagctactaccagcagcagcagcagcagcagaagcaggccgccgccgccgccgccgccgccgccgccaccgccgcctggaccggcaccaccttcaccaagaaggcccccttccagaacaagcagctgaagcccaagcagccccccaagcccccccagatccactactgcgacgtgtgcaagatcagctgcgccggcccccagacctacaaggagcacctggagggccagaagcacaagaagaaggaggccgccctgaaggccagccagaacaccagcagcagcaacagcagcaccagaggcacccagaaccagctgagatgcgagctgtgcgacgtgagctgcaccggcgccgacgcctacgccgcccacatcagaggcgccaagcaccagaaggtggtgaagctgcacaccaagctgggcaagcccatccccagcaccgagcccaacgtggtgagccaggccaccagcagcaccgccgtgagcgccagcaagcccaccgccagccccagcagcatcgccgccaacaactgcaccgtgaacaccagcagcgtggccaccagcagcatgaagggcctgaccaccaccggcaacagcagcctgaacagcaccagcaacaccaaggtgagcgccgtgcccaccaacatggccgccaagaagaccagcacccccaagatcaacttcgtgggcggcaacaagctgcagagcaccggcaacaaggccgaggacatcaagggcaccgagtgcgtgaagagcacccccgtgaccagcgccgtgcagatccccgaggtgaagcaggacaccgtgagcgagcccgtgacccccgccagcctggccgccctgcagagcgacgtgcagcccgtgggccacgactacgtggaggaggtgagaaacgacgagggcaaggtgatcagattccactgcaagctgtgcgagtgcagcttcaacgaccccaacgccaaggagatgcacctgaagggcagaagacacagactgcagtacaagaagaaggtgaaccccgacctgcaggtggaggtgaagcccagcatcagagccagaaagatccaggaggagaagatgagaaagcagatgcagaaggaggagtactggagaagaagagaggaggaggagagatggagaatggagatgagaagatacgaggaggacatgtactggagaagaatggaggaggagcagcaccactgggacgacagaagaagaatgcccgacggcggctacccccacggcccccccggccccctgggcctgctgggcgtgagacccggcatgcccccccagccccagggccccgcccccctgagaagacccgacagcagcgacgacagatacgtgatgaccaagcacgccaccatctaccccaccgaggaggagctgcaggccgtgcagaagatcgtgagcatcaccgagagagccctgaagctggtgagcgacagcctgagcgagcacgagaagaacaagaacaaggagggcgacgacaagaaggagggcggcaaggacagagccctgaagggcgtgctgagagtgggcgtgctggccaagggcctgctgctgagaggcgacagaaacgtgaacctggtgctgctgtgcagcgagaagcccagcaagaccctgctgagcagaatcgccgagaacctgcccaagcagctggccgtgatcagccccgagaagtacgacatcaagtgcgccgtgagcgaggccgccatcatcctgaacagctgcgtggagcccaagatgcaggtgaccatcaccctgaccagccccatcatcagagaggagaacatgagagagggcgacgtgaccagcggcatggtgaaggacccccccgacgtgctggacagacagaagtgcctggacgccctggccgccctgagacacgccaagtggttccaggccagagccaacggcctgcagagctgcgtgatcatcatcagaatcctgagagacctgtgccagagagtgcccacctggagcgacttccccagctgggccatggagctgctggtggagaaggccatcagcagcgccagcagcccccagagccccggcgacgccctgagaagagtgttcgagtgcatcagcagcggcatcatcctgaagggcagccccggcctgctggacccctgcgagaaggaccccttcgacaccctggccaccatgaccgaccagcagagagaggacatcaccagcagcgcccagttcgccctgagactgctggccttcagacagatccacaaggtgctgggcatggaccccctgccccagatgagccagagattcaacatccacaacaacagaaagagaagaagagacagcgacggcgtggacggcttcgaggccgagggcaagaaggacaagaaggactacgacaacttctag

SEQ ID NO: 189405 - protein, 186 aa, Artificial Sequence
  derived and/or modified sequence
MALVPCQVLRMAILLSYCSILCNYKAIEMPSHQTYGGSWKFLTFIDLFVVAVFWIIYAYDREMIYPKLLDNFIPGWLNHGMHTTVLPFILIEMRTSHHQYPSRSSGLTAICTFSVGYILWVCWVHHVTGMWVYPFLEHIGPGARIIFFGSTTILMNFLYLLGEVLNNYIWDTQKSMEEEKEKPKLE

SEQ ID NO: 189406 - protein, 238 aa, Artificial Sequence
  derived and/or modified sequence
MALVPCQVLRMAILLSYCSILCNYKAIEMPSHQTYGGSWKFLTFIDLVIQAVFFGICVLTDLSSLLTRGSGNQEQERQLKKLISLRDWMLAVLAFPVGVFVVAVFWIIYAYDREMIYPKLLDNFIPGWLNHGMHTTVLPFILIEMRTSHHQYPSRSSGLTAICTFSVGYILWVCWVHHVTGMWVYPFLEHIGPGARIIFFGSTTILMNFLYLLGEVLNNYIWDTQKSMEEEKEKPKLE

SEQ ID NO: 189407 - protein, 192 aa, Artificial Sequence
  derived and/or modified sequence
MTKVLRMAILLSYCSILCNYKAIEMPSHQTYGGSWKFLTFIDLVIQAVFFGICVLTDLSSLLTRGSGNQEQERQLKKLISLRDWMLAVLAFPVGVFVVAVFWIIYAYDREMIYPKLLDNFIPGWLNHGMHTTVLPFILIEMRTSHHQYPSRSSGLTAICTFSVGYILWVCWVHHVTGMWVYPFLEHIGPGAR

SEQ ID NO: 189408 - protein, 234 aa, Artificial Sequence
  derived and/or modified sequence
MTKVLRMAILLSYCSILCNYKAIEMPSHQTYGGSWKFLTFIDLVIQAVFFGICVLTDLSSLLTRGSGNQEQERQLKKLISLRDWMLAVLAFPVGVFVVAVFWIIYAYDREMIYPKLLDNFIPGWLNHGMHTTVLPFILIEMRTSHHQYPSRSSGLTAICTFSVGYILWVCWVHHVTGMWVYPFLEHIGPGARIIFFGSTTILMNFLYLLGEVLNNYIWDTQKSMEEEKEKPKLE

SEQ ID NO: 189409 - protein, 138 aa, Artificial Sequence
  derived and/or modified sequence
MLAVLAFPVGVFVVAVFWIIYAYDREMIYPKLLDNFIPGWLNHGMHTTVLPFILIEMRTSHHQYPSRSSGLTAICTFSVGYILWVCWVHHVTGMWVYPFLEHIGPGARIIFFGSTTILMNFLYLLGEVLNNYIWDTQK

SEQ ID NO: 189410 - DNA, 561 bp, Artificial Sequence
  derived and/or modified sequence
atggccctggtgccctgccaggtgctgagaatggccatcctgctgagctactgcagcatcctgtgcaactacaaggccatcgagatgcccagccaccagacctacggcggcagctggaagttcctgaccttcatcgacctgttcgtggtggccgtgttctggatcatctacgcctacgacagagagatgatctaccccaagctgctggacaacttcatccccggctggctgaaccacggcatgcacaccaccgtgctgcccttcatcctgatcgagatgagaaccagccaccaccagtaccccagcagaagcagcggcctgaccgccatctgcaccttcagcgtgggctacatcctgtgggtgtgctgggtgcaccacgtgaccggcatgtgggtgtaccccttcctggagcacatcggccccggcgccagaatcatcttcttcggcagcaccaccatcctgatgaacttcctgtacctgctgggcgaggtgctgaacaactacatctgggacacccagaagagcatggaggaggagaaggagaagcccaagctggagtag

SEQ ID NO: 189411 - DNA, 717 bp, Artificial Sequence
  derived and/or modified sequence
atggccctggtgccctgccaggtgctgagaatggccatcctgctgagctactgcagcatcctgtgcaactacaaggccatcgagatgcccagccaccagacctacggcggcagctggaagttcctgaccttcatcgacctggtgatccaggccgtgttcttcggcatctgcgtgctgaccgacctgagcagcctgctgaccagaggcagcggcaaccaggagcaggagagacagctgaagaagctgatcagcctgagagactggatgctggccgtgctggccttccccgtgggcgtgttcgtggtggccgtgttctggatcatctacgcctacgacagagagatgatctaccccaagctgctggacaacttcatccccggctggctgaaccacggcatgcacaccaccgtgctgcccttcatcctgatcgagatgagaaccagccaccaccagtaccccagcagaagcagcggcctgaccgccatctgcaccttcagcgtgggctacatcctgtgggtgtgctgggtgcaccacgtgaccggcatgtgggtgtaccccttcctggagcacatcggccccggcgccagaatcatcttcttcggcagcaccaccatcctgatgaacttcctgtacctgctgggcgaggtgctgaacaactacatctgggacacccagaagagcatggaggaggagaaggagaagcccaagctggagtag

SEQ ID NO: 189412 - DNA, 705 bp, Artificial Sequence
  derived and/or modified sequence
atgaccaaggtgctgagaatggccatcctgctgagctactgcagcatcctgtgcaactacaaggccatcgagatgcccagccaccagacctacggcggcagctggaagttcctgaccttcatcgacctggtgatccaggccgtgttcttcggcatctgcgtgctgaccgacctgagcagcctgctgaccagaggcagcggcaaccaggagcaggagagacagctgaagaagctgatcagcctgagagactggatgctggccgtgctggccttccccgtgggcgtgttcgtggtggccgtgttctggatcatctacgcctacgacagagagatgatctaccccaagctgctggacaacttcatccccggctggctgaaccacggcatgcacaccaccgtgctgcccttcatcctgatcgagatgagaaccagccaccaccagtaccccagcagaagcagcggcctgaccgccatctgcaccttcagcgtgggctacatcctgtgggtgtgctgggtgcaccacgtgaccggcatgtgggtgtaccccttcctggagcacatcggccccggcgccagaatcatcttcttcggcagcaccaccatcctgatgaacttcctgtacctgctgggcgaggtgctgaacaactacatctgggacacccagaagagcatggaggaggagaaggagaagcccaagctggagtag

SEQ ID NO: 189413 - DNA, 561 bp, Artificial Sequence
  derived and/or modified sequence
atggcactggtgccctgccaggtgttacgtatggccatcttgctatcatattgtagcattctatgcaactataaggcgatcgaaatgcccagtcatcagacctacggaggtagctggaaattccttaccttcatcgacctgttcgttgtggccgtgttctggatcatatacgcctatgatcgagagatgatctatcctaagctcctggataacttcatcccaggttggctgaatcacggaatgcacacaaccgtgctccccttcattctcatagaaatgaggacgagccatcaccagtacccttctagatctagcggactgaccgccatatgtactttcagcgtcgggtatatcctgtgggtctgttgggtgcaccacgtgactggcatgtgggtatatcccttccttgagcatatcggacccggtgcccgaatcatcttctttggctccaccacaatactgatgaacttcttgtatctcttgggcgaagtgctgaataattacatctgggatactcagaaaagtatggaggaggaaaaggaaaaaccgaagctggagtag

SEQ ID NO: 189414 - DNA, 717 bp, Artificial Sequence
  derived and/or modified sequence
atggcccttgtcccatgccaagtgttgagaatggcgatcttgctctcttattgtagcattctgtgcaactacaaagccatcgaaatgccttcccatcagacgtatggcggatcctggaagtttctgacctttatcgatctcgtcattcaggccgtgttcttcgggatctgtgtgcttacggacctgagctcgttgctgacaaggggctctgggaaccaggaacaggagcgtcaactgaagaagctgattagtttgagggactggatgttggccgtgctggcattccccgtcggagttttcgtggtcgcagtcttttggatcatatatgcctatgacagggagatgatctaccccaagttgctagataatttcatccccggttggctcaatcacggaatgcacacaaccgtgctgccatttatactaatcgagatgcgaacatctcatcaccagtatcccagccgatcatctggtctaactgccatttgcactttctctgtcggctatatcctgtgggtgtgctgggtgcatcacgtgactgggatgtgggtatatccttttttggaacacatcgggcccggcgcccggattatcttctttgggtcgaccacaatactcatgaacttcctgtacttgttgggtgaggtgctgaataattacatttgggacactcagaaatcaatggaagaagagaaagaaaaacccaaactggagtag

SEQ ID NO: 189415 - DNA, 705 bp, Artificial Sequence
  derived and/or modified sequence
atgactaaagttctgaggatggcgatccttctgtcctattgcagcatcctctgcaactacaaagctatcgagatgcctagccatcagacgtatggcggctcatggaagttcctgaccttcattgacctagtaatccaagccgtcttctttggcatctgtgtactcacagacttgtcttcactcttgactcgggggtccgggaatcaggagcaggaacggcaactcaaaaaattgatatccctgcgtgattggatgttggctgtccttgcgttccccgtgggcgtatttgtggtggcagtgttctggattatctatgcttacgaccgggagatgatttatcctaaattactggacaatttcattccaggctggttgaatcatgggatgcataccacagtcctgcctttcattctgatcgaaatgagaacatcccaccatcagtatccttctcgcagttctgggctgacagccatttgcacgttttctgtgggctatatcttatgggtgtgctgggtacatcacgtgacaggaatgtgggtttatcccttcttagagcatatcggcccaggcgcgcggataatcttttttggaagcaccactatcctgatgaattttctgtatctgctgggggaggtcctgaacaattatatttgggatacccaaaaaagcatggaagaagaaaaggagaagccgaagctggaatag

SEQ ID NO: 189416 - DNA, 561 bp, Artificial Sequence
  derived and/or modified sequence
atggccctggtgccctgccaggtgctgaggatggccatcctgctgagctactgcagcatcctgtgcaactacaaggccatcgagatgcccagccaccagacctatggaggctcctggaagttcctgaccttcatcgacctgtttgtggtggccgtgttctggatcatctatgcctatgaccgggagatgatctaccccaagctgctggacaacttcatccctggctggctgaaccacggcatgcacaccaccgtgctgcccttcatcctgattgagatgaggaccagccaccaccagtaccccagccgcagcagcggcctgacagccatctgcaccttctctgtgggctacatcctgtgggtgtgctgggtgcaccacgtgacaggcatgtgggtgtaccccttcctggagcacatcggccctggggcccgcatcatcttcttcggcagcaccaccatcctgatgaacttcctgtacctgctgggggaggtgctgaacaactacatctgggacacccagaagtccatggaggaggagaaggagaagcccaagctggagtag

SEQ ID NO: 189417 - DNA, 717 bp, Artificial Sequence
  derived and/or modified sequence
atggccctggtgccctgccaggtgctgaggatggccatcctgctgagctactgcagcatcctgtgcaactacaaggccatcgagatgcccagccaccagacctatggaggctcctggaagttcctgaccttcatcgacctggtgatccaggccgtgttcttcggcatctgtgtgctgacagacctgagcagcctgctgacccggggcagcggcaaccaggagcaggagcggcagctgaagaagctgatcagcctgcgggactggatgctggccgtgctggccttccctgtgggcgtgtttgtggtggccgtgttctggatcatctatgcctatgaccgggagatgatctaccccaagctgctggacaacttcatccctggctggctgaaccacggcatgcacaccaccgtgctgcccttcatcctgattgagatgaggaccagccaccaccagtaccccagccgcagcagcggcctgacagccatctgcaccttctctgtgggctacatcctgtgggtgtgctgggtgcaccacgtgacaggcatgtgggtgtaccccttcctggagcacatcggccctggggcccgcatcatcttcttcggcagcaccaccatcctgatgaacttcctgtacctgctgggggaggtgctgaacaactacatctgggacacccagaagtccatggaggaggagaaggagaagcccaagctggagtag

SEQ ID NO: 189418 - DNA, 705 bp, Artificial Sequence
  derived and/or modified sequence
atgaccaaggtgctgaggatggccatcctgctgagctactgcagcatcctgtgcaactacaaggccatcgagatgcccagccaccagacctatggaggctcctggaagttcctgaccttcatcgacctggtgatccaggccgtgttcttcggcatctgtgtgctgacagacctgagcagcctgctgacccggggcagcggcaaccaggagcaggagcggcagctgaagaagctgatcagcctgcgggactggatgctggccgtgctggccttccctgtgggcgtgtttgtggtggccgtgttctggatcatctatgcctatgaccgggagatgatctaccccaagctgctggacaacttcatccctggctggctgaaccacggcatgcacaccaccgtgctgcccttcatcctgattgagatgaggaccagccaccaccagtaccccagccgcagcagcggcctgacagccatctgcaccttctctgtgggctacatcctgtgggtgtgctgggtgcaccacgtgacaggcatgtgggtgtaccccttcctggagcacatcggccctggggcccgcatcatcttcttcggcagcaccaccatcctgatgaacttcctgtacctgctgggggaggtgctgaacaactacatctgggacacccagaagtccatggaggaggagaaggagaagcccaagctggagtag

SEQ ID NO: 189419 - DNA, 1229 bp, Artificial Sequence
  derived and/or modified sequence
gccctccttgccgcccagccggtccaggcctctggcgaacatggcgcttgtcccctgccaggtgctgcggatggcaatcctgctgtcttactgctctatcctgtgtaactacaaggccatcgaaatgccctcacaccagacctacggagggagctggaaattcctgacgttcattgatctgtttgttgtagcagtgttctggatcatttatgcctatgacagagagatgatatacccgaagctgctggataattttatcccagggtggctgaatcacggaatgcacacgacggttctgccctttatattaatcgagatgaggacatcgcaccatcagtatcccagcaggagcagcggacttaccgccatatgtaccttctctgttggctatatattatgggtgtgctgggtgcatcatgtaactggcatgtgggtgtaccctttcctggaacacattggcccaggagccagaatcatcttctttgggtctacaaccatcttaatgaacttcctgtacctgctgggagaagttctgaacaactatatctgggatacacagaaaagtatggaagaagagaaagaaaagcctaaattggaatgagatccaagtctaaacgcaagagctagattgagccgccattgaagactccttcccctcgggcattggcagtgggggagaaaaggcttcaaaggaacttggtggcatcagcacccccctcccccaatgaggacaccttttatatataaatatgtataaacatagaatacagttgtttccaaaagaactcaccctcactgtgtgttaaagaattcttcccaaagtcattactgataataacattttttccttttctagttttaaaaccagaattggaccttggatttttattttggcaattgtaactccatctaatcaagaaagaataaaagtttattgcacttctttttgagaaatatgttaaagtcaaaggggcatatatagagtaaggcttttgtgtatttaatcctaaaggtggctgtaatcatgaacctaggccaccatggggacctgagagggaaggggacagatgtttctcattgcataatgtcacagttgcctcaaatgagcaccatttgtaataatgatgtcaatttcatgaaaagcctgagtgtattgcatctcttgatttaatcatgtgaaacttttcctagatgcaaatgctgactaataaagacaaagccaccctgaa

SEQ ID NO: 189420 - DNA, 1395 bp, Artificial Sequence
  derived and/or modified sequence
cctcacgcccgccctccttgccgcccagccggtccaggcctctggcgaacatggcgcttgtcccctgccaggtgctgcggatggcaatcctgctgtcttactgctctatcctgtgtaactacaaggccatcgaaatgccctcacaccagacctacggagggagctggaaattcctgacgttcattgatctggttatccaggctgtcttttttggcatctgtgtgctgactgatctttccagtcttctgactcgaggaagtgggaaccaggagcaagagaggcagctcaagaagctcatctctctccgggactggatgttagctgtgttggcctttcctgttggggtttttgttgtagcagtgttctggatcatttatgcctatgacagagagatgatatacccgaagctgctggataattttatcccagggtggctgaatcacggaatgcacacgacggttctgccctttatattaatcgagatgaggacatcgcaccatcagtatcccagcaggagcagcggacttaccgccatatgtaccttctctgttggctatatattatgggtgtgctgggtgcatcatgtaactggcatgtgggtgtaccctttcctggaacacattggcccaggagccagaatcatcttctttgggtctacaaccatcttaatgaacttcctgtacctgctgggagaagttctgaacaactatatctgggatacacagaaaagtatggaagaagagaaagaaaagcctaaattggaatgagatccaagtctaaacgcaagagctagattgagccgccattgaagactccttcccctcgggcattggcagtgggggagaaaaggcttcaaaggaacttggtggcatcagcacccccctcccccaatgaggacaccttttatatataaatatgtataaacatagaatacagttgtttccaaaagaactcaccctcactgtgtgttaaagaattcttcccaaagtcattactgataataacattttttccttttctagttttaaaaccagaattggaccttggatttttattttggcaattgtaactccatctaatcaagaaagaataaaagtttattgcacttctttttgagaaatatgttaaagtcaaaggggcatatatagagtaaggcttttgtgtatttaatcctaaaggtggctgtaatcatgaacctaggccaccatggggacctgagagggaaggggacagatgtttctcattgcataatgtcacagttgcctcaaatgagcaccatttgtaataatgatgtcaatttcatgaaaagcctgagtgtattgcatctcttgatttaatcatgtgaaacttttcctagatgcaaatgctgactaataaagacaaagccaccctgaa

SEQ ID NO: 189421 - DNA, 1333 bp, Artificial Sequence
  derived and/or modified sequence
atgacgaaggtgctgcggatggcaatcctgctgtcttactgctctatcctgtgtaactacaaggccatcgaaatgccctcacaccagacctacggagggagctggaaattcctgacgttcattgatctggttatccaggctgtcttttttggcatctgtgtgctgactgatctttccagtcttctgactcgaggaagtgggaaccaggagcaagagaggcagctcaagaagctcatctctctccgggactggatgttagctgtgttggcctttcctgttggggtttttgttgtagcagtgttctggatcatttatgcctatgacagagagatgatatacccgaagctgctggataattttatcccagggtggctgaatcacggaatgcacacgacggttctgccctttatattaatcgagatgaggacatcgcaccatcagtatcccagcaggagcagcggacttaccgccatatgtaccttctctgttggctatatattatgggtgtgctgggtgcatcatgtaactggcatgtgggtgtaccctttcctggaacacattggcccaggagccagaatcatcttctttgggtctacaaccatcttaatgaacttcctgtacctgctgggagaagttctgaacaactatatctgggatacacagaaaagtatggaagaagagaaagaaaagcctaaattggaatgagatccaagtctaaacgcaagagctagattgagccgccattgaagactccttcccctcgggcattggcagtgggggagaaaaggcttcaaaggaacttggtggcatcagcacccccctcccccaatgaggacaccttttatatataaatatgtataaacatagaatacagttgtttccaaaagaactcaccctcactgtgtgttaaagaattcttcccaaagtcattactgataataacattttttccttttctagttttaaaaccagaattggaccttggatttttattttggcaattgtaactccatctaatcaagaaagaataaaagtttattgcacttctttttgagaaatatgttaaagtcaaaggggcatatatagagtaaggcttttgtgtatttaatcctaaaggtggctgtaatcatgaacctaggccaccatggggacctgagagggaaggggacagatgtttctcattgcataatgtcacagttgcctcaaatgagcaccatttgtaataatgatgtcaatttcatgaaaagcctgagtgtattgcatctcttgatttaatcatgtgaaacttttcctagatgcaaatgctgactaataaagacaaagccaccctgaa

SEQ ID NO: 189422 - DNA, 561 bp, Artificial Sequence
  derived and/or modified sequence
atggccctggtgccctgccaggtgctgcggatggccatcctgctgagttactgttccatcctctgtaactacaaagcaattgaaatgcctagccatcagacctacggtggttcctggaaattcctcactttcattgatttattcgttgtagccgtcttctggattatttatgcatacgatcgcgaaatgatttatcccaagttgctagataattttatccccggttggcttaatcatggtatgcatactaccgtgctaccattcatccttatcgagatgagaacttctcatcatcagtatcctagtagatcttcaggcctgactgccatttgcaccttttcggtgggatatattctatgggtgtgctgggtgcaccacgtcacgggtatgtgggtgtaccctttcctggagcacatcggccctggcgcccggattattttctttggctctaccaccattctgatgaacttcctgtatctcctgggtgaggtcctgaacaattacatttgggacacacagaaaagcatggaagaagaaaaggaaaaacccaaattagaatag

SEQ ID NO: 189423 - DNA, 717 bp, Artificial Sequence
  derived and/or modified sequence
atggccctggtgccctgccaggtgctgcggatggccatcctgctgtcgtactgttccattctgtgtaattataaagcaattgagatgcctagtcaccagacctatggcgggtcctggaaatttttaaccttcattgacctggtcattcaggccgtgttcttcggtatttgcgtgctaaccgatttgagtagccttcttactagggggtcaggcaaccaggagcaggaacgtcaactaaaaaagcttatttcattacgggactggatgctggcagtgctagccttccccgtgggggtttttgtcgtggccgtgttttggattatctatgcgtacgaccgagaaatgatttaccctaaactccttgacaatttcatccccgggtggctaaaccacggcatgcacaccacagtgctcccattcattttaattgagatgcggacctctcatcatcaatatccttcccgcagctccggcctaactgctatttgtacattttccgtagggtacatcctgtgggtttgctgggtgcatcacgttaccggaatgtgggtgtacccattcctggagcacatcggtcctggggcacgcatcatcttcttcggtagcacgaccatcctcatgaatttcctgtatctgctgggagaggttttaaacaactatatctgggatactcagaagtcgatggaagaggagaaggagaaaccgaagctggaatag

SEQ ID NO: 189424 - DNA, 705 bp, Artificial Sequence
  derived and/or modified sequence
atgaccaaggtgctgcggatggccatcctgctgagctactgcagcattctttgtaactacaaagcaatcgaaatgccatcccatcagacatacggtggttcctggaaattcctgacttttatcgacctggtgattcaggccgtgtttttcggcatttgcgtgcttacagacctcagtagcctccttaccaggggatcaggcaaccaggaacaagagcgccagctgaaaaagctgatctcccttcgcgattggatgctcgctgtgctcgcatttccagtcggagtcttcgtcgttgcagttttttggattatctacgcctatgaccgagagatgatttatcccaagctgctggacaactttattcccggctggctaaaccacggcatgcataccaccgtgttgccttttatcctgattgagatgagaacctcccaccaccagtacccttcacggtcatccgggctgaccgcgatatgcactttctcggtcggctacattttgtgggtgtgttgggtacatcacgtcaccggaatgtgggtgtatccttttctggaacatattggccccggagctaggattatcttttttggatccaccacaattctcatgaattttttgtacctgctgggggaagtgctcaacaactacatctgggacacccagaagtcaatggaggaagagaaggagaagcctaaattagagtag

SEQ ID NO: 189425 - DNA, 561 bp, Artificial Sequence
  derived and/or modified sequence
atggccctggtgccatgtcaagtcttgaggatggccatcctgttgtcctattgctccattctgtgcaattataaagcaatcgagatgccctcacatcaaacttatgggggatcctggaagtttctaacttttatagacctgttcgtggtagcagtgttctggatcatttatgcctatgatagagaaatgatttatcccaagctgctggacaactttatccctgggtggcttaaccatggtatgcacaccaccgtgctgccgttcatcctgatcgagatgcgcacatcacaccaccagtatcccagccggtcctccggcctgactgccatctgtacatttagcgtggggtacattttgtgggtctgttgggttcaccatgttacgggaatgtgggtatatccctttctggagcacatcggtccgggagctcggatcatattcttcggaagtaccactattctcatgaacttcctgtaccttcttggtgaggtgctcaataactacatatgggacacccagaagtccatggaggaggagaaggaaaagccaaaactcgagtag

SEQ ID NO: 189426 - DNA, 717 bp, Artificial Sequence
  derived and/or modified sequence
atggctctggttccctgccaggttctgcggatggccattctgctctcttactgctcaatcctgtgcaattacaaggcaatcgagatgccctctcaccagacatatgggggttcttggaagtttctcacattcatcgacctagtcatccaagccgttttcttcggaatctgtgtcttgacagatcttagctccctgcttacaagaggctcaggtaaccaggagcaagagcggcaactcaagaagctgatctcactgagagactggatgctggctgtgctggcttttccagtgggggtgttcgtcgtggcagttttttggataatatacgcgtatgaccgggaaatgatttaccccaaactgttagataactttattcccggatggcttaaccacggaatgcacacgacggtgctgccattcatattgatagagatgcggaccagccatcaccagtatccaagccgttccagtgggttgacagctatctgcactttcagcgtgggctatatcctgtgggtgtgctgggtgcaccacgtcacaggaatgtgggtctatcctttcttagagcacatagggcctggcgctaggattatcttttttgggagcacgacaattttgatgaacttcctgtatcttcttggcgaagttctgaataactatatctgggatacacagaaatctatggaagaggaaaaggaaaaaccaaagctagagtag

SEQ ID NO: 189427 - DNA, 705 bp, Artificial Sequence
  derived and/or modified sequence
atgacaaaggtcttgcgaatggcaattctcctctcttactgtagcattctgtgcaattacaaggctatcgaaatgccatcccaccagacttacggaggaagctggaaattccttaccttcatcgacctggttatacaggccgtgtttttcggaatatgtgtgctgaccgacttgtccagtcttctgaccaggggtagtggaaatcaggagcaggagcggcagctgaagaagctaatatcccttcgggattggatgttagccgttttagcattccccgtgggagtgtttgttgttgcagtgttctggattatatatgcgtatgatcgggaaatgatctacccaaagctcctggacaacttcatcccgggttggctgaatcatggcatgcacaccaccgtattgccgtttatcttgatagaaatgcggacatctcatcaccagtaccctagtaggtctagcggactgaccgccatctgcacttttagcgtgggctatatcctctgggtgtgttgggtccaccacgtaactggcatgtgggtctacccgtttctggagcatatcggccctggggcacggattatattcttcgggtcaaccactatcctcatgaattttttgtacctcctcggagaagtactaaataactacatctgggacactcaaaagtcaatggaagaagaaaaagagaagcccaagctggagtag

SEQ ID NO: 189428 - protein, 837 aa, Artificial Sequence
  derived and/or modified sequence
MEPAPSEVRLAVREAIHALSSSEDGGHIFCTLESLKRYLGEMEPPALPREKEEFASAHFSPVLRCLASRLSPAWLELLPHGRLEELWASFFLEGPADQAFLVLMETIEGAAGPSFRLMKMARLLARFLREGRLAVLMEAQCRQQTQPGFILLRETLLGKVVALPDHLGNRLQQENLAEFFPQNYFRLLGEEVVRVLQAVVDSLQGGLDSSVSFVSQVLGKACVHGRQQEILGVLVPRLAALTQGSYLHQRVCWRLVEQVPDRAMEAVLTGLVEAALGPEVLSRLLGNLVVKNKKAQFVMTQKLLFLQSRLTTPMLQSLLGHLAMDSQRRPLLLQVLKELLETWGSSSAIRHTPLPQQRHVSKAVLICLAQLGEPELRDSRDELLASMMAGVKCRLDSSLPPVRRLGMIVAEVVSARIHPEGPPLKFQYEEDELSLELLALASPQPAGDGASEAGTSLVPATAEPPAETPAEIVDGGVPQAQLAGSDSDLDSDDEFVPYDMSGDRELKSSKAPAYVRDCVEALTTSEDIERWEAALRALEGLVYRSPTATREVSVELAKVLLHLEEKTCVVGFAGLRQRALVAVTVTDPAPVADYLTSQFYALNYSLRQRMDILDVLTLAAQELSRPGCLGRTPQPGSPSPNTPCLPEAAVSQPGSAVASDWRVVVEERIRSKTQRLSKGGPRQGPAGSPSRFNSVAGHFFFPLLQRFDRPLVTFDLLGEDQLVLGRLAHTLGALMCLAVNTTVAVAMGKALLEFVWALRFHIDAYVRQGLLSAVSSVLLSLPAARLLEDLMDELLEARSWLADVAEKDPDEDCRTLALRALLLLQRLKNRLLPPASP

SEQ ID NO: 189429 - protein, 360 aa, Artificial Sequence
  derived and/or modified sequence
MMAGVKCRLDSSLPPVRRLGMIVAEVVSARIHPEGPPLKFQYEEDELSLELLALASPQPAGDGASEAGTSLVPATAEPPAETPAEIVDGGVPQAQLAGSDSDLDSDDEFVPYDMSGDRELKSSKAPAYVRDCVEVLDVLTLAAQELSRPGCLGRTPQPGSPSPNTPCLPEAAVSQPGSAVASDWRVVVEERIRSKTQRLSKGGPRQGPAGSPSRFNSVAGHFFFPLLQRFDRPLVTFDLLGEDQLVLGRLAHTLGALMCLAVNTTVAVAMGKALLEFVWALRFHIDAYVRQGLLSAVSSVLLSLPAARLLEDLMDELLEARSWLADVAEKDPDEDCRTLALRALLLLQRLKNRLLPPASP

SEQ ID NO: 189430 - DNA, 2514 bp, Artificial Sequence
  derived and/or modified sequence
atggagcccgcccccagcgaggtgagactggccgtgagagaggccatccacgccctgagcagcagcgaggacggcggccacatcttctgcaccctggagagcctgaagagatacctgggcgagatggagccccccgccctgcccagagagaaggaggagttcgccagcgcccacttcagccccgtgctgagatgcctggccagcagactgagccccgcctggctggagctgctgccccacggcagactggaggagctgtgggccagcttcttcctggagggccccgccgaccaggccttcctggtgctgatggagaccatcgagggcgccgccggccccagcttcagactgatgaagatggccagactgctggccagattcctgagagagggcagactggccgtgctgatggaggcccagtgcagacagcagacccagcccggcttcatcctgctgagagagaccctgctgggcaaggtggtggccctgcccgaccacctgggcaacagactgcagcaggagaacctggccgagttcttcccccagaactacttcagactgctgggcgaggaggtggtgagagtgctgcaggccgtggtggacagcctgcagggcggcctggacagcagcgtgagcttcgtgagccaggtgctgggcaaggcctgcgtgcacggcagacagcaggagatcctgggcgtgctggtgcccagactggccgccctgacccagggcagctacctgcaccagagagtgtgctggagactggtggagcaggtgcccgacagagccatggaggccgtgctgaccggcctggtggaggccgccctgggccccgaggtgctgagcagactgctgggcaacctggtggtgaagaacaagaaggcccagttcgtgatgacccagaagctgctgttcctgcagagcagactgaccacccccatgctgcagagcctgctgggccacctggccatggacagccagagaagacccctgctgctgcaggtgctgaaggagctgctggagacctggggcagcagcagcgccatcagacacacccccctgccccagcagagacacgtgagcaaggccgtgctgatctgcctggcccagctgggcgagcccgagctgagagacagcagagacgagctgctggccagcatgatggccggcgtgaagtgcagactggacagcagcctgccccccgtgagaagactgggcatgatcgtggccgaggtggtgagcgccagaatccaccccgagggcccccccctgaagttccagtacgaggaggacgagctgagcctggagctgctggccctggccagcccccagcccgccggcgacggcgccagcgaggccggcaccagcctggtgcccgccaccgccgagccccccgccgagacccccgccgagatcgtggacggcggcgtgccccaggcccagctggccggcagcgacagcgacctggacagcgacgacgagttcgtgccctacgacatgagcggcgacagagagctgaagagcagcaaggcccccgcctacgtgagagactgcgtggaggccctgaccaccagcgaggacatcgagagatgggaggccgccctgagagccctggagggcctggtgtacagaagccccaccgccaccagagaggtgagcgtggagctggccaaggtgctgctgcacctggaggagaagacctgcgtggtgggcttcgccggcctgagacagagagccctggtggccgtgaccgtgaccgaccccgcccccgtggccgactacctgaccagccagttctacgccctgaactacagcctgagacagagaatggacatcctggacgtgctgaccctggccgcccaggagctgagcagacccggctgcctgggcagaaccccccagcccggcagccccagccccaacaccccctgcctgcccgaggccgccgtgagccagcccggcagcgccgtggccagcgactggagagtggtggtggaggagagaatcagaagcaagacccagagactgagcaagggcggccccagacagggccccgccggcagccccagcagattcaacagcgtggccggccacttcttcttccccctgctgcagagattcgacagacccctggtgaccttcgacctgctgggcgaggaccagctggtgctgggcagactggcccacaccctgggcgccctgatgtgcctggccgtgaacaccaccgtggccgtggccatgggcaaggccctgctggagttcgtgtgggccctgagattccacatcgacgcctacgtgagacagggcctgctgagcgccgtgagcagcgtgctgctgagcctgcccgccgccagactgctggaggacctgatggacgagctgctggaggccagaagctggctggccgacgtggccgagaaggaccccgacgaggactgcagaaccctggccctgagagccctgctgctgctgcagagactgaagaacagactgctgccccccgccagcccctag

SEQ ID NO: 189431 - DNA, 1083 bp, Artificial Sequence
  derived and/or modified sequence
atgatggccggcgtgaagtgcagactggacagcagcctgccccccgtgagaagactgggcatgatcgtggccgaggtggtgagcgccagaatccaccccgagggcccccccctgaagttccagtacgaggaggacgagctgagcctggagctgctggccctggccagcccccagcccgccggcgacggcgccagcgaggccggcaccagcctggtgcccgccaccgccgagccccccgccgagacccccgccgagatcgtggacggcggcgtgccccaggcccagctggccggcagcgacagcgacctggacagcgacgacgagttcgtgccctacgacatgagcggcgacagagagctgaagagcagcaaggcccccgcctacgtgagagactgcgtggaggtgctggacgtgctgaccctggccgcccaggagctgagcagacccggctgcctgggcagaaccccccagcccggcagccccagccccaacaccccctgcctgcccgaggccgccgtgagccagcccggcagcgccgtggccagcgactggagagtggtggtggaggagagaatcagaagcaagacccagagactgagcaagggcggccccagacagggccccgccggcagccccagcagattcaacagcgtggccggccacttcttcttccccctgctgcagagattcgacagacccctggtgaccttcgacctgctgggcgaggaccagctggtgctgggcagactggcccacaccctgggcgccctgatgtgcctggccgtgaacaccaccgtggccgtggccatgggcaaggccctgctggagttcgtgtgggccctgagattccacatcgacgcctacgtgagacagggcctgctgagcgccgtgagcagcgtgctgctgagcctgcccgccgccagactgctggaggacctgatggacgagctgctggaggccagaagctggctggccgacgtggccgagaaggaccccgacgaggactgcagaaccctggccctgagagccctgctgctgctgcagagactgaagaacagactgctgccccccgccagcccctag

SEQ ID NO: 189432 - DNA, 2514 bp, Artificial Sequence
  derived and/or modified sequence
atggagcctgcaccctctgaagtaaggcttgccgtgagagaagccattcacgccctctcctcgtcggaagatgggggtcatattttctgtacacttgagagcctcaaacgttacctaggtgagatggagccacctgcgcttcctcgcgaaaaggaggagttcgcatccgctcacttctctcctgtgctaagatgcctcgcctcgcgcctgagtcccgcttggctagaactgcttccccatggccgcctggaagagctgtgggccagctttttcctagagggacctgcggatcaggcttttctggtgctcatggagaccatcgagggcgccgccgggccttcttttagactcatgaaaatggcccgcctgctggcgagatttctaagggaaggccgactggcagtgcttatggaagcgcaatgcagacagcagacccagcccggttttattctgctgcgggagacactgctgggaaaggtggtcgcgttacccgaccacctcggcaataggctgcagcaggaaaatctggcagaattcttcccacaaaactattttaggctactgggcgaggaagtagttagggtgctccaagccgtggtggatagtctccaagggggtctagacagctccgtcagttttgtttcccaggtcctaggcaaagcctgcgtgcatggaaggcagcaagaaatactgggcgtcctggtcccgaggctggctgcgctgacgcaggggtcttatctgcatcaaagagtttgctggcgccttgtagaacaggtgcctgaccgggctatggaggcggtactcacggggctcgtggaagccgcacttggcccagaagtgctgtcgcgtctgttgggcaacctggtggtgaaaaataagaaagcccagtttgttatgacacagaagctgctcttccttcagtcccgcttgactactcccatgctgcagagtttgctgggacatctggccatggactcccaacggagaccccttctgctgcaggttcttaaggaacttctcgagacgtggggctcatcgagtgctatcaggcacacccccttgccccagcagagacacgttagcaaggccgttctcatttgcctcgcacagcttggtgaacccgagctgcgggactctcgggacgagttattggcatccatgatggcgggggtcaagtgccgccttgacagcagcctgccgcctgtgcggcggttgggcatgatagttgccgaggttgtctcagcccggatccaccctgaaggcccccccttgaagttccagtatgaagaagacgagctgtccctggagcttctcgcactggcctcacctcagcccgccggggatggcgcttccgaagcgggtaccagcctcgtgcccgccaccgctgaaccccctgctgagacacccgccgaaattgtggatggcggcgtgccgcaggcacaattggctgggagtgactcagatcttgactctgacgatgaatttgtgccttacgatatgtctggcgaccgggagctgaaaagctccaaggcacctgcttacgttagagactgcgtggaggctctcacaacttctgaggacatagaaagatgggaggccgctctgcgagcgctggaaggtctggtttatcggagccccaccgccacccgcgaagtctccgttgagcttgctaaggtgctgctacatttagaggagaagacatgtgtggtcggttttgctggcctccgtcagagggccttggtggctgtaacggtgaccgaccccgcaccagtcgctgactatctcactagccagttctacgccttgaactattctctacgccagagaatggacattctggacgtgctgacccttgccgcacaagagcttagtcgtcccggctgtttgggccgcaccccccagcccggaagcccatcccccaatacgccttgcctacctgaagctgccgtgtcacagcccggcagcgccgtcgcatccgattggcgcgtggtggttgaggaaagaattaggagcaagacacagagactgtccaagggcggccctcgacagggaccggcaggatctccgagccgttttaactctgttgccggccactttttttttccactgttgcagagattcgatcggccactggttacgtttgatctactcggcgaggaccagcttgtactgggccgactggctcatacgctgggtgccttaatgtgcctggcggtaaatacaactgtagcggtcgctatggggaaggcacttcttgaattcgtatgggccttgagatttcatattgacgcatatgtaaggcagggcttactttccgccgtctcatcagttttgcttagtcttccagctgctcggctgctcgaagatctgatggatgagttgctagaggcaaggagttggcttgctgacgtcgccgaaaaggacccagacgaggattgtcgcacattggctcttagggccctcttgttattacagcggctcaaaaatcgactactgccaccagccagcccatag

SEQ ID NO: 189433 - DNA, 1083 bp, Artificial Sequence
  derived and/or modified sequence
atgatggcaggtgtgaagtgcaggctggacagcagcctgcccccagtcaggcgtttgggaatgatcgtggcagaagtggtctccgctcggatacaccctgagggcccacccttgaagtttcagtacgaagaggatgaactgagtctggagcttctggccctagcttcccctcagcctgccggggatggggcctcggaggccggtactagcttagtcccagctaccgccgaacctcccgctgagacccctgcggagattgttgatggcggtgtgcctcaagctcagctcgccggaagtgattccgaccttgatagtgatgacgagtttgtgccctacgacatgtccggagacagggaactaaaatcatccaaggctcctgcatatgtgcgcgattgcgtcgaggttttagatgtcctcaccttggctgcacaggagctgagccggccgggttgtctgggacgtacaccacaacccggttctccctctcccaataccccgtgcctgccagaagcggcagtgagccaacccggatcagcagttgcatctgactggcgggtggtcgtggaagagcgaattcggtcgaagacacagaggctttctaaaggcggaccccgtcagggccctgcaggcagtccttcccgattcaacagcgtcgccggccacttcttctttccactgctgcagagatttgaccgccccctcgtcacctttgacctgttaggtgaggaccagttggtgctaggccgactggcccatactctgggtgcgctcatgtgcctcgccgttaacaccacggttgcagtggctatgggtaaagcactgctggaatttgtgtgggcattgcggttccacattgatgcttatgtgaggcagggtctcctcagtgcagtgtcaagcgtgttgctgagcttgcccgctgctcggctgctcgaagaccttatggatgagctcttggaggccaggtcctggctcgctgacgtggccgagaaagaccctgacgaggactgcaggactctggccctgcgggcactgctcctgctgcaacgcctgaagaatcggctcctgcctccagcctctccatag

SEQ ID NO: 189434 - DNA, 2514 bp, Artificial Sequence
  derived and/or modified sequence
atggagcccgcccccagcgaggtgcggctggccgtgcgggaggccatccacgccctgagcagcagtgaagatggcggccacatcttctgcaccctggagagcctgaagcgctacctgggggagatggagcccccagccctgccccgggagaaggaggagtttgccagcgcccacttcagccctgtgctgcgctgcctggccagccggctgagccctgcctggctggagctgctgccccacggccgcctggaggagctgtgggccagcttcttcctggagggccctgctgaccaggccttcctggtgctgatggagaccattgaaggagctgctggccccagcttccggctgatgaagatggcccggctgctggcccgcttcctgcgggagggccgcctggccgtgctgatggaggcccagtgccggcagcagacccagcccggcttcatcctgctgcgggagaccctgctgggcaaggtggtggccctgcctgaccacctgggcaaccggctgcagcaggagaacctggccgagttcttcccccagaactacttccggctgctgggggaggaggtggtgcgggtgctgcaggccgtggtggacagcctgcagggcggcctggacagctctgtgtcctttgtgtcccaggtgctgggcaaggcctgtgtgcacggccggcagcaggagatcctgggcgtgctggtgccccggctggccgccctgacccagggcagctacctgcaccagagggtgtgctggaggctggtggagcaggtgcctgaccgggccatggaggccgtgctgaccggcctggtggaggccgccctgggccctgaggtgctgagccggctgctgggcaacctggtggtgaagaacaagaaggcccagtttgtgatgacccagaagctgctcttcctgcagagccggctgaccacccccatgctgcagagcctgctgggccacctggccatggacagccagaggcggcccctgctgctgcaggtgctgaaggagctgctggagacctggggcagcagcagcgccatccgccacacccccctgccccagcagagacatgtgtccaaggctgtgctgatctgcctggcccagctgggggagcctgagctgcgggacagcagagatgagctgctggcctccatgatggccggcgtgaagtgccgcctggacagcagcctgccccctgtgcggcggctgggcatgattgtggccgaggtggtgtctgcccgcatccaccctgagggcccccccctgaagttccagtatgaggaggatgagctgagcctggagctgctggccctggccagcccccagcctgctggagatggagccagcgaggccggcaccagcctggtgcctgccacagctgagcccccagctgagaccccagctgagatcgtggatggcggcgtgccccaggcccagctggccggcagtgacagcgacctggacagtgatgatgaatttgtgccctatgacatgtctggggaccgggagctgaagagcagcaaggccccagcctacgtgcgggactgtgtggaggccctgaccaccagcgaggacatcgagcgctgggaggccgccctgcgggccctggagggcctggtgtaccgcagccccacagccacccgggaggtgtctgtggagctggccaaggtgctgctgcacctggaggagaagacctgtgtggtgggctttgctggcctgcggcagagggccctggtggccgtgacagtgacagatcctgcccctgtggccgactacctgaccagccagttctacgccctgaactacagcctgcggcagaggatggacatcctggatgtgctgaccctggccgcccaggagctgagccggcccggctgcctgggccgcaccccccagcccggcagccccagccccaacaccccctgcctgcctgaggccgctgtgtcccagcccggcagcgctgtggccagtgactggagggtggtggtggaggagcgcatccgcagcaagacccagaggctgagcaagggcggcccccggcagggccctgctggcagccccagccgcttcaacagcgtggccggccacttcttcttccccctgctgcagagatttgaccggcccctggtgacctttgacctgctgggggaggaccagctggtgctgggccgcctggcccacaccctgggcgccctgatgtgcctggccgtgaacaccaccgtggccgtggccatgggcaaggccctgctggagtttgtgtgggccctgcgcttccacattgatgcctacgtgcggcagggcctgctgtctgctgtgtcctctgtgctgctgagcctgcctgctgcccggctgctggaggacctgatggatgagctgctggaggcccgctcctggctggctgatgtggccgagaaggaccctgatgaggactgcaggaccctggccctgcgggccctgctgctgctgcagaggctgaagaaccggctgctgcccccagccagcccctag

SEQ ID NO: 189435 - DNA, 1083 bp, Artificial Sequence
  derived and/or modified sequence
atgatggccggcgtgaagtgccgcctggacagcagcctgccccctgtgcggcggctgggcatgattgtggccgaggtggtgtctgcccgcatccaccctgagggcccccccctgaagttccagtatgaggaggatgagctgagcctggagctgctggccctggccagcccccagcctgctggagatggagccagcgaggccggcaccagcctggtgcctgccacagctgagcccccagctgagaccccagctgagatcgtggatggcggcgtgccccaggcccagctggccggcagtgacagcgacctggacagtgatgatgaatttgtgccctatgacatgtctggggaccgggagctgaagagcagcaaggccccagcctacgtgcgggactgtgtggaggtgctggatgtgctgaccctggccgcccaggagctgagcaggcctggctgcctgggccgcaccccccagcccggcagccccagccccaacaccccctgcctgcctgaggccgctgtgtcccagcccggcagcgctgtggccagtgactggagggtggtggtggaggagcgcatccgcagcaagacccagaggctgagcaaaggaggcccccggcagggccctgctggcagccccagccgcttcaacagcgtggccggccacttcttcttccccctgctgcagagatttgaccggcccctggtgacctttgacctgctgggggaggaccagctggtgctgggccgcctggcccacaccctgggcgccctgatgtgcctggccgtgaacaccaccgtggccgtggccatgggcaaggccctgctggagtttgtgtgggccctgcgcttccacattgatgcctacgtgcggcagggcctgctgtctgctgtgtcctctgtgctgctgagcctgcctgctgcccggctgctggaggacctgatggatgagctgctggaggcccgctcctggctggctgatgtggccgagaaggaccctgatgaggactgcaggaccctggccctgcgggccctgctgctgctgcagaggctgaagaaccggctgctgcccccagccagcccctag

SEQ ID NO: 189436 - DNA, 2514 bp, Artificial Sequence
  derived and/or modified sequence
atggagcccgcccccagcgaggtgcggctggccgtgcgggaggccattcacgctctcagcagcagcgaagacggaggtcacattttctgcaccctcgagagtctgaagcgatacctcggagaaatggagcctcctgctcttcctagggaaaaggaggagttcgcttcagcacatttctccccagtgttaaggtgcctcgctagcaggctgtcaccggcctggctcgagctactgccgcatgggcgactagaggagttgtgggcaagcttttttctcgaggggcctgcagaccaggccttcctggtactgatggagacaatcgaaggcgcggcgggaccatcattcaggttgatgaagatggcgcggctactggcaagattcctgagagaaggcagattagcagtcttgatggaagcgcagtgtaggcagcaaactcagcctggattcatcttactgagggagacattgcttgggaaggtggttgcccttcccgaccacctgggaaacagactgcaacaagaaaaccttgctgagttctttccgcagaattattttcgcctcctgggcgaggaggtagttcgtgtactgcaggctgttgtagacagtctgcagggtggcctcgacagttccgtgagttttgttagccaggttctgggaaaagcctgtgtacatgggcgccaacaggagatcctgggcgtactggtgcctcgtctggcagcactgacacagggatcctacttacaccagcgcgtttgttggcgactggtggagcaggtgccggaccgggctatggaggccgttttgacagggctggttgaggcagccctgggaccagaggtgctcagccggctgctcggcaatcttgtcgtgaagaacaagaaggcccagttcgtgatgacgcagaagttgctgtttttgcagtccagacttactaccccaatgttacaatccctactgggacatctggccatggactctcagcgcagacccctgttgttacaagtgttgaaagagctcttggagacctggggaagctcttctgcaatccggcatacccctctccctcaacagaggcacgtgtcaaaagccgtcctcatctgtctggcacaactaggcgagcctgagctgagagacagtcgggatgagctcctcgcatcgatgatggcgggggtgaagtgcagactcgactccagcctgccccctgttcgacgactgggcatgattgtggctgaggtggttagcgctcgaattcatcctgaagggccccctctcaagtttcagtacgaggaagatgaacttagcctggagctgttggctctggcatcacctcagcccgctggagacggcgctagcgaggccggaaccagcttagtgcccgcaacagccgaaccccctgccgagacccccgccgagatcgtggacgggggcgtcccccaggctcagttagccggatctgactctgatctcgactcggacgacgagtttgtgccgtacgatatgagcggcgacagggagctgaagagttcgaaggcacccgcgtacgtccgagactgcgtggaagccttgactacatcagaagacatagagcgctgggaagcagcattgagagctctggaaggcctggtctataggtcaccgacagctacgagggaggtttccgtggagctggctaaggtgctgctccacctggaggagaagacttgcgtagtaggattcgctgggcttcggcagcgtgcgctagttgccgtgaccgtgacggaccctgctccggttgcggactatcttacctcccaattctatgctctgaattacagtcttcggcagcgaatggacattctcgatgttctgactctagccgcccaggagctgtctaggcctggatgcctgggccggaccccccagcccggctccccgagcccgaataccccctgtcttccagaggccgccgtgagtcaaccagggagtgccgtggcatcagattggagggtggtggtggaagaaagaatccgatcaaaaacacagagactctccaaggggggcccccggcaggggccggcaggcagtccatccaggtttaattcagtggccggtcatttcttttttcccctgctacaaagattcgacaggcctctagtcacattcgacctgctaggcgaagatcagctggtccttggaagacttgcacataccctgggggcactgatgtgtctggccgtcaataccactgttgcggttgccatggggaaggccctgctggagtttgtgtgggctctgcggtttcacattgacgcttatgtacgtcagggcctgctttcagcagtaagctcagttctgctctcactgccagccgcaagacttcttgaagatctcatggatgaactgttggaggccaggtcttggctcgcagatgtggccgaaaaggatcctgacgaggactgcaggacattagcccttcgggccctgctccttttgcaaagactgaaaaatcgactactgcctccagcctccccctag

SEQ ID NO: 189437 - DNA, 1083 bp, Artificial Sequence
  derived and/or modified sequence
atgatggccggcgtgaagtgccggctggacagcagcctgccccccgttcgacggcttggaatgattgttgcggaagttgtgtctgccaggatccatccagaagggcccccactcaagttccagtatgaggaggacgaactttcacttgagctattagctttggccagcccccaaccagctggcgacggagcctctgaagctggtacctccctcgtccctgcaactgctgaacctccagcggagacacccgccgagatagtggatggtggtgtgccccaggcacagcttgccggctccgactccgacctcgatagcgacgatgagtttgtgccctatgatatgtctggtgaccgagagctgaagagctcgaaggctcctgcatacgttagggattgtgttgaggtgcttgatgttcttacactcgccgcacaagagcttagcagacccggctgtttgggacgaaccccacagcctggctcgccatccccaaataccccatgccttcctgaagccgccgtgtcacagccaggcagcgctgtcgcttctgattggcgcgttgtggtggaggagaggatcagatcgaaaacacaacgactctcaaagggtggccctcggcagggaccagccgggagtcctagtagatttaattctgtagcggggcactttttttttccactgctccagagatttgataggcctcttgtgacttttgatctattgggcgaagaccagctcgttctggggcgactggctcatacgctgggagcattaatgtgtctagccgtgaataccacagtcgctgtggcaatgggaaaggctctgttagagttcgtgtgggcactcaggtttcatatagacgcttacgtgaggcagggtcttttgagcgctgtgagctcagtgctgctttccttgcccgctgctcggcttcttgaggatctgatggacgaactgctggaggcccggagttggctggcagacgtcgctgagaaggatcccgatgaggactgcaggaccttagcactgcgtgcacttctgctgctgcagagactcaaaaatcgcttgctgccaccggcatcgccctag

SEQ ID NO: 189438 - DNA, 2514 bp, Artificial Sequence
  derived and/or modified sequence
atggagccggcaccttctgaagtaaggctcgccgtacgcgaggccatacatgccctcagctcatcagaggatggaggacacattttctgcactcttgagagcttgaaacgctatctgggcgaaatggaacctccagccctgccacgagagaaggaggagttcgcctctgctcatttttcccctgtcctgcggtgcctcgccagtagactgtcacccgcttggttggagctcttgccccacggcagattggaagagttgtgggcctcatttttcctggaggggccagccgaccaggctttcctcgtgctgatggagaccatagagggtgctgcgggacccagttttaggctcatgaagatggctcggctcctcgcccgatttttgagagaagggaggctcgcagtactgatggaggcacagtgccgacaacaaactcagcccggatttatcttgctgcgcgagactttactcggcaaagtcgtggccctgcccgatcacctcggcaatcgtctacagcaagaaaacctcgctgaatttttcccccaaaactatttccgtctgttgggcgaggaagtcgtgcgcgtgcttcaagcggtggtcgattccctgcaaggcggtctcgacagttctgtgagttttgttagccaggtgttgggaaaggcctgtgtgcacggtcggcaacaggaaatactgggcgtgcttgtcccccgtttggctgcgctgactcaggggagttatctccaccagagagtgtgttggaggctcgtagaacaggtcccagaccgggctatggaagccgtactgactggactggttgaagcagcgctcggccctgaagtgctcagtagactgctcggcaacctcgtcgttaagaataagaaagctcagtttgtcatgactcagaaactgttatttcttcagagcagactgacaaccccaatgctccagagtcttcttggacacctagctatggattcgcagaggcgtcctctgttgttgcaggtgttgaaggaattgctggagacctggggctcctcctctgcaattagacacacacctcttcctcagcagagacacgtgagcaaggctgtgcttatctgtctggcccagctgggggagcctgaactgcgagatagccgagatgagctgctggctagtatgatggccggagttaagtgccgtttggattcatctttacccccagttagacgtcttggtatgatcgttgccgaagtggtgtcagccaggatccaccccgaaggcccacccctgaagttccagtacgaagaggatgaactgtcgctggaactgctggctttagcttctcctcagcctgccggagatggagcttccgaagccggaacctcactggttcccgctacagcagagcctcccgcagaaactcccgcagagattgttgatggtggcgtcccacaagcacagcttgccggaagtgattccgatcttgacagtgatgatgagttcgtgccgtacgacatgtcgggtgacagagagttaaagagcagcaaggctcctgcatatgttagagattgcgtggaagccctaacaaccagtgaagacattgagcggtgggaggctgcactgcgcgctctggagggactcgtctatcgaagccccacagccacaagagaggtaagtgtagagctcgctaaggttttactgcatctcgaagaaaaaacgtgtgtggtaggtttcgccggacttcgccaaagggcactagttgctgttactgtcacggaccccgcaccagtcgccgactacttaacatctcagttttacgctctcaattattctctgaggcagcggatggacattcttgacgtcctgacattagcagcccaggaactgagtcggcctgggtgtttgggcagaactccacagcctgggtcaccgtcccccaataccccatgcctccctgaggcagcagtgtcacagcctggatctgctgtcgcttctgactggcgggtagtggtggaggagaggatcagaagtaagacccaacgccttagtaagggaggacctcggcaggggccagcgggatccccatctaggtttaactcagtggccggacacttctttttccccctcctccagcgctttgacagaccccttgtaacattcgatctgctgggagaagaccagctggttttagggagactggctcataccttgggcgcactcatgtgtctagccgttaacactacagtggcggtggcgatgggcaaggcactgctcgagttcgtatgggcactccgatttcacatcgacgcttatgtgcgccagggcctgttaagtgctgtctccagtgtgctgctgagcctacctgcagccaggcttctcgaggatctgatggatgaactgcttgaagcccgaagttggcttgcggacgttgccgagaaagatcccgatgaggattgtaggactctcgccttaagagctctccttctccttcagcgactgaaaaaccggcttcttcccccagcctccccatag

SEQ ID NO: 189439 - DNA, 1083 bp, Artificial Sequence
  derived and/or modified sequence
atgatggccggtgtaaagtgtcgcctggatagtagtctgccacctgtccgtcgactggggatgatcgtcgcagaagtggtttctgccagaattcatcccgaggggcctcctctcaagtttcaatatgaggaggacgagctctctctcgaactcctggctctcgcctccccccagcccgctggagacggtgccagcgaagcaggaacatcactggtgcctgcgacggcggaaccccctgccgaaacaccagccgagattgttgatggtggggtccctcaggcgcagctggccggaagcgacagcgatctcgatagcgacgacgaattcgtcccatatgatatgtctggcgatagggaactgaagagctcgaaagcgcctgcctatgtgcgtgattgcgtggaggttctcgatgtacttaccctggctgcccaagagcttagtcgcccaggatgtctgggccgtacaccgcaacccggaagtccaagcccgaatacgccatgtctccccgaagccgctgtttcgcagcccggatccgcagtggcttccgactggcgggtcgttgtggaggaacggattaggtccaagacgcagcggctgagcaaagggggacctcgtcagggtcccgctggaagcccttccaggttcaacagcgtggccggtcacttctttttcccactcctacagcgtttcgatcgacccctggtaactttcgacctcctcggtgaggatcaactcgtgctgggcagactggcacatacgttgggggctcttatgtgccttgccgttaataccaccgtcgctgtcgccatgggaaaggccctgcttgagttcgtgtgggccttgagatttcacattgatgcctatgttcggcaaggtctgctcagcgcagtgagttcagtactcctcagcctgccggctgcacgactgctagaggacctcatggatgagttgctggaggcaagatcttggctggctgatgtggccgagaaagaccctgatgaagactgccgcacattggccttgcgagccctccttctgctgcagagactgaaaaatcgcttgctgcctccagcaagcccatag

SEQ ID NO: 189440 - DNA, 3253 bp, Artificial Sequence
  derived and/or modified sequence
cgccccagaggctcaagaaaacccgcgggagcctcgcccggacccaggaactcgtgctcggggccaaccggctgggccgcgatcgcgtttcgtccggggccgcggcggccgtggggaatcggctgcagcgaatcggtggcgcgcggcgcctgagcgcgctgcagtcacccgggagccgggtccaggtcgtcttcccgtgacgcccagatctgtcctgcaggatggagccagcaccctcagaggttcgactcgccgtccgggaagccattcatgccctctcgtcttcggaggatggcggccacatcttctgcaccctggagtccctgaagcggtatctcggtgagatggagcctccagcgctcccgagggagaaggaggagtttgcctcggcccacttctcgcctgtcctcagatgtcttgccagcaggctgagcccagcctggctggagctgctgccccatggccgcctggaggagctgtgggccagcttcttcctggagggcccggcggaccaagccttcctggtgttgatggagaccatcgagggtgctgcgggccccagcttccggctgatgaagatggcgcggctgctggccagattcctgcgcgagggccggctggcagtgctgatggaggcgcagtgtcggcagcagacgcagcccggcttcatcctgctccgggagacgctgctgggcaaggtggtggccctgcccgatcacctgggcaaccgcctgcagcaggagaacttggccgagttcttcccccagaactacttccgcctgctcggcgaggaggtcgtccgggtgctgcaggcggttgtggactctctccaaggtggcctggattcctccgtgtccttcgtgtctcaggtccttgggaaagcctgtgtccacgggaggcagcaggagatcctgggcgtgctggtaccccggctggcagcgctcacccagggcagctacctgcaccagcgcgtctgctggcgcctggtggagcaagtgccggaccgggccatggaggctgtgctgaccgggctggtggaggccgcactggggcctgaggtcctttcgagactgctggggaacctggtggtgaagaacaagaaggcccagtttgtgatgacccagaagcttctgttcttacagtcccggctcacgacgcccatgctgcagagcctgctgggccatctggccatggacagccagcggcgcccgctcctgctgcaggtgctgaaggagctgttggagacgtggggcagcagcagtgccatccgccacactcccctgccgcagcagcgccacgtcagcaaggctgtcctcatctgcctggcgcaactcggggagccggaactgcgggacagccgggatgaactgctggccagcatgatggcgggcgtgaagtgccgcctggacagtagcctgccccccgtgcgacgcctgggcatgatcgtggcagaggtcgttagtgcccggatccaccccgaggggcctcccctgaaattccagtacgaagaggatgaactgagcctcgagctgctggccttggcctccccccagcctgcgggtgacggcgcctcggaggcgggcacgtccctcgttccagccacggcagagccccctgcagagacccccgcagagatcgtggatggcggcgtcccccaagcacagctggcgggctctgactcggacctggacagcgatgatgagtttgtcccctacgacatgtcgggggacagagagctgaagagcagcaaggctcctgcctacgtccgggactgcgtggaagccctgaccacgtctgaggacatagagcgctgggaggcagccctgcgggcccttgagggcctggtctacaggagccccacagccactcgggaggtgagcgtggagctggccaaggtgcttctgcatctggaggagaagacctgtgtggtgggatttgcagggctgcgccagagagccctggtggccgtcacggtcacagacccggccccggtggccgactatctgacctcacagttctatgccctcaactacagcctccggcagcgcatggacatcctggatgtgctgactctggctgcccaggagctgtctaggcctgggtgcctcgggaggactccccaacctggctccccaagtcccaacaccccgtgcctgccagaggcagccgtctctcagcctggcagtgccgtggcgtctgactggcgggtggtggtggaggagcggatcagaagcaagacccagcggctctccaagggtggcccgaggcagggcccggcaggcagccccagcagattcaactccgtggccggccacttcttcttccccctccttcagcgctttgacaggcctctggtgaccttcgacctcttgggagaagaccagctggttctcggaaggctggcgcacaccttaggggccctgatgtgcctggctgttaacaccacggtggctgtggccatgggcaaggccctgctggaattcgtgtgggcccttcgcttccacatcgatgcctacgtgcgccaggggctgttgtcggccgtctcctccgtcctgctcagcctgcctgctgcgcgcctgctggaggacctgatggacgagctgctggaagcccggtcctggctggcggacgtggctgagaaagacccggacgaggactgcaggacgctggcactgagggccctgctgcttctgcagagactcaagaacaggctcctcccacccgcgtctccctagtccctggaggcctccccaggaccaccctcgccgacagcaaggcaggcggctgagcagcggcctggagcagcagagccaggctttgtagcgaggccaggtcttcggccgcatccggtacggagagtgcagatgcaggaaggcccggcctgccgctatttatagtgcagccagtccgctaaaaatacactgggcctgggcactgcccgccgggacatggcagcctggacgtggggctggggctgtgggcgctgctggcggggttgactcttccagtgagggcagaaccaggctggcaggaggggaggacggtgtacctgctgctcagagcccccaaggctctcctctgagagccaccaagcaggacagagcagctcttgtcccaggtccctcgggctgagcgccgtgtcaccaggagaatagtgctcacagcccaggcagggtgtgtggctcctggatgggctcgtggggcgggatgggacagggcacgggctctcagaaaataaactgctttattggaa

SEQ ID NO: 189441 - DNA, 3036 bp, Artificial Sequence
  derived and/or modified sequence
gatgcgccctcccgcctggcgtcctccgcagattcgcgctgagaggcccgcggagacccgccccagaggctcaagaaaacccgcgggagcctcgcccggacccaggaactcgtgctcggggccaaccggctgggccgcgatcgcgtttcgtccggggccgcggcggccgtggggaatcggctgcagcgaatcggtggcgcgcggcgcctgagcgcgctgcagtcacccgggagccgggtccaggtcgtcttcccgtgacgcccagatctgtcctgcaggatggagccagcaccctcagaggttcgactcgccgtccgggaagccattcatgccctctcgtcttcggaggatggcggccacatcttctgcaccctggagtccctgaagcggtatctcggtgagatggagcctccagcgctcccgagggagaaggaggagtttgcctcggcccacttctcgcctgtcctcagatgtcttgccagcaggctgagcccagcctggctggagctgctgccccatggccgcctggaggagctgtgggccagcttcttcctggagggcccggcggaccaagccttcctggtgttgatggagaccatcgagggtgctgcgggccccagcttccggctgatgaagatggcgcggctgctggccagattcctgcgcgagggccggctggcagtgctgatggaggcgcagtgtcggcagcagacgcagcccggcttcatcctgctccgggagacgctgctgggcaaggtggtggccctgcccgatcacctgggcaaccgcctgcagcaggagaacttggccgagttcttcccccagaactacttccgcctgctcggcgaggaggtcgtccgggtgctgcaggcggttgtggactctctccaaggtggcctggattcctccgtgtccttcgtgtctcaggtccttgggaaagcctgtgtccacgggaggcagcaggagatcctgggcgtgctggtaccccggctggcagcgctcacccagggcagctacctgcaccagcgcgtctgctggcgcctggtggagcaagtgccggaccgggccatggaggctgtgctgaccgggctggtggaggccgcactggggcctgaggtcctttcgagactgctggggaacctggtggtgaagaacaagaaggcccagtttgtgatgacccagaagcttctgttcttacagtcccggctcacgacgcccatgctgcagagcctgctgggccatctggccatggacagccagcggcgcccgctcctgctgcaggtgctgaaggagctgttggagacgtggggcagcagcagtgccatccgccacactcccctgccgcagcagcgccacgtcagcaaggctgtcctcatctgcctggcgcaactcggggagccggaactgcgggacagccgggatgaactgctggccagcatgatggcgggcgtgaagtgccgcctggacagtagcctgccccccgtgcgacgcctgggcatgatcgtggcagaggtcgttagtgcccggatccaccccgaggggcctcccctgaaattccagtacgaagaggatgaactgagcctcgagctgctggccttggcctccccccagcctgcgggtgacggcgcctcggaggcgggcacgtccctcgttccagccacggcagagccccctgcagagacccccgcagagatcgtggatggcggcgtcccccaagcacagctggcgggctctgactcggacctggacagcgatgatgagtttgtcccctacgacatgtcgggggacagagagctgaagagcagcaaggctcctgcctacgtccgggactgcgtggaagtcctggatgtgctgactctggctgcccaggagctgtctaggcctgggtgcctcgggaggactccccaacctggctccccaagtcccaacaccccgtgcctgccagaggcagccgtctctcagcctggcagtgccgtggcgtctgactggcgggtggtggtggaggagcggatcagaagcaagacccagcggctctccaagggtggcccgaggcagggcccggcaggcagccccagcagattcaactccgtggccggccacttcttcttccccctccttcagcgctttgacaggcctctggtgaccttcgacctcttgggagaagaccagctggttctcggaaggctggcgcacaccttaggggccctgatgtgcctggctgttaacaccacggtggctgtggccatgggcaaggccctgctggaattcgtgtgggcccttcgcttccacatcgatgcctacgtgcgccaggggctgttgtcggccgtctcctccgtcctgctcagcctgcctgctgcgcgcctgctggaggacctgatggacgagctgctggaagcccggtcctggctggcggacgtggctgagaaagacccggacgaggactgcaggacgctggcactgagggccctgctgcttctgcagagactcaagaacaggctcctcccacccgcgtctccctagtccctggaggcctccccaggaccaccctcgccgacagcaaggcaggcggctgagcagcggcctggagcagcagagccaggctttgtagcgaggccaggtcttcggccgcatccggtacggagagtgcagatgcaggaaggcccggcctgccgctatttatagtgcagccagtccgctaaaaatacactgggcctgggcactgcccgccgggacatggcagcctggacgtggggctggggctgtgggcgctgctggcggggttgactcttccagtgagggcagaaccaggctggcaggaggggaggacggtgtacctgctgctcagagcccccaaggctctcctctgagagccaccaagcaggacagagcagctcttgtcccaggtccctcgggctgagcgccgtgtcaccaggagaatagtgctcacagcccaggcagggtgtgtggctcctggatgggctcgtggggcgggatgggacagggcacgggctctcagaaaataaactgctttattgg

SEQ ID NO: 189442 - protein, 805 aa, Artificial Sequence
  derived and/or modified sequence
MNAVGSPEGQELQKLGSGAWDNPAYSGPPSPHGTLRVCTISSTGPLQPQPKKPEDEPQETAYRTQVSSCCLHICQGIRGLWGTTLTENTAENRELYIKTTLRELLVYIVFLVDICLLTYGMTSSSAYYYTKVMSELFLHTPSDTGVSFQAISSMADFWDFAQGPLLDSLYWTKWYNNQSLGHGSHSFIYYENMLLGVPRLRQLKVRNDSCVVHEDFREDILSCYDVYSPDKEEQLPFGPFNGTAWTYHSQDELGGFSHWGRLTSYSGGGYYLDLPGSRQGSAEALRALQEGLWLDRGTRVVFIDFSVYNANINLFCVLRLVVEFPATGGAIPSWQIRTVKLIRYVSNWDFFIVGCEVIFCVFIFYYVVEEILELHIHRLRYLSSIWNILDLVVILLSIVAVGFHIFRTLEVNRLMGKLLQQPNTYADFEFLAFWQTQYNNMNAVNLFFAWIKIFKYISFNKTMTQLSSTLARCAKDILGFAVMFFIVFFAYAQLGYLLFGTQVENFSTFIKCIFTQFRIILGDFDYNAIDNANRILGPAYFVTYVFFVFFVLLNMFLAIINDTYSEVKEELAGQKDELQLSDLLKQGYNKTLLRLRLRKERVSDVQKVLQGGEQEIQFEDFTNTLRELGHAEHEITELTATFTKFDRDGNRILDEKEQEKMRQDLEEERVALNTEIEKLGRSIVSSPQGKSGPEAARAGGWVSGEEFYMLTRRVLQLETVLEGVVSQIDAVGSKLKMLERKGWLAPSPGVKEQAIWKHPQPAPAVTPDPWGVQGGQESEVPYKREEEALEERRLSRGEIPTLQRS

SEQ ID NO: 189443 - DNA, 2418 bp, Artificial Sequence
  derived and/or modified sequence
atgaatgctgttggaagtccagagggtcaggagctccagaaactgggcagcggcgcatgggataacccggcatactcaggacctccttcaccacatggtaccctgcgcgtgtgtactatctctagtaccgggcccctccagccacagcctaagaagccagaagacgaacctcaggagactgcgtacagaacgcaggtgtccagttgctgccttcacatttgccaaggaattcgtgggttgtgggggaccacattgactgagaacacagcagagaacagagagctgtacatcaaaaccaccctgcgtgaactactggtttacatcgtatttttagtcgatatttgtctgctaacctacggtatgactagttcctccgcttactactacacgaaggttatgtctgagctttttctacatacacccagcgacacaggtgtctcattccaggccattagctcaatggctgacttttgggatttcgcacagggtccccttctcgactccctgtattggacgaagtggtacaataaccagtcattgggacatggctcccatagcttcatctattacgaaaatatgctgctaggcgtgccccgcctgcgtcagctgaaggtccggaacgactcctgcgttgtgcatgaggatttccgggaagatatcctctcctgttatgacgtatactctcccgataaagaggagcaactcccctttggacccttcaatggtacagcttggacttaccactcgcaggacgaactgggtgggttttcacactgggggcgactaacctcctactcaggaggcgggtattaccttgatctgccaggaagccgtcaaggttcagctgaagccttgcgagcactccaggaaggtttatggctagatagaggaacaagagtagtcttcatcgacttctcggtctacaatgctaatatcaatttgttttgtgtattaaggctggtcgttgagttcccagcaacaggcggtgctatcccctcctggcagattagaaccgtgaagttaatccgttacgtatccaactgggacttctttattgtcggctgtgaggtcatcttctgtgtgtttatcttttattacgttgtggaggagatcctcgaactccatatccacagacttcgctatttgagcagtatatggaacattcttgacttggttgtgatccttctgtccatcgttgccgttggctttcacatcttccgcactctcgaggtgaacaggctgatgggcaagctgctccagcaacccaatacctatgccgactttgaattcttggccttttggcagacccaatataacaacatgaatgctgttaatctgtttttcgcctggattaagatctttaagtatatttcctttaataagactatgacccagctctcttccactctggccaggtgtgccaaagacatactcggattcgccgttatgttttttatcgtcttcttcgcatatgcccagttaggctatcttctgttcggcacacaggtagaaaatttttcaaccttcataaagtgcatatttacccagtttcggattatcctgggagattttgattacaatgcaattgataatgctaatcgaatccttgggccggcttacttcgtgacctacgtgttttttgtgttctttgtgttgctgaacatgtttctagccatcatcaatgacacctactccgaggtgaaagaggaactggccggacaaaaggacgagcttcaactctccgacctgctgaagcaggggtacaataagacccttcttagactgagactgcggaaggaacgcgtgtctgacgtgcagaaagttctacagggcggtgaacaggaaatacaattcgaggattttacaaatacactcagggagttaggacacgctgaacatgaaatcaccgagctgaccgcaacatttactaagtttgacagagacgggaacaggattctggatgaaaaggagcaggagaaaatgcggcaagatctcgaagaggaaagggtagcactgaataccgaaatcgagaagctgggtcggagtatcgttagctccccacaggggaaatcgggcccagaagccgccagagccggaggctgggttagcggcgaggaattctacatgctgactcgccgagtgctccaactcgagacagtcctcgaaggcgtggtatctcagatcgatgccgtgggcagtaagttaaaaatgttggagagaaaaggctggctcgcaccttccccgggagtcaaagaacaggcaatctggaagcatcctcagcccgcccccgcagtcactccggatccatggggcgtacaggggggtcaggagtcagaagtgccatacaagagggaagaagaggctttggaagaacgcagactcagtcggggcgagatccccacactacagcgctcctag

SEQ ID NO: 189444 - DNA, 2418 bp, Artificial Sequence
  derived and/or modified sequence
atgaatgctgtgggcagccctgagggccaggagctgcagaagctgggcagcggggcctgggacaacccagcctacagcggcccccccagcccccacggcaccctgcgggtgtgcaccatcagcagcacaggccccctgcagccccagcccaagaagccagaagatgagccccaggagacagcctaccgcacccaggtgagcagctgctgcctgcacatctgccagggcatccggggcctgtggggcaccaccctgacagaaaatacagcagaaaatcgggagctgtacatcaagaccaccctgcgggagctgctggtgtacatcgtgttcctggtggacatctgcctgctgacctacggcatgaccagcagcagcgcctactactacaccaaggtgatgtctgagctgttcctgcacacccccagcgacaccggggtgtccttccaggccatcagctccatggctgacttctgggactttgcccagggccccctgctggacagcctgtactggaccaagtggtacaacaaccagagcctgggccacggcagccacagcttcatctactatgagaacatgctgctgggcgtgccccggctgcggcagctgaaggtgagaaatgacagctgtgtggtgcatgaggacttccgggaggacatcctgagctgctatgatgtgtacagcccagacaaggaggagcagctgcccttcggccccttcaatggaacagcctggacctaccacagccaggatgagctgggcggcttcagccactggggccgcctgaccagctacagcggcggcggctactacctggacctgcccggcagccggcagggcagcgctgaggccctgcgggccctgcaggagggcctgtggctggaccggggcaccagggtggtgttcatcgacttctctgtgtacaatgccaacatcaacctcttctgtgtgctgcggctggtggtggagttccctgccactggaggagccatccccagctggcagatcagaacagtgaagctgatccgctacgtgagcaactgggacttcttcatcgtgggctgtgaggtgatcttctgtgtgttcatcttctactacgtggtggaggagatcctggagctgcacatccaccggctgcgctacctgagcagcatctggaacatcctggacctggtggtgatcctgctgagcatcgtggccgtgggcttccacatcttccgcaccctggaggtgaaccggctgatgggcaagctgctgcagcagcccaacacctacgccgactttgagttcctggccttctggcagacccagtacaacaacatgaatgctgtgaacctcttctttgcctggatcaagatcttcaagtacatctccttcaacaagaccatgacccagctgagcagcaccctggcccgctgtgccaaggacatcctgggctttgctgtgatgttcttcatcgtgttctttgcctatgcccagctgggctacctgctgtttggcacccaggtggagaacttcagcaccttcatcaagtgcatcttcacccagttccgcatcatcctgggggactttgactacaatgccatcgacaatgccaaccgcatcctgggccctgcctactttgtgacctacgtgttctttgtgttctttgtgctgctgaacatgttcctggccatcatcaatgacacctacagcgaggtgaaggaggagctggccggccagaaggatgagctgcagctgagtgacctgctgaagcagggctacaacaagaccctgctgcggctgcggctgaggaaggagcgggtgtctgatgtgcagaaggtgctgcagggcggggagcaggagatccagtttgaggacttcaccaacaccctgcgggagctgggccatgctgagcacgagatcacagagctgacagccaccttcaccaagtttgacagagatggcaaccgcatcctggatgagaaggagcaggagaagatgaggcaggacctggaggaggagcgggtggccctgaacacagaaattgagaagctgggccgcagcatcgtgagcagcccccagggcaagagcggccctgaggccgcccgggccggcggctgggtgtctggagaggagttctacatgctgacccggcgggtgctgcagctggagaccgtgctggagggcgtggtgtcccagattgatgctgtgggcagcaagctgaagatgctggagaggaagggctggctggcccccagccctggggtgaaggagcaggccatctggaagcacccccagcctgccccagctgtgaccccagacccctggggcgtgcagggcggccaggagagcgaggtgccctacaagcgggaggaggaggccctggaggagcggcggctgagcagaggagagatccccaccctgcagaggagctag

SEQ ID NO: 189445 - DNA, 2418 bp, Artificial Sequence
  derived and/or modified sequence
atgaacgccgtgggcagccccgagggccaggagctgcagaagctgggctctggcgcctgggataaccccgcttattcgggaccccccagtcctcacggcacgcttcgcgtatgcactatctcatctacaggccccttgcagcctcagcccaaaaagccggaagacgaaccacaggaaacggcttaccgcacacaggtatcctcttgctgcctgcacatctgccagggcattcgaggattgtggggaacgactctcactgaaaataccgccgagaatagagaactgtacatcaagactaccctccgcgaactactggtctatattgttttcttggtggacatatgcctcttgacttacggcatgacgagtagttcagcgtattattatacaaaagtgatgtctgagctctttttacacacccctagcgacacgggagtctccttccaagccatctcctccatggccgacttttgggatttcgctcagggcccactgttggattctctgtactggaccaagtggtacaacaaccagtcgctgggccacggaagccattcctttatctactatgagaatatgctcctgggagtgccccggctgaggcagcttaaggtccgcaatgatagctgtgtcgtgcatgaggatttcagggaggacatcttgtcgtgttacgacgtttatagtcccgacaaagaagagcaacttccattcggaccctttaacggaaccgcttggacgtaccactcacaggacgagttggggggtttcagtcactggggcaggttaaccagttacagtggaggtggctactatctagacctgcccgggagccgacagggatctgccgaggcgttgcgtgcattgcaggagggactctggctggacaggggcaccagggtcgttttcatagactttagtgtatacaacgcaaatataaacttattctgtgttctgcgactcgtcgtcgaatttccagctactggcggcgcaattccatcctggcagatcaggaccgtcaagctgatccgctatgtttccaactgggattttttcatagtgggatgcgaagtgatcttttgtgtgttcatcttctactacgtcgtcgaggaaatcttagaactgcatattcaccgactgcgatacctgtcatctatttggaatatactggacctcgtggtcatactcctgtctatcgtagcagtgggtttccacattttcaggaccctcgaagtgaacagacttatgggaaaactgctccagcaaccaaacacctatgctgatttcgagttcctggctttctggcaaacacagtacaacaatatgaacgctgtcaacctgttctttgcttggatcaagatttttaagtacatcagctttaacaagacgatgacacagttatccagcaccctggcccgttgtgcgaaggacattctgggattcgcagttatgttctttatcgtctttttcgcatacgcccagctagggtacctgctctttggaacacaggtggagaacttctcaacattcataaaatgtatttttactcagttccggattatcctgggggatttcgactacaacgctatcgacaacgcgaaccgtatccttggccctgcttactttgttacctatgtcttcttcgtattcttcgtccttctcaacatgtttctggctattataaatgatacttatagcgaggtaaaagaagagcttgctggacagaaggacgagctgcagctgtcggacctgttgaagcagggatacaataaaacgctgctgcgtcttcggctcagaaaggagcgggtttcagatgtgcagaaggttctgcaggggggcgagcaggagatacagtttgaggacttcacaaacaccctgcgggagctgggccatgccgaacacgagattaccgagctgacggcaacctttaccaagtttgacagggatggtaatcggattctcgatgagaaggaacaagagaagatgcgccaggatctggaggaagagcgcgtggccttaaacactgaaatcgaaaagctgggtcgctcaatcgtgtcttcacctcagggcaaatccggacccgaagcagcaagggctggcggctgggtttctggcgaggagttctatatgttgacaagaagggtgctacagttagagaccgtgctggaaggcgtagtatcacagatcgacgcagtgggcagcaaacttaagatgctcgagagaaagggctggttagctcctagcccaggggtgaaggagcaggctatatggaaacaccctcagcccgcccctgctgtgactcctgatccctggggagtccagggcggccaggagtccgaggttccttacaaacgagaggaggaggccctcgaggaacgcaggctgtctagaggcgaaatcccaactctgcagagaagttag

SEQ ID NO: 189446 - DNA, 3043 bp, Artificial Sequence
  derived and/or modified sequence
cagcatcgccttttcctcccgtttctccttccactcccagctccacatcctcctcctattctcccctctcccctcttcaaacccccaccttccagttccctcacctcccctttcggctggtcccctggggcttgcagcaagagggagagagagctcctgacaggattgatggtccttccccaccctgtcctctcatccgctccctccccagcaggcacagacatccccctacaaaaggcaggagcccaggctgtgtggaaacagctgctctcagacgcctttccatttgctctctgctggctaggctgggctgtgcctctgctccctcttcctctagctgagagtgggcacctggggtaccgggcccccccacctcattccccatgaatgctgtgggaagtcctgaggggcaggagctgcaaaagctggggagtggagcctgggacaaccccgcctacagtggtcccccttccccacacgggacgctgagagtctgcaccatctccagcacggggcctctccagccccaacccaagaagcctgaagatgaaccccaggagacggcatacaggacccaggtgtccagctgctgcctccatatctgtcaaggcatcagaggactttggggaacaaccctgactgagaacacagctgagaaccgggaactttatatcaagaccaccctgagggagctgttggtatatattgtgttcctggtggacatctgtctactgacctatggaatgacaagctccagtgcttattactacaccaaagtgatgtctgagctcttcttacatactccatcagacactggagtctcctttcaggccatcagcagcatggcggacttctgggattttgcccagggcccactactggacagtttgtattggaccaaatggtacaacaaccagagcctgggccatggctcccactccttcatctactatgagaacatgctgctgggggttccgaggctgcggcagctaaaggtccgcaatgactcctgtgtggtgcatgaagacttccgggaggacattctgagctgctatgatgtctactctccagacaaagaagaacaactcccctttgggcccttcaatggcacagcgtggacataccactcgcaggatgagttggggggcttctcccactggggcaggctcacaagctacagcggaggtggctactacctggaccttccaggatcccgacagggtagtgcagaggctctccgggcccttcaggaggggctgtggctggacaggggcactcgagtggtgttcatcgacttctcagtctacaatgccaatatcaatcttttctgtgtcctgaggctggtggtggagtttccagctacaggaggtgccatcccatcctggcaaatccgcacagtcaagctgatccgctatgtcagcaactgggacttctttatcgttggctgtgaggtcatcttctgcgtcttcatcttctactatgtggtggaagagatcctggagctccacattcaccggcttcgctacctcagcagcatctggaacatactggacctggtggtcatcttgctctccattgtggctgtgggcttccacatattccgaaccctcgaggtgaatcggctcatggggaagctcctgcagcagccaaacacgtatgcagactttgagttcctcgccttctggcagacacagtacaacaacatgaatgctgtcaacctcttcttcgcctggatcaagatattcaagtacatcagcttcaacaaaaccatgacccagctctcctccacgctggcccgctgtgccaaggacatcctgggcttcgccgtcatgttcttcattgttttcttcgcctatgcccaactcggctacctgcttttcgggacccaagtggaaaactttagcactttcatcaagtgcattttcactcagttccggataatcctcggggactttgactacaatgctatcgacaatgccaaccgcatcctgggccctgcctactttgtcacctatgtcttcttcgtcttcttcgtgctcctgaacatgttcctggccatcatcaatgacacatattcagaggtcaaggaggagctggctggacagaaggatgagctgcaactttctgacctcctgaaacagggctacaacaagaccctactaagactgcgtctgaggaaggagagggtttcggatgtgcagaaggtcctgcagggtggggagcaggagatccagtttgaggatttcaccaacaccttaagggaactgggacacgcagagcatgaaatcactgagctcacggccaccttcaccaagtttgacagagatgggaatcgtattctggatgagaaggaacaggaaaaaatgcgacaggacctggaggaagagagggtggccctcaacactgagattgagaaactaggccgatctattgtgagcagcccacaaggcaaatcgggtccagaggctgccagagcaggaggctgggtttcaggagaagaattctacatgctcacaaggagagttctgcagctggagactgtcctggaaggagtagtgtcccagattgatgctgtaggctcaaagctgaaaatgctggagaggaaggggtggctggctccctccccaggcgtgaaggaacaagctatttggaagcacccgcagccagccccagctgtgaccccagacccctggggagtccagggtgggcaggagagtgaggttccctataaaagagaagaggaagccttagaggagaggagactctcccgtggtgagattccaacgttgcagaggagttaagtgtgaggcactcccggagcaaagtctatgaaggatcttctgcaagaggctgcctcctggtccactgaacctggaaactgagtgggctttaaccaggagataaaaatggagcctgaagggaatcaggcaaggaaatgaactcaggattcagagatctttgaattaatatgtggtgggttctgacattattcttccataagaccatgtgggtttccatggtggctatcaataaaactccttag

SEQ ID NO: 189447 - DNA, 2418 bp, Artificial Sequence
  derived and/or modified sequence
atgaatgctgtcgggtcccctgagggacaggagttacagaagttgggctccggtgcatgggataatcctgcttacagcggcccacccagtccgcacggaactctgcgggtgtgcaccattagtagcacaggccctctgcagccacagcccaagaagcctgaggacgagcctcaggagactgcatatagaacccaggtgtcctcatgctgtctacacatctgtcaggggattagaggcctgtggggcactaccttgacggagaataccgcggagaacagggagctgtacatcaaaaccacccttagagaactgctggtgtatattgtttttctcgtcgacatctgtcttctgacatatgggatgacctcaagtagtgcctactactataccaaggtgatgagcgagctttttctccataccccttccgataccggggtgagctttcaggcgatctctagcatggctgacttctgggactttgcccaggggcctctactcgattctctgtattggacaaaatggtataacaatcagtcacttggccacgggtctcacagcttcatatactacgaaaacatgctgcttggtgtccctcgtctgaggcagctgaaagtgcgaaacgactcatgtgtggtgcacgaagatttcagggaagatatcctgagttgctacgacgtgtacagccctgataaagaagaacagttgccgttcgggcctttcaatggcactgcatggacctaccatagccaagacgagctggggggtttctcccactggggccgtttgaccagctatagcgggggtggatattatctggatttgccagggtcacggcagggaagtgccgaggccttaagggctctccaggaaggcctgtggctcgataggggtacaagagtagtgtttatcgatttcagcgtgtataatgccaatattaacctgttctgcgtcctaaggctggtagtggagttccccgctaccgggggagcgatcccctcatggcagatccggactgtcaagttaattagatacgtgagtaactgggattttttcatcgtaggatgtgaagtgatcttttgcgtattcatattttattatgtcgtggaagaaattctggagttgcacattcacaggctgagataccttagctccatatggaatattttggacctagtcgtaatcctcctctccatcgttgcagtgggttttcacatttttcgaacactagaggtgaatagactgatggggaagttactgcagcagcctaatacgtacgccgacttcgagttcctagccttttggcaaacccagtacaacaatatgaatgcagtgaacctgttcttcgcctggatcaaaatattcaagtacatctccttcaacaaaacgatgacccagctgagcagtactcttgctcggtgtgccaaagatattctgggctttgccgtcatgttctttatcgtgttttttgcttacgcacagctgggatatctgctgtttgggacccaggtagaaaacttcagtaccttcattaagtgcatctttacccagttcaggattattcttggggatttcgattacaacgcgatcgacaatgccaaccgtattctgggcccagcgtactttgtgacctacgtcttcttcgtcttctttgtgcttctgaatatgtttttggcgataatcaatgacacttattccgaagtgaaagaagaattggcgggtcagaaggacgagcttcaattgagcgacttactgaaacagggctataacaagaccctcttacgtctgaggcttcggaaagagcgcgtttcagacgtgcagaaagtcctccaaggcggtgaacaggagatacagtttgaagattttactaacacactcagagagctggggcacgccgaacacgagatcaccgagctcacggcaacattcactaaattcgacagagatgggaatagaattctggatgagaaggaacaggaaaagatgagacaagacctggaggaagagcgggttgcactgaacactgagatcgagaaactgggcaggagtatcgtgagttccccacagggaaagagtggacccgaggcagctcgcgctggcggttgggtctcaggagaggaattttacatgctaactaggcgagtcctgcagttagaaacagtcctggagggagtcgtgagccagattgacgctgttggaagtaagttgaagatgctagagagaaagggctggttggcaccatcccctggggtgaaagaacaggccatctggaaacacccacagccagcccctgctgtgaccccggacccctggggagttcagggtgggcaggagtcagaggttccgtataagcgggaggaggaagctctggaagaacggagattgtctcggggagaaattcctactctccagagatcatag

SEQ ID NO: 189448 - DNA, 2418 bp, Artificial Sequence
  derived and/or modified sequence
atgaacgccgtgggcagccccgagggccaggagctgcagaagctgggcagcggcgcctgggacaaccccgcctacagcggcccccccagcccccacggcaccctgagagtgtgcaccatcagcagcaccggccccctgcagccccagcccaagaagcccgaggacgagccccaggagaccgcctacagaacccaggtgagcagctgctgcctgcacatctgccagggcatcagaggcctgtggggcaccaccctgaccgagaacaccgccgagaacagagagctgtacatcaagaccaccctgagagagctgctggtgtacatcgtgttcctggtggacatctgcctgctgacctacggcatgaccagcagcagcgcctactactacaccaaggtgatgagcgagctgttcctgcacacccccagcgacaccggcgtgagcttccaggccatcagcagcatggccgacttctgggacttcgcccagggccccctgctggacagcctgtactggaccaagtggtacaacaaccagagcctgggccacggcagccacagcttcatctactacgagaacatgctgctgggcgtgcccagactgagacagctgaaggtgagaaacgacagctgcgtggtgcacgaggacttcagagaggacatcctgagctgctacgacgtgtacagccccgacaaggaggagcagctgcccttcggccccttcaacggcaccgcctggacctaccacagccaggacgagctgggcggcttcagccactggggcagactgaccagctacagcggcggcggctactacctggacctgcccggcagcagacagggcagcgccgaggccctgagagccctgcaggagggcctgtggctggacagaggcaccagagtggtgttcatcgacttcagcgtgtacaacgccaacatcaacctgttctgcgtgctgagactggtggtggagttccccgccaccggcggcgccatccccagctggcagatcagaaccgtgaagctgatcagatacgtgagcaactgggacttcttcatcgtgggctgcgaggtgatcttctgcgtgttcatcttctactacgtggtggaggagatcctggagctgcacatccacagactgagatacctgagcagcatctggaacatcctggacctggtggtgatcctgctgagcatcgtggccgtgggcttccacatcttcagaaccctggaggtgaacagactgatgggcaagctgctgcagcagcccaacacctacgccgacttcgagttcctggccttctggcagacccagtacaacaacatgaacgccgtgaacctgttcttcgcctggatcaagatcttcaagtacatcagcttcaacaagaccatgacccagctgagcagcaccctggccagatgcgccaaggacatcctgggcttcgccgtgatgttcttcatcgtgttcttcgcctacgcccagctgggctacctgctgttcggcacccaggtggagaacttcagcaccttcatcaagtgcatcttcacccagttcagaatcatcctgggcgacttcgactacaacgccatcgacaacgccaacagaatcctgggccccgcctacttcgtgacctacgtgttcttcgtgttcttcgtgctgctgaacatgttcctggccatcatcaacgacacctacagcgaggtgaaggaggagctggccggccagaaggacgagctgcagctgagcgacctgctgaagcagggctacaacaagaccctgctgagactgagactgagaaaggagagagtgagcgacgtgcagaaggtgctgcagggcggcgagcaggagatccagttcgaggacttcaccaacaccctgagagagctgggccacgccgagcacgagatcaccgagctgaccgccaccttcaccaagttcgacagagacggcaacagaatcctggacgagaaggagcaggagaagatgagacaggacctggaggaggagagagtggccctgaacaccgagatcgagaagctgggcagaagcatcgtgagcagcccccagggcaagagcggccccgaggccgccagagccggcggctgggtgagcggcgaggagttctacatgctgaccagaagagtgctgcagctggagaccgtgctggagggcgtggtgagccagatcgacgccgtgggcagcaagctgaagatgctggagagaaagggctggctggcccccagccccggcgtgaaggagcaggccatctggaagcacccccagcccgcccccgccgtgacccccgacccctggggcgtgcagggcggccaggagagcgaggtgccctacaagagagaggaggaggccctggaggagagaagactgagcagaggcgagatccccaccctgcagagaagctag

SEQ ID NO: 189449 - protein, 764 aa, Artificial Sequence
  derived and/or modified sequence
MTSPSSSPVFRLETLDGGQEDGSEADRGKLDFGSGLPPMESQFQGEDRKFAPQIRVNLNYRKGTGASQPDPNRFDRDRLFNAVSRGVPEDLAGLPEYLSKTSKYLTDSEYTEGSTGKTCLMKAVLNLKDGVNACILPLLQIDRDSGNPQPLVNAQCTDDYYRGHSALHIAIEKRSLQCVKLLVENGANVHARACGRFFQKGQGTCFYFGELPLSLAACTKQWDVVSYLLENPHQPASLQATDSQGNTVLHALVMISDNSAENIALVTSMYDGLLQAGARLCPTVQLEDIRNLQDLTPLKLAAKEGKIEIFRHILQREFSGLSHLSRKFTEWCYGPVRVSLYDLASVDSCEENSVLEIIAFHCKSPHRHRMVVLEPLNKLLQAKWDLLIPKFFLNFLCNLIYMFIFTAVAYHQPTLKKQAAPHLKAEVGNSMLLTGHILILLGGIYLLVGQLWYFWRRHVFIWISFIDSYFEILFLFQALLTVVSQVLCFLAIEWYLPLLVSALVLGWLNLLYYTRGFQHTGIYSVMIQKVILRDLLRFLLIYLVFLFGFAVALVSLSQEAWRPEAPTGPNATESVQPMEGQEDEGNGAQYRGILEASLELFKFTIGMGELAFQEQLHFRGMVLLLLLAYVLLTYILLLNMLIALMSETVNSVATDSWSIWKLQKAISVLEMENGYWWCRKKQRAGVMLTVGTKPDGSPDERWCFRVEEVNWASWEQTLPTLCEDPSGAGVPRTLENPVLASPPKEDEDGASEENYVPVQLLQSN

SEQ ID NO: 189450 - DNA, 2295 bp, Artificial Sequence
  derived and/or modified sequence
atgaccagccccagcagcagccccgtgttcagactggagaccctggacggcggccaggaggacggcagcgaggccgacagaggcaagctggacttcggcagcggcctgccccccatggagagccagttccagggcgaggacagaaagttcgccccccagatcagagtgaacctgaactacagaaagggcaccggcgccagccagcccgaccccaacagattcgacagagacagactgttcaacgccgtgagcagaggcgtgcccgaggacctggccggcctgcccgagtacctgagcaagaccagcaagtacctgaccgacagcgagtacaccgagggcagcaccggcaagacctgcctgatgaaggccgtgctgaacctgaaggacggcgtgaacgcctgcatcctgcccctgctgcagatcgacagagacagcggcaacccccagcccctggtgaacgcccagtgcaccgacgactactacagaggccacagcgccctgcacatcgccatcgagaagagaagcctgcagtgcgtgaagctgctggtggagaacggcgccaacgtgcacgccagagcctgcggcagattcttccagaagggccagggcacctgcttctacttcggcgagctgcccctgagcctggccgcctgcaccaagcagtgggacgtggtgagctacctgctggagaacccccaccagcccgccagcctgcaggccaccgacagccagggcaacaccgtgctgcacgccctggtgatgatcagcgacaacagcgccgagaacatcgccctggtgaccagcatgtacgacggcctgctgcaggccggcgccagactgtgccccaccgtgcagctggaggacatcagaaacctgcaggacctgacccccctgaagctggccgccaaggagggcaagatcgagatcttcagacacatcctgcagagagagttcagcggcctgagccacctgagcagaaagttcaccgagtggtgctacggccccgtgagagtgagcctgtacgacctggccagcgtggacagctgcgaggagaacagcgtgctggagatcatcgccttccactgcaagagcccccacagacacagaatggtggtgctggagcccctgaacaagctgctgcaggccaagtgggacctgctgatccccaagttcttcctgaacttcctgtgcaacctgatctacatgttcatcttcaccgccgtggcctaccaccagcccaccctgaagaagcaggccgccccccacctgaaggccgaggtgggcaacagcatgctgctgaccggccacatcctgatcctgctgggcggcatctacctgctggtgggccagctgtggtacttctggagaagacacgtgttcatctggatcagcttcatcgacagctacttcgagatcctgttcctgttccaggccctgctgaccgtggtgagccaggtgctgtgcttcctggccatcgagtggtacctgcccctgctggtgagcgccctggtgctgggctggctgaacctgctgtactacaccagaggcttccagcacaccggcatctacagcgtgatgatccagaaggtgatcctgagagacctgctgagattcctgctgatctacctggtgttcctgttcggcttcgccgtggccctggtgagcctgagccaggaggcctggagacccgaggcccccaccggccccaacgccaccgagagcgtgcagcccatggagggccaggaggacgagggcaacggcgcccagtacagaggcatcctggaggccagcctggagctgttcaagttcaccatcggcatgggcgagctggccttccaggagcagctgcacttcagaggcatggtgctgctgctgctgctggcctacgtgctgctgacctacatcctgctgctgaacatgctgatcgccctgatgagcgagaccgtgaacagcgtggccaccgacagctggagcatctggaagctgcagaaggccatcagcgtgctggagatggagaacggctactggtggtgcagaaagaagcagagagccggcgtgatgctgaccgtgggcaccaagcccgacggcagccccgacgagagatggtgcttcagagtggaggaggtgaactgggccagctgggagcagaccctgcccaccctgtgcgaggaccccagcggcgccggcgtgcccagaaccctggagaaccccgtgctggccagcccccccaaggaggacgaggacggcgccagcgaggagaactacgtgcccgtgcagctgctgcagagcaactag

SEQ ID NO: 189451 - DNA, 2295 bp, Artificial Sequence
  derived and/or modified sequence
atgacaagtccgagtagctcccccgtgtttcggctcgagacactagatggaggccaggaagacggatctgaagcggaccgcggtaagttggatttcggctctggactgcctcctatggagtctcagttccagggcgaggaccgtaagtttgctccccagatcagggttaacctgaattacagaaagggcactggggcaagccagcctgacccgaacagatttgaccgggataggctctttaatgccgtctcaagaggcgtcccagaagacctggccggcttgcctgaatacttgagtaaaactagcaaatacctgacagattctgaatacaccgaggggagcacaggcaagacctgcctcatgaaagcagtccttaatctgaaggacggggttaatgcttgtatccttcccctcctgcaaatcgatcgtgactcagggaacccgcaacccttagtcaacgctcagtgtacggatgactattatagaggtcactccgccttgcacatagctattgagaaacgttctctacagtgtgtgaagctgctggtcgagaatggtgctaatgtccacgccagagcttgtggtcggttttttcagaaggggcagggcacctgcttctatttcggtgagctccctctgtctctcgcggcctgtacgaagcaatgggacgtcgtctcatacttgctggagaacccccaccaacctgcctcactgcaggctacagatagccaggggaataccgtcctgcatgccctggttatgatcagcgacaactccgccgagaacattgcacttgtgacatccatgtacgatggcctgctccaagcaggcgcccgtctgtgcccaaccgtccagctggaagatatccgcaatttacaggacctgacgccactgaagcttgcggcgaaagaagggaagatagagattttcagacacatccttcagagggagttcagcggtctttcccacctatcgcggaagtttaccgagtggtgctatggaccagtccgtgtttccctttacgatctagccagcgtggatagctgcgaggaaaactctgtgctcgagatcattgcctttcactgcaaatctcctcaccggcatcggatggtagtcctggagcccctgaacaagctgctgcaggcaaaatgggatttgttaataccgaaattctttttgaactttctctgcaatctgatctatatgtttatcttcactgccgtcgcctatcaccaaccaaccctgaagaaacaagcagcaccgcacctgaaggccgaagtggggaattcaatgctgctcacaggtcatattctgatcctactgggcggaatttacctgttggtggggcagctgtggtatttttggcgcagacacgttttcatttggattagctttatagattcttactttgaaatccttttccttttccaagctctgcttacagtggtgtcacaggtgctctgtttcctggcgatcgaatggtacctaccccttctggtgtccgctctggtccttggctggttgaatcttttgtactacaccaggggatttcaacacaccggcatctactcggtcatgatccagaaggttatcctgcgcgacctgctcagattcctgctgatttatctggtgttcctgttcgggtttgccgtggctctcgtcagcttgtcccaggaggcttggcgtcctgaagcccctactggaccaaacgctaccgagtccgtacagcctatggagggacaggaggacgaggggaacggggcgcaataccgcggaattttagaagcgtccttagagctgttcaaattcaccattggtatgggggaattggcattccaagagcagctgcacttccggggcatggtcctcctgctgttgctggcttacgtgctgcttacatacatcctgctgctaaacatgctaatcgctctcatgtcagaaacggtgaacagcgttgcaactgacagttggtccatctggaagcttcagaaagcaatctcggttctggaaatggaaaacgggtactggtggtgtcggaagaaacagcgcgccggcgttatgctcaccgtgggaaccaaaccagacggatcccctgatgagcgctggtgctttcgtgttgaggaagtcaattgggcgtcctgggaacagacactccccaccctgtgtgaggatccaagcggtgccggggtgcctagaacactggaaaatccagtcttagcctcgcccccgaaggaggacgaagacggcgcatcggaggagaactatgttcccgtgcaattgctccagtcaaattag

SEQ ID NO: 189452 - DNA, 2295 bp, Artificial Sequence
  derived and/or modified sequence
atgaccagccccagcagcagccctgtgttccggctggagaccctggatggcggccaggaggatggcagcgaggccgaccggggcaagctggactttggcagcggcctgccccccatggagagccagttccagggcgaggacaggaagtttgccccccagatccgggtgaacctgaactacaggaagggcaccggggccagccagcctgaccccaacagatttgaccgggacaggctcttcaatgctgtgtcccggggcgtgcctgaggacctggccggcctgcctgagtacctgagcaagaccagcaagtacctgacagacagcgagtacacagagggcagcacaggcaagacctgcctgatgaaggctgtgctgaacctgaaggatggagtgaatgcctgcatcctgcccctgctgcagattgaccgggacagcggcaacccccagcccctggtgaatgcccagtgcacagatgactactaccggggccacagcgccctgcacatcgccatcgagaagaggagcctgcagtgtgtgaagctgctggtggagaatggagccaacgtgcacgcccgggcctgtggccgcttcttccagaagggccagggcacctgcttctactttggagagctgcccctgagcctggccgcctgcaccaagcagtgggatgtggtgtcctacctgctggagaacccccaccagcctgccagcctgcaggccacagacagccagggcaacacagtgctgcacgccctggtgatgatcagtgacaacagcgcagaaaatattgccctggtgacctccatgtatgatggcctgctgcaggccggggcccggctgtgccccaccgtgcagctggaggacatccggaacctgcaggacctgacccccctgaagctggccgccaaggagggcaagattgagatcttccgccacatcctgcagcgggagttcagcggcctgagccacctgagcaggaagttcacagagtggtgctacggccctgtgcgggtgtccctgtatgacctggcctctgtggacagctgtgaagaaaattctgtgctggagatcatcgccttccactgcaagagcccccaccgccacaggatggtggtgctggagcccctgaacaagctgctgcaggccaagtgggacctgctgatccccaagttcttcctgaacttcctgtgcaacctgatctacatgttcatcttcaccgctgtggcctaccaccagcccaccctgaagaagcaggccgccccccacctgaaggccgaggtgggcaacagcatgctgctgaccggccacatcctgatcctgctgggcggcatctacctgctggtgggccagctgtggtacttctggaggagacatgtgttcatctggatctccttcatcgacagctactttgagatcctcttcctgttccaggccctgctgactgtggtgtcccaggtgctgtgcttcctggccatcgagtggtacctgcccctgctggtgtctgccctggtgctgggctggctgaacctgctgtactacacccggggcttccagcacacaggcatctacagcgtgatgatccagaaggtgatcctgcgggacctgctgcgcttcctgctgatctacctggtgttcctgtttggatttgctgtggccctggtgtccctgagccaggaggcctggaggcctgaggcccccaccggccccaatgccacagagagcgtgcagcccatggagggccaggaggatgagggcaatggagcccagtaccggggcatcctggaggccagcctggagctgttcaagttcaccatcggcatgggagagctggccttccaggagcagctgcacttccggggcatggtgctgctgctgctgctggcctacgtgctgctgacctacatcctgctgctgaacatgctgattgccctgatgtctgagaccgtgaacagcgtggccacagacagctggagcatctggaagctgcagaaggccatctctgtgctggagatggagaatggctactggtggtgcaggaagaagcagagagctggggtgatgctgactgtgggcaccaagccagatggcagcccagatgagcgctggtgcttccgggtggaggaggtgaactgggcctcctgggagcagaccctgcccaccctgtgtgaggaccccagcggggccggcgtgcccaggaccctggagaaccctgtgctggccagcccccccaaggaggatgaagatggagcctctgaagaaaattatgtgcctgtgcagctgctgcagagcaactag

SEQ ID NO: 189453 - DNA, 2295 bp, Artificial Sequence
  derived and/or modified sequence
atgaccagccccagcagcagccccgtgttccggctggagaccctggacggtgggcaagaagatgggtcagaggcagaccgtgggaaacttgatttcggttccgggctacctcctatggaaagccagttccagggtgaggacagaaagttcgcccctcagatccgcgtcaatttgaattaccgaaaaggcacaggcgctagccaacctgatcccaaccgattcgacagggaccgactgttcaacgctgtgtcacgtggcgtaccagaagacttggccggcctcccagaatacttgtctaagacttccaaatatctaaccgactcggaatataccgagggttctacaggaaaaacctgtcttatgaaagctgttcttaatttgaaggatggcgtaaatgcttgtattctgcctctactgcaaattgaccgcgattcggggaacccgcaaccattagtaaatgcccagtgcacagatgactattatagggggcactcagccctccacattgctatcgagaaaaggtccttacagtgtgtaaaattacttgtggaaaacggtgcgaatgtccacgctagggcatgtggaagattttttcagaaaggccaggggacatgtttctatttcggagaactccccttatccttggccgcatgtactaagcaatgggacgtcgtgtcctacctcctcgaaaaccctcatcagcctgcctcattgcaggcaacagactcacagggaaatacggtgctgcatgccttagtgatgatctcagacaatagtgcggagaatatcgccttggttaccagcatgtacgatggcctgcttcaggccggagcccgactttgtcctacagtgcagctcgaagatatccgaaacttgcaagatttaaccccactaaagctcgctgccaaggaaggcaagatagagattttccggcacatactccagcgggaatttagcgggttgagtcatctctctagaaagttcacggaatggtgctatggccctgtgcgtgtcagtctttatgatctcgcttcagtggacagctgtgaagaaaactctgtgctggagatcatcgcgttccactgcaagtccccgcatcggcaccgcatggtggttctcgagccactcaacaaactgctccaggccaaatgggacctcctgatccctaaattcttccttaactttctgtgcaaccttatttacatgtttatttttacagccgtagcgtatcaccagcccaccttgaagaaacaggccgctcctcatttgaaagccgaggtagggaactcaatgctgttgacgggccatatcctgattctgctgggggggatctatctgctggttggtcaactgtggtacttttggagaaggcacgtcttcatttggatcagtttcatagactcatatttcgagatactcttcttattccaagccctgctcaccgtggtctcccaggtgttgtgtttcttagctatcgaatggtacctccctctgctcgtcagtgcactggttcttgggtggttgaacctcctttactacacgaggggatttcagcacaccggaatttattccgtaatgatacagaaggtaattctaagagatctgttacgcttcttactgatttatctagtattcttgtttggcttcgctgtcgctttggtcagtttgtcacaggaggcatggcggcctgaagcccccaccggccccaatgcaacggaatcggttcaacctatggaaggccaggaggacgaagggaatggggcccagtaccggggtattctggaggcctccctcgaactcttcaagtttaccattggtatgggcgagttggccttccaggagcagcttcatttccggggcatggttctcttgctgcttctggcctatgttttgttgacatacatcctcctactaaacatgctgatcgcccttatgagcgaaacagtaaacagtgtggcaactgactcttggtccatatggaagctgcaaaaagccatcagcgttctcgaaatggagaacgggtactggtggtgtcgcaaaaagcagcgcgcgggagtcatgctgactgtggggaccaagccagatggcagtccagacgaacggtggtgcttccgagttgaggaggtcaactgggctagctgggaacagacgttacctacactatgcgaagatccaagtggagccggtgtgcccagaacactggaaaatcctgtacttgccagcccccccaaagaggacgaagacggcgcctccgaagaaaactacgtccccgtgcagctcctccagtcgaactag

SEQ ID NO: 189454 - DNA, 2295 bp, Artificial Sequence
  derived and/or modified sequence
atgacatctcccagctcctccccagtgttcaggctggagactctggatgggggacaggaggatgggagcgaggccgaccgcggtaagctcgatttcggcagtggcctgcctccaatggagagtcagtttcagggagaagatcgcaagtttgctccgcagataagagttaatctcaattaccgcaaaggtaccggggcttcacagccagacccaaatcggttcgatagggatcggttgtttaacgcggtgtccagaggggttccagaggacttggctggtttacctgaatacctgagtaaaacaagcaagtaccttactgattcagaatatacggaggggtctacaggtaagacctgtctgatgaaagcagtgcttaatctgaaagacggagtgaacgcctgcattttacccctgcttcagattgatagagacagtggaaacccacagcccttggtcaatgcccaatgtaccgatgattactacagaggtcactccgccctccacatcgccatcgaaaaaaggagcttgcaatgcgttaaacttctcgtggagaatggcgcaaatgttcacgcaagggcatgtggcaggtttttccagaaaggtcaaggcacctgtttctacttcggagaattgccactcagcctggctgcctgcacgaaacaatgggacgtagtgagttacctcctggagaatccacatcagcccgcaagcttacaggccacggacagtcaggggaataccgtccttcatgcgctcgtgatgatatcggataattccgcagagaacatcgccctggtcacaagcatgtacgatgggctcctgcaggccggagctaggctgtgccccaccgtccagctggaagacatacgcaacctgcaggatttaacaccactgaagctagcagctaaagaaggaaagatcgagatattccgccacattcttcagcgggagttttctggcctgtcacacctgtcaaggaaattcactgagtggtgttacggacctgtccgcgtctcactctacgacctggcctctgtggattcctgcgaagaaaattcagtgctcgagatcatcgcctttcattgcaaatctccccatcgccatcgtatggtcgtcctagaacctctgaataagctacttcaagcaaagtgggatctgctgattcccaaattctttttaaatttcttatgcaaccttatctatatgttcatattcactgctgtcgcctatcatcagccaactctaaaaaagcaagctgcaccccaccttaaagccgaggtgggcaacagcatgctgctcacggggcatatcctgatcctgctgggtgggatttacttgctggtgggtcagctgtggtacttctggcgacgccacgtgttcatttggatctcattcatagactcctactttgaaatattatttctgttccaggcactcttgacagtagtttcccaggtgctctgcttcctggccattgagtggtacctgcctctgctggtaagtgcccttgtattaggctggttgaacctcttgtactacaccagaggattccaacatacagggatatatagtgtgatgatccaaaaagtcatcctgcgagacctcctgagatttttgcttatctatcttgtattcttgttcggcttcgctgtggctctggtcagtctgagccaagaggcgtggaggccagaggctcctacaggtcctaacgccactgagtctgtacagccgatggagggacaagaagatgaaggcaatggcgctcagtatcgcggaatattggaggcatctctggaactgttcaagttcactataggaatgggtgagcttgccttccaggagcagctgcacttccgaggaatggttctcttactccttctcgcttatgtgctgctcacgtatatactgctgctcaatatgctcatcgccctcatgagcgagacagttaacagcgtcgctactgacagctggtctatatggaagctccaaaaggctatcagcgtcctcgaaatggaaaacgggtattggtggtgccggaaaaagcaaagggccggtgtgatgttgactgtgggtacaaagcccgatggaagtccagatgagcggtggtgcttcagggtagaagaagtgaactgggcgagctgggaacagactctgccaactctgtgcgaggatcccagtggtgccggagtccctagaactcttgaaaatcccgtcctcgccagtcctccgaaagaggatgaagatggcgcttcagaagagaactacgtgccagtgcagctgcttcagtccaattag

SEQ ID NO: 189455 - DNA, 2776 bp, Artificial Sequence
  derived and/or modified sequence
ctctggtggctagcctgtcctgacaggggagagttaagctcccgttctccaccgtgccggctggccaggtgggctgagggtgaccgagagaccagaacctgcttgctggagcttagtgctcagagctggggagggaggttccgccgctcctctgctgtcagcgccggcagcccctcccggcttcacttcctcccgcagcccctgctactgagaagctccgggatcccagcagccgccacgccctggcctcagcctgcggggctccagtcaggccaacaccgacgcgcagctgggaggaagacaggacccttgacatctccatctgcacagaggtcctggctggaccgagcagcctcctcctcctaggatgacctcaccctccagctctccagttttcaggttggagacattagatggaggccaagaagatggctctgaggcggacagaggaaagctggattttgggagcgggctgcctcccatggagtcacagttccagggcgaggaccggaaattcgcccctcagataagagtcaacctcaactaccgaaagggaacaggtgccagtcagccggatccaaaccgatttgaccgagatcggctcttcaatgcggtctcccggggtgtccccgaggatctggctggacttccagagtacctgagcaagaccagcaagtacctcaccgactcggaatacacagagggctccacaggtaagacgtgcctgatgaaggctgtgctgaaccttaaggacggagtcaatgcctgcattctgccactgctgcagatcgacagggactctggcaatcctcagcccctggtaaatgcccagtgcacagatgactattaccgaggccacagcgctctgcacatcgccattgagaagaggagtctgcagtgtgtgaagctcctggtggagaatggggccaatgtgcatgcccgggcctgcggccgcttcttccagaagggccaagggacttgcttttatttcggtgagctacccctctctttggccgcttgcaccaagcagtgggatgtggtaagctacctcctggagaacccacaccagcccgccagcctgcaggccactgactcccagggcaacacagtcctgcatgccctagtgatgatctcggacaactcagctgagaacattgcactggtgaccagcatgtatgatgggctcctccaagctggggcccgcctctgccctaccgtgcagcttgaggacatccgcaacctgcaggatctcacgcctctgaagctggccgccaaggagggcaagatcgagattttcaggcacatcctgcagcgggagttttcaggactgagccacctttcccgaaagttcaccgagtggtgctatgggcctgtccgggtgtcgctgtatgacctggcttctgtggacagctgtgaggagaactcagtgctggagatcattgcctttcattgcaagagcccgcaccgacaccgaatggtcgttttggagcccctgaacaaactgctgcaggcgaaatgggatctgctcatccccaagttcttcttaaacttcctgtgtaatctgatctacatgttcatcttcaccgctgttgcctaccatcagcctaccctgaagaagcaggccgcccctcacctgaaagcggaggttggaaactccatgctgctgacgggccacatccttatcctgctaggggggatctacctcctcgtgggccagctgtggtacttctggcggcgccacgtgttcatctggatctcgttcatagacagctactttgaaatcctcttcctgttccaggccctgctcacagtggtgtcccaggtgctgtgtttcctggccatcgagtggtacctgcccctgcttgtgtctgcgctggtgctgggctggctgaacctgctttactatacacgtggcttccagcacacaggcatctacagtgtcatgatccagaaggtcatcctgcgggacctgctgcgcttccttctgatctacttagtcttccttttcggcttcgctgtagccctggtgagcctgagccaggaggcttggcgccccgaagctcctacaggccccaatgccacagagtcagtgcagcccatggagggacaggaggacgagggcaacggggcccagtacaggggtatcctggaagcctccttggagctcttcaaattcaccatcggcatgggcgagctggccttccaggagcagctgcacttccgcggcatggtgctgctgctgctgctggcctacgtgctgctcacctacatcctgctgctcaacatgctcatcgccctcatgagcgagaccgtcaacagtgtcgccactgacagctggagcatctggaagctgcagaaagccatctctgtcctggagatggagaatggctattggtggtgcaggaagaagcagcgggcaggtgtgatgctgaccgttggcactaagccagatggcagccccgatgagcgctggtgcttcagggtggaggaggtgaactgggcttcatgggagcagacgctgcctacgctgtgtgaggacccgtcaggggcaggtgtccctcgaactctcgagaaccctgtcctggcttcccctcccaaggaggatgaggatggtgcctctgaggaaaactatgtgcccgtccagctcctccagtccaactgatggcccagatgcagcaggaggccagaggacagagcagaggatctttccaaccacatctgctggctctggggtcccagtgaattctggtggcaaatatatattttcactaactaa

SEQ ID NO: 189456 - protein, 601 aa, Artificial Sequence
  derived and/or modified sequence
MAQKKYLQAKLTQFLREDRIQLWKPPYTDENKKVGLALKDLAKQYSDRLECCENEVEKVIEEIRCKAIERGTGNDNYRTTGIATIEVFLPPRLKKDRKNLLETRLHITGRELRSKIAETFGLQENYIKIVINKKQLQLGKTLEEQGVAHNVKAMVLELKQSEEDARKNFQLEEEEQNEAKLKEKQIQRTKRGLEILAKRAAETVVDPEMTPYLDIANQTGRSIRIPPSERKALMLAMGYHEKGRAFLKRKEYGIALPCLLDADKYFCECCRELLDTVDNYAVLQLDIVWCYFRLEQLECLDDAEKKLNLAQKCFKNCYGENHQRLVHIKGNCGKEKVLFLRLYLLQGIRNYHSGNDVEAYEYLNKARQLFKELYIDPSKVDNLLQLGFTAQEARLGLRACDGNVDHAATHITNRREELAQIRKEEKEKKRRRLENIRFLKGMGYSTHAAQQILLSNPQMWWLNDSNPETDNRQESPSQENIDRLVYMGFDALVAEAALRVFRGNVQLAAQTLAHNGGSLPPELPLSPEDSLSPPATSPSDSAGTSSASTDEDMETEAVNEILEDIPEHEEDYLDSTLEDEEIIIAEYLSYVENRKSATKKN

SEQ ID NO: 189457 - DNA, 1806 bp, Artificial Sequence
  derived and/or modified sequence
atggcccagaagaagtacctgcaggcaaagctgactcaattcctgcgagaggaccgaatccagctctggaagcccccttacacagatgaaaacaagaaggtggggcttgccttgaaggatcttgcaaaacaatactcagataggttggaatgttgtgaaaatgaagtggaaaaggttatcgaggagataaggtgtaaggccattgagagaggcactggcaacgacaattacagaaccactgggattgccactatcgaagtgtttctccccccgcggcttaagaaggataggaagaatctgctcgaaacacgcctgcacattacaggtagggagctgcgctccaagatagccgagactttcggtctgcaggaaaattacataaagattgtgattaacaaaaaacagctgcagctcggaaagactcttgaagagcagggtgtcgcgcataacgttaaggctatggtgctggaactgaagcaaagcgaggaggatgctcgcaaaaactttcagctcgaggaggaggaacagaacgaagccaaactgaaagagaagcagatccagaggacaaaacgaggtctcgaaatcttggccaagcgcgctgcagaaacagtagtggaccccgaaatgaccccatacttggatattgcgaatcagaccggacgaagcatccgcattcctccctccgaacggaaagccctgatgctggcgatggggtatcacgagaagggtcgtgcattcctgaagagaaaagaatacggaattgcacttccatgtctcctagatgcagataaatacttttgtgagtgttgtcgggaactactggatacagtggacaactacgctgtcttgcaactcgatatagtttggtgttattttaggctggaacagcttgagtgcttggacgatgccgaaaagaagctgaacctggctcagaagtgcttcaagaactgctacggggagaatcaccagagacttgttcacattaaaggaaactgtggtaaagagaaggtgctgtttttgaggttgtatctcttgcagggaattcgaaattaccactctggaaatgatgtggaagcctatgaatacctgaataaagctcgccagttgtttaaggagctgtacattgacccatccaaggtggataatctcctccagttggggttcactgcgcaggaggccaggctgggccttcgcgcttgcgatgggaacgtagatcacgcagcgacccatatcaccaataggagggaggaactcgcccagatacggaaggaagaaaaggagaagaagagacggagactcgaaaacattaggtttctcaagggcatgggatactctacccatgcggcacagcaaatcttactatcaaacccccagatgtggtggctgaacgactctaaccctgaaacggataaccggcaggaatccccttcccaagagaacatagatcggcttgtgtatatgggattcgatgccttggtggcagaggccgctctgcgggtttttagaggtaatgttcaacttgctgcccagacgctggcccataacgggggtagtctgcctcctgagctcccactctctccggaggactctctcagccctcccgctacgtcgccgtcagattccgcgggcacctctagcgcaagcactgatgaagacatggaaacggaagccgttaacgaaattcttgaagatatccctgagcacgaggaagactacctggatagcaccctcgaggacgaagagatcataatcgctgagtacctaagctacgtggagaacaggaagtcagcgacaaaaaagaattag

SEQ ID NO: 189458 - DNA, 1806 bp, Artificial Sequence
  derived and/or modified sequence
atggctcaaaagaagtatctacaagcaaagctcacgcagttccttagagaggatagaattcagttgtggaaaccaccctacacagacgaaaacaagaaggttggcctggccctgaaagacttggcaaagcagtatagtgaccgtctggagtgctgcgaaaatgaggtggaaaaagtgatcgaggagattaggtgtaaagctatcgagcgcggaacagggaacgataactaccggaccactgggattgctactatcgaggtttttctcccccccaggcttaagaaggatagaaaaaacctcctggagacacgacttcacatcaccggacgagagctgcgttcgaagatcgccgagacttttggactgcaagaaaactacataaaaatcgttataaacaaaaaacaactgcagctcgggaagacactggaagaacagggagtcgcacataatgtcaaggctatggtactggagctcaaacagagtgaagaggatgcaagaaagaactttcagctggaagaggaggaacagaatgaggcaaagctcaaagagaagcagatacagaggaccaagagggggttagagattctggcaaaacgcgctgccgagactgtggtcgatccagaaatgaccccctacctcgacattgccaaccagaccgggaggtcaatccgaattccccctagtgaacggaaagccctgatgttagctatgggctaccatgagaaggggcgggccttcctcaagaggaaggaatacggaattgccctaccctgcctgctcgacgcggataaatacttttgcgaatgctgccgcgaactcctcgacacagtagataactatgccgttctgcagctggatatcgtatggtgctacttccggctggaacagttggagtgcctcgatgatgcagagaagaaacttaatctggctcaaaagtgcttcaagaattgttacggagaaaatcaccagcggctggtgcacataaaaggaaattgcggcaaggaaaaggtgctgtttttacggctctatttgcttcagggtatacgaaactaccattctggcaatgatgtggaagcttacgagtatctcaacaaagcaaggcagcttttcaaggaactgtatatcgacccctccaaagtcgataacctgctgcaactcggatttaccgcccaggaggctagattgggtcttcgcgcttgcgacggcaacgttgatcacgcagccactcacatcactaatcggcgagaagaactagcacagatcagaaaagaggagaaggagaaaaaaaggaggcgactggaaaacatccggtttctcaaagggatggggtacagcacacacgccgcgcagcaaatcttgttaagtaaccctcagatgtggtggctgaacgacagcaacccagaaactgataatcgccaggaatctccatcacaggaaaacatcgaccggctggtgtatatgggcttcgacgccttggtcgctgaggccgctctcagggtctttcgagggaatgtccagttagcggcccagacacttgctcataatggcggttccctgccaccggaactgccattaagtcctgaggacagtctctctccgcccgccacatcgcccagtgacagtgctggaacttcgtcagcttcaactgatgaagacatggagactgaggccgttaacgaaatccttgaggatattcccgaacacgaggaggactatctggattctaccctggaagacgaggagatcattatagctgagtacctgagctatgtggagaacaggaagtctgccactaaaaaaaattag

SEQ ID NO: 189459 - DNA, 3180 bp, Artificial Sequence
  derived and/or modified sequence
accctctttccaagcggcggcggcggcggcggcgcgaaggcgacagcggcggcgggggcggggctggcctcacccggaatgaaaacaaacggcggccgctgccgcatccgggcactctgctggtcgcggcgggagtggcgtggcgcagggatggcacaaaagaaatatcttcaagcaaaattgacccagtttttaagggaagacaggattcaactttggaaacctccatatacagatgaaaataaaaaagttggtttggcattaaaggaccttgctaagcagtactctgacagactagaatgctgtgaaaatgaagtagaaaaggtaatagaagaaatacgttgcaaggcaattgagcgtggaacaggaaatgacaattatagaacaacgggaattgctacaatcgaggtgtttttaccaccaagactaaaaaaagataggaaaaacttgttggagacccgattgcacatcactggcagagaactgaggtccaaaatagctgaaacctttggacttcaagaaaattatatcaaaattgtcataaataagaagcaactacaactagggaaaacccttgaagaacaaggcgtggctcacaatgtgaaagcgatggtgcttgaactaaaacaatctgaagaggacgcgaggaaaaacttccagttagaggaagaggagcaaaatgaggccaaactcaaagaaaaacaaattcagaggaccaagagaggactagaaatactggcaaagagagcagcagagacagtggtggatccagaaatgacaccgtacttagacatagctaaccagacaggcagatcaatcagaattcccccatcagaaagaaaagcccttatgttagctatgggatatcatgagaagggcagagctttcctgaaaagaaaagaatatggaatagccttgccatgtctgttggacgctgacaaatatttctgtgagtgttgcagagagctgctggacacagtggataactacgccgtcctccagctggatatagtgtggtgttacttccgcctggaacagctggaatgccttgatgatgcagaaaaaaaattaaacttggcccagaaatgctttaaaaattgttacggagaaaatcatcagagactggtccacataaaaggaaattgtgggaaagagaaggtactgtttctaagactctacttacttcaagggatccgaaactatcacagtggaaatgatgtagaggcttatgagtatcttaacaaggcacgtcagctctttaaagagctatatattgatccatcaaaagtggacaatttgttgcagttggggtttactgcccaggaagcccggcttggcctgagggcgtgtgatgggaacgtggatcatgcggccactcatattaccaaccgcagagaggaactggcccaaataaggaaggaggaaaaagagaagaaaagacgccgcctcgagaacatcaggtttctgaaagggatgggctactccacgcacgcggcccagcagattctgctcagcaatcctcagatgtggtggttaaatgattccaatcctgaaaccgacaaccgtcaagaaagtccttcccaggaaaacattgaccgattggtgtacatgggttttgatgcactcgtggccgaagctgcgctgagagtgttcagaggcaacgtccagctggccgcccagacccttgctcacaacggaggaagcctgcctcccgagctgccgctgtcgccagaagactctttgtccccgccagccacgtccccttctgactccgcaggaacctctagtgcctcaacagacgaagacatggagacagaggccgtcaatgagatactggaagacattccagagcatgaggaagactatcttgactcaactctggaagatgaagaaattattattgcagagtacctatcctatgtagaaaataggaagtcagcaacaaagaaaaactaaataatgaacagaaatagcgctaattttctgcttataaatgctatcattatgaaaaggctaatgcagctctttctgttcttactttttatctgaattacaagtcctctttgggtgtaggagggggtgggcaggggacaagtccaggaggggtcccagggccttcatgcgtggtctcggggaagaagcttcctctggcctggcgcaggccgttccatctgcctcccaggtctgcgtccctaaccccttccccagcttggtgttttaccccgaaacaggaaggaacaggggtcctgtagaacaggggtcctggggaaggtgtccagggcagggtcctgggaagggtgtcccgaccgcttcctctccagctgtggctccatctgcccagcttgcctgcctcctgcacccactgccctgaccttcctgcttcccacgctgccatctctgccagggtgccacatgggttcctgtgccaccctttccccgcccctcaaatcgtcctttaagtcttccttccaagtgctgtggggcataacgatgaggcgctggccttgggggccacaccaggtcgcagcaaatggcttcagcctgggacgccagtgttttatgctcttagttcagtaaaatacgcccccgaaattcaagattgagtgtcaggctttatatatattcagcattcctcattacagaaatcttctattgaatgggaaaggtttaaatgctaaccaaagcaatttatttttaattaatatttttagactctgtgctgtcatactgaactcactgctagctaagagacctatcagagatttagatatattttctccaggttttttgtgggttttctttgttgttgttgttgttctagccatgtgacagaggctctttctaaaagtatgtagttcgctgtgtgtcggctccagcagtaaccgtcctcactgcgccacgcactcctctgtagatgtgtgcccagtgggagttccttccagccccaggaccacagcagcagccaggtgccgagtggattgagtgccaggtgcatccaagactttccctcccttccagaaggcactgactgaagacaggatggatcatgcggagccggctgaaatgctccaactttttcaaagtgtgggtggtccagtttggactgatgggaatcttcttgtcattctttttaaacggatgataccgatggaaataaaaggtgggaaatatattcaaaaa

SEQ ID NO: 189460 - DNA, 619 bp, Artificial Sequence
  derived and/or modified sequence
actctgctggtcgcggcgggagtggcgtggcgcaggtgaggacacggcggccgagtgtcctcgaccccagcctcagcagcactgcttggcgccccggttcccggtccgactgggcacctctcctggccaggggtggagcggccgcggggcggggggatggcacaaaagaaatatcttcaagcaaaattgacccagtttttaagggaagacaggattcaactttggaaacctccatatacagatgaaaataaaaaagttggtttggcattaaaggaccttgctaagcagtactctgacagactagaatgctgtgaaaatgaagtagaaaaggtaatagaagaaatacgttgcaaggcaattgagcgtggaacaggaaatgacaattatagaacaacgggaattgctacaatcgaggtgtttttaccaccaagactaaaaaaagataggaaaaacttgttggagacccgattgcacatcactggcagagaactgaggtccaaaatagctgaaacctttggacttcaagaaaattatatcaaaattgtcataaataagaagcaactacaactagggaaaacccttgaagaacaaggcgtggctcacaatgtgaaagcgatgg

SEQ ID NO: 189461 - DNA, 767 bp, Artificial Sequence
  derived and/or modified sequence
cagggatggcacaaaagaaatatcttcaagcaaaattgacccagtttttaagggaagacaggattcaactttggaaacctccatatacagatgaaaataaaaaagttggtttggcattaaaggaccttgctaagcagtactctgacagactagaatgctgtgaaaatgaagtagaaaaggtaatagaagaaatacgttgcaaggcaattgagcgtggaacaggaaatgacaattatagaacaacgggaattgctacaatcgaggtgtttttaccaccaagactaaaaaaagataggaaaaacttgttggagacccgattgcacatcactggcagagaactgaggtccaaaatagctgaaacctttggacttcaagaaaattatatcaaaattgtcataaataagaagcaactacaactagggaaaacccttgaagaacaaggcgtggctcacaatgtgaaagcgatggtgcttgaactaaaacaatctgaagaggacgcgaggaaaaacttccagttagaggaagaggagcaaaatgaggccaaactcaaagaaaaacaaattcagaggaccaagagaggactagaaatactggcaaagagagcagcagagacagtggtggatccagaaatgacaccgtacttagacatagctaaccagacaggcagatcaatcagaattcccccatcagaaagaaaagcccttatgttagctatgggatatcatgagaagggcagagctttcctgaaaagaaaagaatatggaata

SEQ ID NO: 189462 - DNA, 1013 bp, Artificial Sequence
  derived and/or modified sequence
gcggcgggagtggcgtggcgcagggatggcacaaaagaaatatcttcaagcaaaattgacccagtttttaagggaagacaggattcaactttggaaacctccatatacagatgaaaataaaaaagttggtttggcattaaaggaccttgctaagcagtactctgacagactagaatgctgtgaaaatgaagtagaaaaggtaatagaagaaatacgttgcaaggcaattgagcgtggaacaggaaatgacaattatagaacaacgggaattgctacaatcgaggtgtttttaccaccaagactaaaaaaagataggaaaaacttgttggagacccgattgcacatcactggcagagaactgaggtccaaggctgtcaggggtggattcaggaagtggcatgcaacacacatgcgtagaagaatagctgaaacctttggacttcaagaaaattatatcaaaattgtcataaataagaagcaactacaactaggcccttatgttagctatgggatatcatgagaagggcagagctttcctgaaaagaaaagaatatggaatagccttgccatgtctgttggacgctgacaaatatttctggtaggcgcttttgtacttggtgaacaccagctttaaggaagatggcccagactatacagaacaccctgccatgcccttgagactgcagactttcatctacaacagtggttaatgtaaaagagtagttatggtgtaaactggtgaatttcttcttccctttgtatttctaattgacctttcctccctgtaaagaaaagaattttcaagcaggtaggatatcctctcttcttctgtacatgtgctatgttgctagtcggaactttccattataaagtttcctgtcagcttttcacctaatggttttggggtagtattgatgattattcctcaaatccgttgtttaagagctgtataatggtgatattattccttctgtacttattttttttgagacagagtctcactctgtcaccca

SEQ ID NO: 189463 - DNA, 3102 bp, Artificial Sequence
  derived and/or modified sequence
ccggaatgaaaacaaacggcggccgctgccgcatccgggcactctgctggtcgcggcgggagtggcgtggcgcagggatggcacaaaagaaatatcttcaagcaaaattgacccagtttttaagggaagacaggattcaactttggaaacctccatatacagatgaaaataaaaaagttggtttggcattaaaggaccttgctaagcagtactctgacagactagaatgctgtgaaaatgaagtagaaaaggtaatagaagaaatacgttgcaaggcaattgagcgtggaacaggaaatgacaattatagaacaacgggaattgctacaatcgaggtgtttttaccaccaagactaaaaaaagataggaaaaacttgttggagacccgattgcacatcactggcagagaactgaggtccaaaatagctgaaacctttggacttcaagaaaattatatcaaaattgtcataaataagaagcaactacaactagggaaaacccttgaagaacaaggcgtggctcacaatgtgaaagcgatggtgcttgaactaaaacaatctgaagaggacgcgaggaaaaacttccagttagaggaagaggagcaaaatgaggccaaactcaaagaaaaacaaattcagaggaccaagagaggactagaaatactggcaaagagagcagcagagacagtggtggatccagaaatgacaccgtacttagacatagctaaccagacaggcagatcaatcagaattcccccatcagaaagaaaagcccttatgttagctatgggatatcatgagaagggcagagctttcctgaaaagaaaagaatatggaatagccttgccatgtctgttggacgctgacaaatatttctgtgagtgttgcagagagctgctggacacagtggataactacgccgtcctccagctggatatagtgtggtgttacttccgcctggaacagctggaatgccttgatgatgcagaaaaaaaattaaacttggcccagaaatgctttaaaaattgttacggagaaaatcatcagagactggtccacataaaaggaaattgtgggaaagagaaggtactgtttctaagactctacttacttcaagggatccgaaactatcacagtggaaatgatgtagaggcttatgagtatcttaacaaggcacgtcagctctttaaagagctatatattgatccatcaaaagtggacaatttgttgcagttggggtttactgcccaggaagcccggcttggcctgagggcgtgtgatgggaacgtggatcatgcggccactcatattaccaaccgcagagaggaactggcccaaataaggaaggaggaaaaagagaagaaaagacgccgcctcgagaacatcaggtttctgaaagggatgggctactccacgcacgcggcccagcagattctgctcagcaatcctcagatgtggtggttaaatgattccaatcctgaaaccgacaaccgtcaagaaagtccttcccaggaaaacattgaccgattggtgtacatgggttttgatgcactcgtggccgaagctgcgctgagagtgttcagaggcaacgtccagctggccgcccagacccttgctcacaacggaggaagcctgcctcccgagctgccgctgtcgccagaagactctttgtccccgccagccacgtccccttctgactccgcaggaacctctagtgcctcaacagacgaagacatggagacagaggccgtcaatgagatactggaagacattccagagcatgaggaagactatcttgactcaactctggaagatgaagaaattattattgcagagtacctatcctatgtagaaaataggaagtcagcaacaaagaaaaactaaataatgaacagaaatagcgctaattttctgcttataaatgctatcattatgaaaaggctaatgcagctctttctgttcttactttttatctgaattacaagtcctctttgggtgtaggagggggtgggcaggggacaagtccaggaggggtcccagggccttcatgcgtggtctcggggaagaagcttcctctggcctggcgcaggccgttccatctgcctcccaggtctgcgtccctaaccccttccccagcttggtgttttaccccgaaacaggaaggaacaggggtcctgtagaacaggggtcctggggaaggtgtccagggcagggtcctgggaagggtgtcccgaccgcttcctctccagctgtggctccatctgcccagcttgcctgcctcctgcacccactgccctgaccttcctgcttcccacgctgccatctctgccagggtgccacatgggttcctgtgccaccctttccccgcccctcaaatcgtcctttaagtcttccttccaagtgctgtggggcataacgatgaggcgctggccttgggggccacaccaggtcgcagcaaatggcttcagcctgggacgccagtgttttatgctcttagttcagtaaaatacgcccccgaaattcaagattgagtgtcaggctttatatatattcagcattcctcattacagaaatcttctattgaatgggaaaggtttaaatgctaaccaaagcaatttatttttaattaatatttttagactctgtgctgtcatactgaactcactgctagctaagagacctatcagagatttagatatattttctccaggttttttgtgggttttctttgttgttgttgttgttctagccatgtgacagaggctctttctaaaagtatgtagttcgctgtgtgtcggctccagcagtaaccgtcctcactgcgccacgcactcctctgtagatgtgtgcccagtgggagttccttccagccccaggaccacagcagcagccaggtgccgagtggattgagtgccaggtgcatccaagactttccctcccttccagaaggcactgactgaagacaggatggatcatgcggagccggctgaaatgctccaactttttcaaagtgtgggtggtccagtttggactgatgggaatcttcttgtcattctttttaaacggatgataccgatggaaataaaaggtgggaaatatattc

SEQ ID NO: 189464 - DNA, 1806 bp, Artificial Sequence
  derived and/or modified sequence
atggcccagaagaagtacctgcaggccaagctgacccagttcctgagagaagatcgcatccagctgtggaagccaccctacacagatgagaacaagaaggtgggcctggccctgaaggacctggccaagcagtacagcgaccggctggagtgctgtgaaaatgaggtggagaaggtgattgaggagatccgctgcaaggccatcgagcggggcactggaaatgacaactaccgcaccaccggcatcgccaccatcgaggtgttcctgcccccccggctgaagaaggacaggaagaacctgctggagacccggctgcacatcaccggccgggagctgcggagcaagattgctgagaccttcggcctgcaggagaactacatcaagatcgtcatcaacaagaagcagctgcagctgggcaagaccctggaggagcagggcgtggcccacaacgtgaaggccatggtgctggagctgaagcagagtgaagaagatgccaggaagaacttccagctggaggaggaggagcagaatgaggccaagctgaaggagaagcagatccagaggaccaagaggggcctggagatcctggccaagagagctgctgagaccgtggtggaccctgagatgaccccctacctggacatcgccaaccagacaggccgcagcatccgcatcccccccagcgagaggaaggccctgatgctggccatgggctaccacgagaagggccgggccttcctgaagaggaaggagtatggcatcgccctgccctgcctgctggatgctgacaagtacttctgtgagtgctgccgggagctgctggacacagtggacaactatgctgtgctgcagctggacatcgtgtggtgctacttccggctggagcagctggagtgcctggatgatgctgagaagaagctgaacctggcccagaagtgcttcaagaactgctacggggagaaccaccagaggctggtgcacatcaagggcaactgtgggaaggagaaggtgctcttcctgcggctgtacctgctgcagggcatccggaactaccacagcggaaatgatgtggaggcctatgagtacctgaacaaggcccggcagctgttcaaggagctgtacatcgaccccagcaaggtggacaacctgctgcagctgggcttcaccgcccaggaggcccggctgggcctgcgggcctgtgatggaaatgtggaccatgctgccacccacatcaccaacagaagagaggagctggcccagatcaggaaggaggagaaggagaagaagagaagaaggctggagaacatccgcttcctgaagggcatgggctacagcacccacgccgcccagcagatcctgctgagcaacccccagatgtggtggctgaatgacagcaaccctgagacagacaaccggcaggagagccccagccaggagaacatcgaccggctggtgtacatgggctttgatgccctggtggccgaggccgccctgcgggtcttcagaggaaatgtgcagctggccgcccagaccctggcccacaatggaggcagcctgcccccagagctgcccctgagccctgaggacagcctgagccccccagccaccagccccagcgacagcgctggcaccagcagcgccagcacagatgaggacatggagacagaagctgtgaatgagatcctggaggacatccctgagcacgaggaggactacctggacagcaccctggaggatgaggagatcatcatcgccgagtacctgtcctatgtggagaacaggaagagcgccaccaagaagaactag

SEQ ID NO: 189465 - DNA, 1806 bp, Artificial Sequence
  derived and/or modified sequence
atggcccagaagaagtacctgcaggccaagctgacccagttcctgcgcgaggacaggatacagctatggaagccaccttacactgatgaaaacaagaaagtggggcttgctttaaaggatctggcgaaacaatactcagaccggctagagtgctgtgaaaatgaagttgagaaagttattgaagaaattaggtgcaaggcaatcgagagaggaaccggcaacgacaattatcggactacggggatcgctacaattgaggtgttccttcccccaagactgaaaaaggatcggaaaaacctgttggagacgagactccatatcactggtcgcgagctgcgatccaagatcgccgagaccttcggtttgcaagagaactacatcaaaattgtcatcaataaaaaacagctccagctgggtaaaacgttagaggagcaaggggtcgcccataacgtgaaagcaatggtcttggagctgaaacagtccgaggaagatgctcggaagaactttcagttggaagaagaggagcaaaacgaagcaaagctaaaggagaagcaaatacagcgcacaaagagagggcttgagatcctagccaaacgggccgcggaaacagtcgtagaccccgagatgactccctatctcgatattgcaaatcagacgggcagaagtatccggatcccaccttcagaacgcaaggccctgatgctggcaatggggtaccacgaaaaagggagagcctttctgaaaaggaaggaatacgggattgctctgccctgtctcctggacgccgacaaatatttctgtgagtgctgtcgtgaactgctagataccgtcgacaactacgcagtactgcaactagacattgtgtggtgctattttcgtctcgagcagctggagtgcctagatgacgcagagaaaaaactaaacctcgcgcaaaagtgtttcaagaactgctacggcgagaatcatcagaggctagtacacattaagggaaattgtggaaaggagaaggtgctgttcttaagactataccttttgcaaggcattcggaattaccactctggtaacgacgtggaagcttacgagtatctcaacaaagcacgacaactctttaaggagttgtatatcgacccctctaaggtcgacaatctgctccaacttgggtttacggcacaggaagctagactcggactccgcgcatgcgacggcaacgtggaccacgccgctactcacattacaaacaggagagaggagctggctcagatacggaaagaggaaaaggaaaaaaaacgtcggcggctcgagaacattagatttctgaagggcatgggctacagcacacacgcagcacagcagattctgttgtctaatccacagatgtggtggctgaatgattcaaatcccgagactgacaacaggcaggagagcccttcccaagagaatatcgacaggctggtttatatgggatttgatgccctcgtggctgaggccgcgctgcgagtgtttcgcggtaacgtgcagttggccgcccaaacactagctcacaacggaggatcgctgccaccggagctccccttatcgccagaagattccctgagcccgccggccacctccccatctgatagtgctggaaccagttcagctagcaccgacgaggacatggaaactgaggctgttaatgaaattctcgaggatataccggaacatgaagaagattatctggattccacattagaggacgaggagatcattatcgcagagtacctttcttacgttgaaaacagaaagtctgctaccaaaaagaattag

SEQ ID NO: 189466 - DNA, 1806 bp, Artificial Sequence
  derived and/or modified sequence
atggcccagaagaagtacctgcaggccaagctgacccagttcctgcgtgaggatcgaattcagctctggaagccaccctacaccgatgagaataagaaagtgggcttggctttaaaagacctcgccaaacagtactccgacagactcgaatgctgcgagaatgaggttgagaaggtgatcgaagagatcaggtgcaaagcgatcgagcgcggtaccggaaatgataattacaggacgacaggcatcgctaccatcgaggtttttctaccccctcgtctgaagaaggaccggaagaacctgttagaaacccggctccatatcactggtagggagctcagatcaaaaattgcagagacttttggcttgcaggagaactacatcaaaatcgttatcaacaaaaaacaactgcagctcggaaagactcttgaagagcaaggagttgcgcacaacgtcaaagctatggtcctggaattaaaacagtccgaggaagatgcaagaaagaattttcagcttgaagaggaagagcaaaatgaagctaaattgaaagaaaaacagattcaacgcaccaaaagaggacttgaaatcctcgccaaacgtgcggccgagaccgttgtggatccagaaatgaccccctatttagatattgctaatcagacaggaaggtccattaggatccctccatcagagaggaaagccctcatgctggccatggggtatcatgaaaaggggagagcctttctgaagagaaaagagtacgggatagccctcccatgccttcttgatgccgataaatatttctgcgaatgctgtagggaactgttggatactgtagacaactatgctgttttgcagctggacatagtgtggtgctactttaggttggagcagttggaatgcctggatgatgcagaaaaaaagctcaacctcgcccagaaatgtttcaaaaactgctacggtgaaaatcatcagcgcctcgttcatatcaaggggaattgtggcaaggaaaaagtactcttcctccgcctgtatttgctccaggggatccggaattatcattctggtaatgatgtagaagcatacgagtatctaaataaggcacgacagctgttcaaggagttgtacattgatccaagcaaagtagataacctgctacagttgggttttacagcccaggaggcccggttaggactccgagcttgtgacgggaatgtcgaccatgctgcaactcacataacaaaccggcgagaggagctggctcagatcagaaaagaagaaaaggagaaaaagcggagacgattggaaaatattaggttcctcaagggcatgggttactcaactcatgcagctcaacagatactgctttccaatccgcagatgtggtggctgaacgactccaaccctgaaaccgacaacaggcaggaaagtcccagccaagagaacattgacagacttgtttacatggggtttgacgcactggtggcagaggctgctctccgggtatttaggggaaatgtgcaacttgcagcacaaaccctcgcgcacaacggtgggtccttaccacccgagctcccactcagccccgaagacagtcttagtcctccagccaccagtccctcagactctgcaggaaccagcagcgccagcacagacgaggacatggagaccgaggccgtgaacgagattttggaagatattcctgagcacgaagaggactacctggactctactctcgaggacgaggagataatcatagccgagtatctgtcctacgtggaaaacaggaaatcggccactaaaaagaattag

SEQ ID NO: 189467 - DNA, 1806 bp, Artificial Sequence
  derived and/or modified sequence
atggcccagaagaagtacttacaagctaaactgactcaattcctgagggaagatcgcattcagctctggaagcccccatataccgacgaaaacaaaaaggttgggttggccctgaaggatctggccaagcagtactccgataggcttgagtgctgcgagaacgaagtggagaaggttatcgaggaaatccgctgcaaagctatcgaacgagggacaggcaacgacaactatcggacaacaggcatagctactattgaagtctttctgcctccacggctaaagaaggaccgaaagaacctgcttgagacaaggctccacatcaccggaagagagctgcgatccaagattgctgagaccttcgggctccaggaaaactacatcaagattgtcatcaacaagaagcagttgcagcttgggaagactctggaagagcagggggttgctcacaatgttaaggccatggtcctcgaacttaagcagtccgaagaggacgctcggaagaactttcagctggaggaggaagagcagaatgaagccaagttgaaggagaagcagattcagagaaccaaaaggggtctggagattcttgccaagcgcgcagccgagactgtcgtggaccctgagatgaccccgtaccttgatatagctaaccagacggggaggagcatccggatccctcctagcgagcggaaggcattgatgctggccatggggtaccatgagaaagggagagcattccttaagagaaaggagtacggaatcgccctcccctgtctgttggatgccgacaagtatttttgcgagtgttgtagagaacttctcgataccgtcgacaactacgccgtgctccagcttgatatcgtttggtgttacttcagactcgaacagctcgagtgcttagacgatgccgagaagaaactgaacctggcccagaaatgttttaagaattgttatggagaaaaccatcaacgactagtgcacatcaaaggcaactgtggcaaagaaaaggtgctgtttctgcgactttacctgctgcaggggattcgtaactaccattctggcaacgatgttgaggcttatgaatatctcaataaagccaggcagctgtttaaggagctgtacatcgacccttctaaggtggataacttattgcagttagggttcaccgcccaagaagctagactgggtctgcgtgcatgcgacggcaacgttgaccacgctgcaacccatataactaatagaagggaagaactggcccaaatccgcaaggaggagaaagagaagaagcggaggcggctggagaatattagattcctgaagggcatgggctactctacgcatgccgctcagcagatcctgctgagtaacccccaaatgtggtggctgaatgacagcaacccagaaacagacaatcgacaagaatcacctagtcaggagaatatcgacagactggtttatatggggtttgacgcattggttgcagaggccgctctcagggtgttccggggaaacgtccagctggctgcacagactctcgcccacaatggcggatccctgcccccagagttgcctcttagtccagaagacagcctctcaccccctgccacttctcccagtgattctgctggaacctccagcgcctccactgacgaggacatggaaacagaagctgtcaatgagatcttagaagacatccccgaacatgaagaagactacctagacagcactctagaggacgaagagattatcatcgccgagtatcttagctatgttgagaaccggaagagcgccaccaaaaaaaactag

SEQ ID NO: 189468 - DNA, 1806 bp, Artificial Sequence
  derived and/or modified sequence
atggcgcaaaagaagtatctacaggctaagctcacgcagtttcttagagaagatcgaatccagctgtggaaacctccctacacagatgagaataaaaaggtggggctcgcactcaaggacctggccaaacagtattcagaccgtctggaatgctgcgagaacgaggtggagaaagttattgaagaaataagatgtaaggctatcgaaagagggacaggaaacgataactaccgaacaaccgggattgccactattgaagtgttcctgccccctcggttaaagaaagatagaaagaatcttctggagaccagactgcatatcacaggacgggagcttcgcagcaagatagccgagacctttggcctacaagagaactatatcaagatcgtcatcaacaagaagcagctccagctgggtaagacactcgaggaacagggggtagcccataacgtcaaggcaatggttttggaactgaagcagagtgaggaggacgcccgtaagaatttccaattggaagaagaagagcagaatgaggctaaactcaaagagaaacagatccagcgtacaaaacgaggcctggaaatactggccaagcgtgcagctgaaaccgtcgtggaccccgagatgactccatatctggatatcgccaaccagactggaagaagcatacgaattcctccttccgagagaaaagccctcatgctcgcaatgggctaccatgagaaggggcgagccttcctgaagaggaaagaatacggaatagcccttccttgcctgctggatgcagataaatatttttgtgagtgttgtcgtgagctgctggataccgtggacaactatgcagtgctgcagctggatattgtgtggtgttattttaggctggaacagttggagtgcctcgatgacgctgagaagaagctaaacttggcccagaagtgctttaaaaattgctacggagagaaccaccaacgcctggtccacataaaaggcaattgcggcaaggaaaaagttctgttcttaaggctgtacctgctccaggggatccgaaactaccactcgggcaatgacgtagaagcatacgaatacttgaataaggcgcgtcaattattcaaggagctgtacatcgaccccagcaaagtcgacaatctgttacagctcggattcacagcccaggaggccaggctcgggctgcgagcatgcgatggaaacgttgaccatgctgccactcatataactaataggcgagaggagctagctcagatacgcaaagaagagaaagagaaaaaaagacggagattagagaacattcgattcctgaaaggaatgggttatagcacccatgccgcacagcaaatcctgctgtcaaacccccaaatgtggtggctgaacgatagtaatcccgaaactgacaaccgccaggagtcgccgtctcaggagaatatcgatcggctggtttacatgggtttcgatgctctggtggcagaggctgccctgcgcgtcttccgcggaaatgtacaactggctgcccagaccctggctcataacgggggtagcctgcccccagaactgccattgtctcccgaggactcccttagtccaccagcaacctcaccatccgactcagccggaacgtcgtctgcctccacagacgaagacatggagaccgaagcagtgaacgagattctcgaagatatccccgaacacgaagaagactatctggactccactctcgaagatgaggagatcattattgcagagtatttgtcttacgttgaaaaccggaagagcgctacgaaaaaaaactag

SEQ ID NO: 189469 - DNA, 1806 bp, Artificial Sequence
  derived and/or modified sequence
atggcccagaagaagtacctgcaggccaagctgacccagttcctgagagaggacagaatccagctgtggaagcccccctacaccgacgagaacaagaaggtgggcctggccctgaaggacctggccaagcagtacagcgacagactggagtgctgcgagaacgaggtggagaaggtgatcgaggagatcagatgcaaggccatcgagagaggcaccggcaacgacaactacagaaccaccggcatcgccaccatcgaggtgttcctgccccccagactgaagaaggacagaaagaacctgctggagaccagactgcacatcaccggcagagagctgagaagcaagatcgccgagaccttcggcctgcaggagaactacatcaagatcgtgatcaacaagaagcagctgcagctgggcaagaccctggaggagcagggcgtggcccacaacgtgaaggccatggtgctggagctgaagcagagcgaggaggacgccagaaagaacttccagctggaggaggaggagcagaacgaggccaagctgaaggagaagcagatccagagaaccaagagaggcctggagatcctggccaagagagccgccgagaccgtggtggaccccgagatgaccccctacctggacatcgccaaccagaccggcagaagcatcagaatcccccccagcgagagaaaggccctgatgctggccatgggctaccacgagaagggcagagccttcctgaagagaaaggagtacggcatcgccctgccctgcctgctggacgccgacaagtacttctgcgagtgctgcagagagctgctggacaccgtggacaactacgccgtgctgcagctggacatcgtgtggtgctacttcagactggagcagctggagtgcctggacgacgccgagaagaagctgaacctggcccagaagtgcttcaagaactgctacggcgagaaccaccagagactggtgcacatcaagggcaactgcggcaaggagaaggtgctgttcctgagactgtacctgctgcagggcatcagaaactaccacagcggcaacgacgtggaggcctacgagtacctgaacaaggccagacagctgttcaaggagctgtacatcgaccccagcaaggtggacaacctgctgcagctgggcttcaccgcccaggaggccagactgggcctgagagcctgcgacggcaacgtggaccacgccgccacccacatcaccaacagaagagaggagctggcccagatcagaaaggaggagaaggagaagaagagaagaagactggagaacatcagattcctgaagggcatgggctacagcacccacgccgcccagcagatcctgctgagcaacccccagatgtggtggctgaacgacagcaaccccgagaccgacaacagacaggagagccccagccaggagaacatcgacagactggtgtacatgggcttcgacgccctggtggccgaggccgccctgagagtgttcagaggcaacgtgcagctggccgcccagaccctggcccacaacggcggcagcctgccccccgagctgcccctgagccccgaggacagcctgagcccccccgccaccagccccagcgacagcgccggcaccagcagcgccagcaccgacgaggacatggagaccgaggccgtgaacgagatcctggaggacatccccgagcacgaggaggactacctggacagcaccctggaggacgaggagatcatcatcgccgagtacctgagctacgtggagaacagaaagagcgccaccaagaagaactag

SEQ ID NO: 189470 - protein, 815 aa, Artificial Sequence
  derived and/or modified sequence
MAGGHCGSFPAAAAGSGEIVQLNVGGTRFSTSRQTLMWIPDSFFSSLLSGRISTLRDETGAIFIDRDPAAFAPILNFLRTKELDLRGVSINVLRHEAEFYGITPLVRRLLLCEELERSSCGSVLFHGYLPPPGIPSRKINNTVRSADSRNGLNSTEGEARGNGTQPVLSGTGEETVRLGFPVDPRKVLIVAGHHNWIVAAYAHFAVCYRIKESSGWQQVFTSPYLDWTIERVALNAKVVGGPHGDKDKMVAVASESSIILWSVQDGGSGSEIGVFSLGVPVDALFFIGNQLVATSHTGKVGVWNAVTQHWQVQDVVPITSYDTAGSFLLLGCNNGSIYYIDMQKFPLRMKDNDLLVTELYHDPSNDAITALSVYLTPKTSVSGNWIEIAYGTSSGAVRVIVQHPETVGSGPQLFQTFTVHRSPVTKIMLSEKHLVSVCADNNHVRTWTVTRFRGMISTQPGSTPLASFKILSLEETESHGSYSSGNDIGPFGERDDQQVFIQKVVPITNKLFVRLSSTGKRICEIQAVDCTTISSFTVRECEGSSRMGSRPRRYLFTGHTNGSIQMWDLTTAMDMVNKSEDKDVGGPTEEELLKLLDQCDLSTSRCATPNISPATSVVQHSHLRESNSSLQLQHHDTTHEAATYGSMRPYRESPLLARARRTESFHSYRDFQTINLNRNVERAVPENGNLGPIQAEVKGATGECNISERKSPGVEIKSLRELDSGLEVHKIAEGFSESKKRSSEDENENKIEFRKKGGFEGGGFLGRKKVPYLASSPSTSDGGTDSPGTASPSPTKTTPSPRHKKSDSSGQEYSL

SEQ ID NO: 189471 - protein, 240 aa, Artificial Sequence
  derived and/or modified sequence
MAGGHCGSFPAAAAGSGEIVQLNVGGTRFSTSRQTLMWIPDSFFSSLLSGRISTLRDETGAIFIDRDPAAFAPILNFLRTKELDLRGVSINVLRHEAEFYGITPLVRRLLLCEELERSSCGSVLFHGYLPPPGIPSRKINNTVRSADSRNGLNSTEGEARGNGTQPVLSGTGEETVRLGFPVDPRKVLIVAGHHNWIVAAYAHFAVCYRVFWLGTVGHACNPSTLGGRDGWSSRSARPTW

SEQ ID NO: 189472 - DNA, 2448 bp, Artificial Sequence
  derived and/or modified sequence
atggccggcggacactgcggatcctttcccgcagccgcagctggaagcggcgaaatagtgcagctgaacgtgggtggtactcgtttctctaccagccgtcagactcttatgtggatccctgattcgtttttctcctcacttctgtctggtaggatctcaaccttgagggacgaaactggtgccatttttatcgatcgggatcccgccgcattcgcccccatactcaactttctgcgaacaaaagagttagatctgcggggcgtctctataaacgtgctgaggcatgaggcagagttttatggcattactcccctggtccggcgtctgcttctatgcgaagagctcgaacgaagttcatgcggttccgttctttttcacgggtacctccctccccccggcattccgtcacgcaaaatcaacaataccgtgcgatccgccgattctaggaacggtcttaacagcactgaaggagaggccagggggaacggcacacaacctgtgctgtccggcaccggtgaagagactgtgagactgggcttccccgttgaccccaggaaggtcttgatcgtagccgggcatcacaactggatcgtggccgcctatgcccattttgccgtgtgttatcgcatcaaagagagcagcgggtggcagcaggtgttcacctcgccttaccttgactggacaatcgagagggtcgccctcaacgccaaggtggtgggcggacctcacggtgataaagataaaatggttgccgtggccagcgagagcagcataatactctggtcggtacaggacgggggatctgggtctgagatcggggtgttctccctgggagtgccagtggatgctctgttctttatcggtaaccagcttgtggctacaagtcatacggggaaagtcggagtttggaacgccgtcactcagcactggcaggtgcaagacgtcgtgccgattacatcctacgacaccgccggatccttcctgcttcttgggtgtaacaacggtagcatttattacattgacatgcagaagtttcctcttcgcatgaaagataacgatcttctggtgacggagctgtatcatgatcctagcaacgatgccattacagccctgtccgtgtacctgacccccaagacatccgtcagcggaaattggattgaaatagcatatggaacctcatccggcgcagtccgggtgatagtgcagcaccccgaaaccgtcggttccggcccccagcttttccagactttcactgtccaccgttcccctgtaaccaagatcatgctgtctgagaagcatctggtgagcgtttgcgccgacaataatcacgttagaacctggaccgtgaccaggtttagagggatgattagcactcaacccggatccacccccctagcctcgtttaagatactctccctagaggagactgagtcacatggctcatattcatctggcaacgacattggtccttttggggagagggacgatcagcaggtattcatccagaaagttgtgcctataacgaacaagctctttgtgcggctcagttcaaccggcaagagaatctgtgaaatccaagccgtagattgcactaccatatcatccttcactgtacgggagtgcgaaggctctagcagaatggggtcccggccccggcgttacctcttcacagggcacactaacggctccatacagatgtgggatctcacaaccgccatggacatggtgaacaaaagcgaggacaaggacgttggagggcctaccgaggaggagctactgaaactccttgaccagtgcgatctaagcacatctcgctgcgccacgccgaatatctcaccagccaccagtgtggtccagcactcacacctccgggaatctaatagttccctgcagctacagcaccatgatacaacacacgaggctgccacctacggaagcatgaggccctaccgagagagtcctttattagcacgcgcaagaagaacagagtcgttccactcctaccgcgacttccaaacaatcaatctaaaccggaatgtagaacgggccgtgcccgagaatgggaacctgggcccgatccaggccgaagttaaaggagctacaggggaatgtaacatttctgaaagaaagtcgccgggggtggaaattaagagcttgcgggagttagattctggcctggaggtccataaaattgccgaaggattctccgagtctaagaagcggagtagtgaagacgaaaacgaaaataagatcgaattcaggaaaaagggagggtttgaagggggcggtttcctcggtaggaaaaaggttccttatctcgccagcagcccaagcacctcagacggtggcacagactcccccggcaccgccagtccatcacccaccaagacaaccccatctccaagacataaaaaaagtgactcgtctggtcaggagtattccctgtag

SEQ ID NO: 189473 - DNA, 2448 bp, Artificial Sequence
  derived and/or modified sequence
atggccggcggccactgcggcagcttccctgctgctgctgctggcagcggggagatcgtgcagctgaatgtgggcggcacccgcttcagcaccagccggcagaccctgatgtggatcccagacagcttcttcagcagcctgctgagcggccgcatcagcaccctgagagatgaaacaggagccatcttcatcgaccgggaccctgctgcctttgcccccatcctgaacttcctgcggaccaaggagctggacctgcggggcgtgtccatcaacgtgctgcggcatgaagctgagttctacggcatcacccccctggtgcggcggctgctgctgtgtgaggagctggagaggagcagctgtggctctgtgctcttccacggctacctgcccccacctggcatccccagcaggaagatcaacaacacagtgcgctctgctgacagcagaaatggcctgaacagcacagaaggagaggcccggggaaatggcacccagcctgtgctgtctggaactggagaggagaccgtgcggctgggcttccctgtggaccccaggaaggtgctgattgtggccggccaccacaactggatcgtggccgcctatgcccactttgctgtgtgctaccgcatcaaggagagcagcggctggcagcaggtgttcaccagcccctacctggactggaccatcgagcgggtggccctgaatgccaaggtggtgggcggcccccatggagacaaggacaagatggtggccgtggccagcgagagcagcatcatcctgtggagcgtgcaggacggcggcagcggcagcgagattggagtcttcagcctgggcgtgcctgtggatgccctcttcttcatcggcaaccagctggtggccaccagccacacaggcaaggtgggcgtgtggaatgctgtgacccagcactggcaggtgcaggatgtggtgcccatcaccagctatgacacagctggcagcttcctgctgctgggctgcaacaacggcagcatctactacatcgacatgcagaagttccccctgaggatgaaggacaatgacctgctggtgacagagctgtaccatgaccccagcaatgatgccatcacagccctgtctgtgtacctgacccccaagacctctgtgtctggcaactggattgagatcgcctacggcaccagcagcggggctgtgcgggtcatcgtgcagcaccctgagaccgtgggcagcggcccccagctgttccagaccttcaccgtgcacaggagccctgtgaccaagatcatgctgtctgagaagcacctggtgtctgtgtgtgccgacaacaaccacgtgaggacctggacagtgacccgcttccggggcatgatcagcacccagcccggcagcacccccctggccagcttcaagatcctgagcctggaggagacagagagccacggcagctacagcagtggaaatgacatcggcccctttggagagagagatgaccagcaggtgttcatccagaaggtggtgcccatcaccaacaagctgtttgtgcggctgagcagcacaggcaagaggatctgtgagatccaggccgtggactgcaccaccatcagcagcttcaccgtgcgggagtgtgagggcagcagcaggatgggcagccggccccggcgctacctgttcaccggccacaccaacggcagcatccagatgtgggacctgaccacagccatggacatggtgaacaagtctgaggacaaggatgtgggcggccccacagaggaggagctgctgaagctgctggaccagtgtgacctgagcaccagccgctgtgccacccccaacatcagccctgccacctctgtggtgcagcacagccacctgcgggagagcaacagcagcctgcagctgcagcaccacgacaccacccatgaagctgccacctacggctccatgaggccctaccgggagagccccctgctggcccgggcccggaggacagagagcttccacagctacagagacttccagaccatcaacctgaacagaaatgtggagagagctgtgcctgaaaatggaaacctgggccccatccaggccgaggtgaagggggccactggagagtgcaacatcagcgagaggaagagccctggggtggagatcaagagcctgcgggagctggacagcggcctggaggtgcacaagattgctgagggcttcagcgagagcaagaagaggagcagtgaagatgaaaatgaaaacaagattgagttcaggaagaagggcggctttgaaggaggcggcttcctgggcaggaagaaggtgccctacctggccagcagccccagcaccagtgatggcggcacagacagccctggaacagccagccccagccccaccaagaccacccccagccccaggcacaagaagagtgacagcagcggccaggagtacagcctgtag

SEQ ID NO: 189474 - DNA, 2448 bp, Artificial Sequence
  derived and/or modified sequence
atggccggcggccactgcggcagcttccccgccgccgccgccggctcaggagagatagttcaactgaacgtgggaggaacacgcttttccacgtcccgccagacactcatgtggattcctgactcattcttctcctcactgctgtctggccgcatatccactttaagagacgagacaggtgccattttcattgaccgggaccccgctgcatttgctccaattttaaactttcttagaactaaagagctggacctcaggggggtatccatcaacgtactccggcacgaagcggaattttacggcatcacgcccctggtgagacggctgctgctttgtgaggaactggagcgttcttcatgtggctctgtcctttttcacggctacttaccaccaccaggcatccctagtcgcaaaataaataatacagtccgttctgcagattccagaaatggcttgaattccaccgaaggagaggcacgcggaaacggcactcaacccgtcctctccggcaccggcgaggaaactgtcaggttgggcttcccagtggatccgaggaaagtactcatcgtcgccggccatcacaactggattgttgccgcttatgctcacttcgctgtgtgttatcggatcaaggaatcttcaggctggcaacaggtttttacctccccttatctggactggacaatagaacgagtagctctaaatgctaaggtggtgggggggccccatggagataaggataagatggtggccgtggcgagtgagtctagtattattctatggtctgtgcaagacggcggctctggcagcgaaataggggtcttctctcttggagtccccgttgacgccctcttttttatcggcaatcagctggttgccacgagtcacacagggaaggtgggagtgtggaacgctgtgacgcagcattggcaggtccaggacgtggtccccatcacaagttatgacacggccggctctttccttctacttggctgcaacaacggctccatttactacatcgacatgcagaaatttcccctgcgcatgaaagataacgacctccttgtgaccgagctctatcacgacccctcgaatgatgccataacggccctgtctgtttacctaactcctaagacctcagtttctggaaactggattgagatcgcttatggtacctcatcaggcgcagtgagggttatagtccaacacccagaaaccgtgggcagcgggccccaactgttccagacattcaccgtccaccgtagcccggtgactaagattatgctaagcgagaaacatttagtttccgtctgtgcagacaacaaccacgtgcgaacctggaccgtcactcggtttcgcgggatgatctcaacacagccaggcagcacaccgctggcctctttcaaaatcctgagcctcgaggagaccgaatcccacggcagctattcaagcggtaatgacattggaccattcggggaacgagatgatcagcaggtattcatccagaaagtcgtgccaatcaccaacaagctcttcgtgaggctgtcatccacaggcaagcgcatatgcgagattcaggctgtggactgtacaaccattagtagtttcaccgttcgggagtgcgaggggagttctcgcatgggtagccgcccgcgaaggtatctctttactggccatacgaacggctcaatacagatgtgggacttgaccaccgccatggatatggtaaacaagtcagaggacaaggacgtcggcggacctaccgaagaggagctactgaaactgctggatcagtgcgatttaagcacgagcagatgcgccaccccaaatatctccccggctacctcggtggtgcagcactctcatttgcgcgaaagcaactcgagtctccagctgcagcaccacgatactacacacgaggctgccacatatggctcaatgagaccttatagagagagccccttattggctcgcgcccgacggactgaaagctttcacagttatcgtgacttccagacaattaatctgaatcggaatgttgagagagcagtgccggagaatggcaacctgggtccaatccaggctgaagttaaaggtgctacaggggaatgcaacatttctgaaaggaagagcccgggggtggaaattaagtctctccgtgaattagactcgggactcgaggtccataaaattgccgagggcttttcagagagcaaaaagagatcatcagaggacgaaaatgagaataaaatagaattccggaagaaggggggtttcgagggtggggggtttctgggccggaagaaagtcccatacttggctagctccccctccacttcagatggtggcacagactcgcccgggacagctagtccatcgccgacaaagaccacaccttccccgcgtcacaagaagagtgacagttccggccaggaatactctctgtag

SEQ ID NO: 189475 - DNA, 3855 bp, Artificial Sequence
  derived and/or modified sequence
gtcggtggcagcggagcacggagaagaggcccgggcggcccggcggcctggaggccgcgaaaggtggaggccgggccgcccttgtgcaccgcaggattgacccgggaaggggcagaagctagcgagccccgcccggccgccgggaaggtgggggaagccccgtgcaccccccgccctccggccgccgccgccccgctggccctgcagccgtcgccgctgcctcgggctacagccccgggctcggcggtcccggctggggaaggagggcggcgagcgcgtccggagccgccggagatggcgggagggcactgcggcagcttccccgcggcggcggccggcagcggcgagatcgtccaactgaacgtaggggggaccagatttagtacctcaagacaaactcttatgtggattccagattcttttttttccagtttgctgagtgggagaatttcaacacttcgagatgaaactggtgctatatttattgatagagatccagcagcatttgcacccattttaaattttcttcggacaaaagaactagacttaaggggagtgagtattaatgttctcaggcatgaagcagaattttacgggatcactccattagtaagaaggcttctcttatgtgaagaattggagcgttcctcttgtggcagtgtcctttttcatggttacttgcccccaccaggtattcctagtcgtaaaataaacaacacagtcagatctgctgattctaggaatggtctaaattctacagaaggtgaagcccggggaaatggtacacagcctgttctctctggaacgggagaagaaactgttaggctaggatttcctgtggatccacgaaaggtgctaatagtagctggccatcacaactggattgtagctgcatatgcccattttgctgtgtgttacagaatcaaagaatcttcaggatggcagcaagtgtttacgagcccatatttggattggactatcgaacgagtagctttaaatgcaaaggtggttggagggccacatggagacaaagacaaaatggttgctgttgcctcagagagtagcatcatcttgtggagtgttcaggatgggggaagtggaagtgaaattggagtgttcagcctgggtgttcctgtagatgctctcttctttattggtaaccagttggtggccacgagtcatacagggaaagtgggagtgtggaatgctgtcactcagcactggcaggttcaagatgttgttcctataactagttatgacactgctggatcattccttctgcttggatgtaacaatggatcaatatattacatagatatgcagaagttccccttgcgaatgaaagataatgatcttcttgtaactgaactgtatcatgatccttcaaatgatgctattactgctctgagtgtttacctcacacccaaaacaagtgtcagtggtaactggatcgagatcgcctatggtacgagctctggagcagtacgagtgattgtacaacacccagagacagttgggtcaggtcctcagctttttcagactttcacagttcaccgaagtcccgtaacaaaaatcatgctatcagagaagcatcttgtatcagtctgtgcagataataatcatgtccggacgtggacagtaacacgattcagaggaatgatctctactcagccaggttctactcctttagcgtcattcaagatactatccctggaggagacagaaagtcatggtagctattcctctggaaatgacataggaccttttggagagcgagacgatcaacaggtgtttatccagaaagttgttcccatcaccaacaaactatttgtaagactctcatcgactggaaaaagaatatgtgagatccaggctgttgactgtactacaatatcctcatttacagtgagggaatgtgagggatccagtaggatgggctcaagaccaaggcgctacttgttcacaggccatacaaatggcagtattcaaatgtgggatctgaccactgctatggatatggttaacaaaagtgaagataaggatgtaggtggtccaaccgaagaagagctactcaaattactcgatcaatgtgatttgagcacatctcgctgtgctactcctaacatcagtccagcaacttccgtagttcagcatagccacttacgagaatcaaattctagccttcagcttcagcaccatgataccacccatgaagcagctacttacggttccatgaggccttacagagaaagtcctttattagcaagggcaagaaggactgagagctttcacagttatagggacttccagactattaatttgaacagaaatgtagaaagagctgtccctgaaaatggtaacttgggtccaatacaagctgaagtgaaaggggcaacaggggaatgtaatatatctgagagaaagtctcctggagtagaaataaaaagtttgagagaattggatagtggattggaagtgcataaaatagctgaaggtttttcagaatccaagaaaaggtcatcagaagatgaaaatgaaaataaaatagagtttaggaagaaaggaggatttgaagggggaggattccttggaagaaagaaagttccctatctggcgtcatcaccaagtacttccgatggaggaactgactcacctggtactgcgtccccatctcctacaaagactactccatctcctcggcataaaaaaagtgattcttcaggtcaggagtacagcttgtgaaaactcaccaaaatgaatagttgtttcgttacatttagatgaaagttaaactttactgaatttcagtacattagtttttacactaaaactttacaagataaaattggacttcatttagtatctttttaacagaattacttggaataatgagatacaataatcatatctcttttgacattttggaaatttttttaattttacaagtacatttaacagatcatttataaagcaggagtccattttaacacttaccgactttttttggtttggaaacatattaccacgtcttaataggatggtgcccatataggtgagcatccctttagatcatgggaaccagcagactgcattcctaatcttcattatgcctgagacttgtcttacaatgttacctttaagtgaatcacataattgtctttggaacttggtctcccaacacttattgtgattgcaaagtgtttaccagatatttgatgaggtgctatgtttgtgaaaaacatatcatgtaattcaaaaacactattgatattgaataccagataccactatgtagtaagtcttttaggatgattttaatttagtcgtgcgtcattttctgattctcatcattgggagatcttaaatcttagcaagcattagcaatattaaatgccaaaattccattgaaactttcaagttggagcaattgtctgtgtttgaaaagatgaaataaaaataataatcaagggcaaagctttgagtgcccagaagggaaagctgtaccagttgctaacctgtcttgtttcaggagccaccatgtttttttttcagtgttaacaacaatcatgataattaaattaaaacactagtttgttcacttgtaggactgcagttctgaattttgggttaaaggttttggctgctgtaagaatgtgaatttgaatgtattttgaattgtaagagcaaaagaacgtttttgtacaattttttttcatttaattggaatgatcttcaggtttctacaaatagggtaattgtaaatttaaagcattagcatttattggtgaataatgtatatatccccattccaagaaatataagtgagtgaagttgaaataaaatctttaaaattta

SEQ ID NO: 189476 - DNA, 2448 bp, Artificial Sequence
  derived and/or modified sequence
atggccggtggacattgcggctcatttcctgccgctgccgctgggtccggagagatcgtccagctgaacgtggggggaaccagattttccacctccagacagaccttaatgtggattccggacagctttttcagtagcctgttgtccggcaggatttctactttgagagatgaaaccggtgctatttttattgatcgggatcccgcagcatttgctcccattcttaatttcttgcggaccaaggagctggatctgcgtggagtctccatcaacgtgcttcgccacgaagccgaattttatgggatcacaccactcgtgcggaggctgcttctgtgcgaagaattggagcgctcctcatgtgggagcgtgctttttcatggctatctcccccctccagggatccctagccggaaaatcaataatacagtgagatcagccgattcacgaaacgggcttaactccacagagggggaagccagaggaaacgggacccagcctgttttgagcggcactggggaagaaacagtgagattagggtttcctgtggatcccagaaaggtgttaattgttgcaggtcatcataactggatcgtggctgcgtacgctcatttcgccgtttgttatagaattaaagagagttcaggttggcaacaagtgtttacctctccttatttagactggacaattgaaagggtcgcccttaacgctaaggtggttggcggtccccacggtgataaggacaagatggtagccgtcgcttctgagtctagcatcatattgtggtccgtccaagacggcggatctggctccgagataggtgtgttctcactcggggttcctgtggacgctctgttcttcattgggaaccagctggtcgccacctcccatacagggaaagtgggggtctggaatgctgtgacacaacattggcaggtccaagatgtcgtgcccataacgtcgtatgatacagccggttcatttctgttgctgggttgcaataatgggtcaatctattacattgatatgcaaaaattcccactacggatgaaggacaacgatttattggtgacagaactgtatcacgatccatccaatgacgccatcacggccttgtcggtgtatcttactccgaagacttctgtaagcggaaactggatcgaaatagcctatggcacctcatctggggcagtgcgggttatcgttcagcaccctgaaaccgtgggcagcgggccacagttattccagacttttactgtccaccgcagtcctgtgactaaaattatgttgagcgagaagcacctggtgagcgtgtgtgctgataacaatcacgtgcgtacctggaccgtaacacggttccggggaatgatcagcacacagcctggaagcacccctctcgcctcatttaagatcttgtccctcgaggagactgagagccacgggagctactcctctggaaacgacatcggaccattcggagaacgcgacgaccaacaagtgttcatacagaaggtcgtgcctattacaaataaactgttcgttaggctgtcctctactggaaagcggatctgtgaaatccaggctgtagactgtaccacaataagcagtttcaccgtcagggaatgcgaagggtcttcgcggatgggaagccgccctaggcgctacctgttcacgggccacaccaatggtagcattcagatgtgggacctgaccacagcgatggatatggtcaataaaagcgaagacaaagatgtgggcggtcccacggaggaggagttgctcaagttgctggatcagtgcgacttaagtacctcccgatgtgcaactcccaacatatcccccgctaccagcgtggttcagcactcccacctgagggaaagcaattctagccttcagttgcaacaccatgacactactcatgaagccgctacctacggctctatgaggccatacagggaatctcccctgttggcacgcgcaagacgtaccgaatcattccactcgtacagagatttccaaacaatcaatctgaacagaaacgtggagagggctgtgcccgagaacggtaacctgggaccaattcaggccgaagtcaagggagccacgggcgagtgtaacatatcagaacgcaagtcccctggtgttgagatcaagagcttgcgcgaactggactcagggcttgaagtacataagatcgctgaaggcttcagcgaatcaaaaaagaggagtagcgaagacgaaaatgagaacaagatagaattccgaaagaaggggggattcgaagggggtggtttcttaggtcgaaagaaagtgccctacctggcttcttcaccgtcaactagtgacggtggaactgactccccagggacggcgagtccatcccctacaaagacaacaccatcaccaagacacaagaagagtgatagcagcggacaggagtattctctgtag

SEQ ID NO: 189477 - DNA, 2448 bp, Artificial Sequence
  derived and/or modified sequence
atggccggcggccactgcggcagcttccccgccgccgccgccggcagcggcgagatcgtgcagctgaacgtgggcggcaccagattcagcaccagcagacagaccctgatgtggatccccgacagcttcttcagcagcctgctgagcggcagaatcagcaccctgagagacgagaccggcgccatcttcatcgacagagaccccgccgccttcgcccccatcctgaacttcctgagaaccaaggagctggacctgagaggcgtgagcatcaacgtgctgagacacgaggccgagttctacggcatcacccccctggtgagaagactgctgctgtgcgaggagctggagagaagcagctgcggcagcgtgctgttccacggctacctgcccccccccggcatccccagcagaaagatcaacaacaccgtgagaagcgccgacagcagaaacggcctgaacagcaccgagggcgaggccagaggcaacggcacccagcccgtgctgagcggcaccggcgaggagaccgtgagactgggcttccccgtggaccccagaaaggtgctgatcgtggccggccaccacaactggatcgtggccgcctacgcccacttcgccgtgtgctacagaatcaaggagagcagcggctggcagcaggtgttcaccagcccctacctggactggaccatcgagagagtggccctgaacgccaaggtggtgggcggcccccacggcgacaaggacaagatggtggccgtggccagcgagagcagcatcatcctgtggagcgtgcaggacggcggcagcggcagcgagatcggcgtgttcagcctgggcgtgcccgtggacgccctgttcttcatcggcaaccagctggtggccaccagccacaccggcaaggtgggcgtgtggaacgccgtgacccagcactggcaggtgcaggacgtggtgcccatcaccagctacgacaccgccggcagcttcctgctgctgggctgcaacaacggcagcatctactacatcgacatgcagaagttccccctgagaatgaaggacaacgacctgctggtgaccgagctgtaccacgaccccagcaacgacgccatcaccgccctgagcgtgtacctgacccccaagaccagcgtgagcggcaactggatcgagatcgcctacggcaccagcagcggcgccgtgagagtgatcgtgcagcaccccgagaccgtgggcagcggcccccagctgttccagaccttcaccgtgcacagaagccccgtgaccaagatcatgctgagcgagaagcacctggtgagcgtgtgcgccgacaacaaccacgtgagaacctggaccgtgaccagattcagaggcatgatcagcacccagcccggcagcacccccctggccagcttcaagatcctgagcctggaggagaccgagagccacggcagctacagcagcggcaacgacatcggccccttcggcgagagagacgaccagcaggtgttcatccagaaggtggtgcccatcaccaacaagctgttcgtgagactgagcagcaccggcaagagaatctgcgagatccaggccgtggactgcaccaccatcagcagcttcaccgtgagagagtgcgagggcagcagcagaatgggcagcagacccagaagatacctgttcaccggccacaccaacggcagcatccagatgtgggacctgaccaccgccatggacatggtgaacaagagcgaggacaaggacgtgggcggccccaccgaggaggagctgctgaagctgctggaccagtgcgacctgagcaccagcagatgcgccacccccaacatcagccccgccaccagcgtggtgcagcacagccacctgagagagagcaacagcagcctgcagctgcagcaccacgacaccacccacgaggccgccacctacggcagcatgagaccctacagagagagccccctgctggccagagccagaagaaccgagagcttccacagctacagagacttccagaccatcaacctgaacagaaacgtggagagagccgtgcccgagaacggcaacctgggccccatccaggccgaggtgaagggcgccaccggcgagtgcaacatcagcgagagaaagagccccggcgtggagatcaagagcctgagagagctggacagcggcctggaggtgcacaagatcgccgagggcttcagcgagagcaagaagagaagcagcgaggacgagaacgagaacaagatcgagttcagaaagaagggcggcttcgagggcggcggcttcctgggcagaaagaaggtgccctacctggccagcagccccagcaccagcgacggcggcaccgacagccccggcaccgccagccccagccccaccaagaccacccccagccccagacacaagaagagcgacagcagcggccaggagtacagcctgtag

SEQ ID NO: 189478 - protein, 701 aa, Artificial Sequence
  derived and/or modified sequence
MVVSTFTDMDTFPNNFPPGGDSGLTGSQSEFQKMLIDERLRCEHHKANYQTLKAEHTRLQNEHVKLQNELKHLFNEKQTQQEKLQLLLEELRGELVEKTKDLEEMKLQILTPQKLELLRAQIQQELETPMRERFRNLDEEVEKYRAVYNKLRYEHTFLKSEFEHQKEEYARILDEGKIKYESEIARLEEDKEELRNQLLNVDLTKDSKRVEQLAREKVYLCQKLKGLEAEVAELKAEKENSEAQVENAQRIQVRQLAEMQATVRSLEAEKQSANLRAERLEKELQSSSEQNTFLINKLHKAEREINTLSSKVKELKHSNKLEITDIKLETARAKSELERERNKIQSELDGLQSDNEILKAAVEHHKVLLVEKDRELIRKVQAAKEEGYQKLVVLQDEKLELENRLADLEKMKVEHDVWRQSEKDQYEEKLRASQMAEEITRKELQSVRLKLQQQIVTIENAEKEKNENSDLKQQISSLQIQVTSLAQSENDLLNSNQMLKEMVERLKQECRNFRSQAEKAQLEAEKTLEEKQIQWLEEKHKLHERITDREEKYNQAKEKLQRAAIAQKKRKSLHENKLKRLQEKVEVLEAKKEELETENQVLNRQNVPFEDYTRLQKRLKDIQRRHNEFRSLILVPNMPPTASINPVSFQSSAMVPSMELPFPPHMQEEQHQRELSLLRKRLEELETTQRKQLEELGSSGE

SEQ ID NO: 189479 - protein, 568 aa, Artificial Sequence
  derived and/or modified sequence
MLIDERLRCEHHKANYQTLKAEHTRLQNEHVKLQNELKHLFNEKQTQQEKLQLLLEELRGELVEKTKDLEEMKLQILTPQKLELLRAQIQQELETPMRERFRNLDEEVEKYRAVYNKLRYEHTFLKSEFEHQKEEYARILDEGKIKYESEIARLEEDKEELRNQLLNVDLTKDSKRVEQLAREKVYLCQKLKGLEAEVAELKAEKENSEAQVENAQRIQVRQLAEMQATVRSLEAEKQSANLRAERLEKELQSSSEQNTFLINKLHKAEREINTLSSKVKELKHSNKLEITDIKLETARAKSELERERNKIQSELDGLQSDNEILKAAVEHHKVLLVEKDRELIRKVQAAKEEGYQKLVVLQDEKLELENRLADLEKMKVEHDVWRQSEKDQYEEKLRASQMAEEITRKELQSVRLKLQQQIVTIENAEKEKNENSDLKQQISSLQIQVTSLAQSENDLLNSNQMLKEMVERLKQECRNFRSQAEKAQLEAEKTLEEKQIQWLEEKHKLHERITDREEKYNQAKEKLQRAAIAQKKLEQDLELGCPSVTDTYRESVFPPPPLKRDLLK

SEQ ID NO: 189480 - DNA, 2106 bp, Artificial Sequence
  derived and/or modified sequence
atggtggtgagcaccttcaccgacatggacaccttccccaacaacttcccccccggcggcgacagcggcctgaccggcagccagagcgagttccagaagatgctgatcgacgagagactgagatgcgagcaccacaaggccaactaccagaccctgaaggccgagcacaccagactgcagaacgagcacgtgaagctgcagaacgagctgaagcacctgttcaacgagaagcagacccagcaggagaagctgcagctgctgctggaggagctgagaggcgagctggtggagaagaccaaggacctggaggagatgaagctgcagatcctgaccccccagaagctggagctgctgagagcccagatccagcaggagctggagacccccatgagagagagattcagaaacctggacgaggaggtggagaagtacagagccgtgtacaacaagctgagatacgagcacaccttcctgaagagcgagttcgagcaccagaaggaggagtacgccagaatcctggacgagggcaagatcaagtacgagagcgagatcgccagactggaggaggacaaggaggagctgagaaaccagctgctgaacgtggacctgaccaaggacagcaagagagtggagcagctggccagagagaaggtgtacctgtgccagaagctgaagggcctggaggccgaggtggccgagctgaaggccgagaaggagaacagcgaggcccaggtggagaacgcccagagaatccaggtgagacagctggccgagatgcaggccaccgtgagaagcctggaggccgagaagcagagcgccaacctgagagccgagagactggagaaggagctgcagagcagcagcgagcagaacaccttcctgatcaacaagctgcacaaggccgagagagagatcaacaccctgagcagcaaggtgaaggagctgaagcacagcaacaagctggagatcaccgacatcaagctggagaccgccagagccaagagcgagctggagagagagagaaacaagatccagagcgagctggacggcctgcagagcgacaacgagatcctgaaggccgccgtggagcaccacaaggtgctgctggtggagaaggacagagagctgatcagaaaggtgcaggccgccaaggaggagggctaccagaagctggtggtgctgcaggacgagaagctggagctggagaacagactggccgacctggagaagatgaaggtggagcacgacgtgtggagacagagcgagaaggaccagtacgaggagaagctgagagccagccagatggccgaggagatcaccagaaaggagctgcagagcgtgagactgaagctgcagcagcagatcgtgaccatcgagaacgccgagaaggagaagaacgagaacagcgacctgaagcagcagatcagcagcctgcagatccaggtgaccagcctggcccagagcgagaacgacctgctgaacagcaaccagatgctgaaggagatggtggagagactgaagcaggagtgcagaaacttcagaagccaggccgagaaggcccagctggaggccgagaagaccctggaggagaagcagatccagtggctggaggagaagcacaagctgcacgagagaatcaccgacagagaggagaagtacaaccaggccaaggagaagctgcagagagccgccatcgcccagaagaagagaaagagcctgcacgagaacaagctgaagagactgcaggagaaggtggaggtgctggaggccaagaaggaggagctggagaccgagaaccaggtgctgaacagacagaacgtgcccttcgaggactacaccagactgcagaagagactgaaggacatccagagaagacacaacgagttcagaagcctgatcctggtgcccaacatgccccccaccgccagcatcaaccccgtgagcttccagagcagcgccatggtgcccagcatggagctgcccttccccccccacatgcaggaggagcagcaccagagagagctgagcctgctgagaaagagactggaggagctggagaccacccagagaaagcagctggaggagctgggcagcagcggcgagtag

SEQ ID NO: 189481 - DNA, 1707 bp, Artificial Sequence
  derived and/or modified sequence
atgctgatcgacgagagactgagatgcgagcaccacaaggccaactaccagaccctgaaggccgagcacaccagactgcagaacgagcacgtgaagctgcagaacgagctgaagcacctgttcaacgagaagcagacccagcaggagaagctgcagctgctgctggaggagctgagaggcgagctggtggagaagaccaaggacctggaggagatgaagctgcagatcctgaccccccagaagctggagctgctgagagcccagatccagcaggagctggagacccccatgagagagagattcagaaacctggacgaggaggtggagaagtacagagccgtgtacaacaagctgagatacgagcacaccttcctgaagagcgagttcgagcaccagaaggaggagtacgccagaatcctggacgagggcaagatcaagtacgagagcgagatcgccagactggaggaggacaaggaggagctgagaaaccagctgctgaacgtggacctgaccaaggacagcaagagagtggagcagctggccagagagaaggtgtacctgtgccagaagctgaagggcctggaggccgaggtggccgagctgaaggccgagaaggagaacagcgaggcccaggtggagaacgcccagagaatccaggtgagacagctggccgagatgcaggccaccgtgagaagcctggaggccgagaagcagagcgccaacctgagagccgagagactggagaaggagctgcagagcagcagcgagcagaacaccttcctgatcaacaagctgcacaaggccgagagagagatcaacaccctgagcagcaaggtgaaggagctgaagcacagcaacaagctggagatcaccgacatcaagctggagaccgccagagccaagagcgagctggagagagagagaaacaagatccagagcgagctggacggcctgcagagcgacaacgagatcctgaaggccgccgtggagcaccacaaggtgctgctggtggagaaggacagagagctgatcagaaaggtgcaggccgccaaggaggagggctaccagaagctggtggtgctgcaggacgagaagctggagctggagaacagactggccgacctggagaagatgaaggtggagcacgacgtgtggagacagagcgagaaggaccagtacgaggagaagctgagagccagccagatggccgaggagatcaccagaaaggagctgcagagcgtgagactgaagctgcagcagcagatcgtgaccatcgagaacgccgagaaggagaagaacgagaacagcgacctgaagcagcagatcagcagcctgcagatccaggtgaccagcctggcccagagcgagaacgacctgctgaacagcaaccagatgctgaaggagatggtggagagactgaagcaggagtgcagaaacttcagaagccaggccgagaaggcccagctggaggccgagaagaccctggaggagaagcagatccagtggctggaggagaagcacaagctgcacgagagaatcaccgacagagaggagaagtacaaccaggccaaggagaagctgcagagagccgccatcgcccagaagaagctggagcaggacctggagctgggctgccccagcgtgaccgacacctacagagagagcgtgttcccccccccccccctgaagagagacctgctgaagtag

SEQ ID NO: 189482 - DNA, 3130 bp, Artificial Sequence
  derived and/or modified sequence
gagcccgctcctccaggctggtggggcggtgcgatgaggcggcttctgggccatacgtcagcacgtggggtggcgccgcacccctgaggatcccggtccacgcggaggagtggggcttttcaccgccgccgccgccgccctcggacctctcccgggatacttcacatttccctagggacgggagcccgaggggtccgttcggccctcttcctctcgctgggccgacaccccgctgtaggaccgtaacccttagtcccaatgcctccgtaagcggagttgagtgggtgcctgtggttggagctgtggaggtgtccccggtggcgagcgcggccagaactgcggtcacttaagttttccgtgtgcgggttgcaaggagcgtgcgtgcgtctggtataatttggcttcctgagattctgccttagcaagaaaggagtgggaaatacccttggaaagaaaactaaaacagtaagaaagccaaaacttatttttacatggttgtcagcacatttaccgatatggacacttttcccaataattttcctcctggtggagacagtggattgacaggttctcagtcggagttccagaaaatgttaattgatgaaaggttacgatgtgagcatcataaagctaattatcagacactgaaggctgaacacacaaggttgcagaatgaacatgtaaagttacaaaatgaactcaagcacctgtttaatgaaaagcaaactcagcaggaaaaacttcagctcctgcttgaagaactaagaggagaattagtagagaaaactaaagatttagaagaaatgaaactgcagatattaactccacaaaaattggaattgctaagagcccaaatacaacaagaattagaaactccaatgagagaacgttttaggaatctagatgaagaggtagaaaagtatagagctgtatataataagcttcgctatgaacatacatttctcaagtcagaatttgaacaccagaaggaagagtatgcacgtattttagatgaaggaaaaataaaatatgaatcagagattgcaagactggaggaagataaagaagaactacgtaaccagctgcttaatgttgatctcacaaaagacagcaaacgagtggaacaacttgctcgagaaaaagtctatttgtgtcaaaaattaaaaggtttagaggctgaagtagcggaattaaaggctgaaaaggagaattctgaggctcaggtggaaaatgcccaaagaatacaggtgcggcagttggctgagatgcaggctacagtcagatccctggaggctgaaaaacaatcagctaatttacgggcagaacgtttggaaaaagagctacaatcaagcagtgaacaaaatacctttttaattaataaattgcataaagctgaacgagaaataaatacattgtccagtaaagtaaaagaacttaaacattcaaacaaactggaaataacagacatcaaactggagacagcaagagctaagagtgagctagaaagagaaaggaataagattcaaagtgaactggatggattacagtcagacaatgaaattctcaaagcagctgttgaacatcacaaagtgctcttagtagaaaaggatcgtgaattaatacgtaaagtacaagctgccaaagaagaaggttatcaaaaacttgtggtattacaagatgaaaagttagaactcgagaacagattagcagatttggagaaaatgaaagtggaacatgatgtctggaggcaatctgaaaaggatcagtatgaagagaaattgcgggcttcacagatggcagaagagatcaccaggaaggagcttcagagtgttaggttaaaacttcagcaacaaattgtgactattgaaaatgcagagaaggaaaaaaatgaaaattctgacctaaaacagcaaatcagtagtttgcagatccaagtgacttcacttgcacagtcagagaatgacttgctgaattcaaaccaaatgctgaaggaaatggtggagagattaaaacaagaatgccgaaattttagaagccaagctgaaaaagcgcaactagaagctgaaaagacattggaagagaaacagatacagtggttggaagaaaagcataagcttcatgagcgtatcacagacagagaagaaaagtacaatcaagctaaggagaaactgcagcgagctgcaattgcccagaaaaagagaaaatctcttcatgaaaacaaattgaaaagactacaagagaaagtagaagtcttggaggcaaagaaagaagaattggaaacagaaaatcaggtcttaaatagacaaaatgttccttttgaagactatacaaggcttcaaaaaagactaaaagatatacagagaagacataatgaatttcgaagtctaattttggttcctaacatgcctccaacagcatctatcaatcctgttagctttcagtcatcagccatggttccaagcatggaactaccatttcctcctcatatgcaggaggaacaacatcaaagggaactctctctacttcgcaaaagactagaagaactggaaacaacacaaagaaaacaactagaggaacttggatcttccggagaatgatgttcttggagaacaggcagatcaaaagaggtgaagttggtgactcagtaaaacttgacattttaacctgtggcatttagatactttttactgtttgccaaaacacttgaatgtgcctcaagaaaaggtacctactacatgctgtattgtatgactgtcaggattttaagattatacaagtgaagcattaaaagagaaattctcagagatatttagaatatttgacaatggtttgagaatgtaaaacaaaaaggaactagttagagtcaagttttaaaatttttactttgttgaatttttttttttggcattttgagtgaaatataactatcattaattctctcttcatctttgagatgcttggccataacagggtccatacacatcttctggtttactatatacaaaaactgtagttgaaaaaagatgacaatttaaaagtcagcctaaagaatgtaaaggtatctatatacaaaaggctaccttttctaaaatctgtgtgcacataattaaagagcttaatttttttttaa

SEQ ID NO: 189483 - DNA, 2339 bp, Artificial Sequence
  derived and/or modified sequence
gggtgggacttcctgcttcgcgtgccgctgggccaagggacagagcccgctcctccaggctggtggggcggtgcgatgaggcggcttctgggccatacgtcagcacgtggggtggcgccgcacccctgaggatcccggtccacgcggaggagtggggcttttcaccgccgccgccgccgccctcggacctctcccgggatacttcacatttccctagggacgggagcccgaggggtccgttcggccctcttcctctcgctgggccgacaccccgctgtaggaccgtaacccttagtcccaatgcctccgtaagcggagttgagtgggtgcctgtggttggagctgtggaggtgtccccggtggcgagcgcggccagaactgcggtcacttaagttttccgtgtgcgggttgcaaggagcgtgcgtgcgtctggtataatttggcttcctgagattctgccttagcaagaaaggagtgggaaatacccttggaaagaaaactaaaacagtaagaaagccaaaacttatttttacatggttgtcagcacatttaccgatatggacacttttcccaataattttcctcctggtggagacagtggattgacaggttctcagtcggagttccagaaaatgttaattgatgaaaggttacgatgtgagcatcataaagctaattatcagacactgaaggctgaacacacaaggttgcagaatgaacatgtaaagttacaaaatgaactcaagcacctgtttaatgaaaagcaaactcagcaggaaaaacttcagctcctgcttgaagaactaagaggagaattagtagagaaaactaaagatttagaagaaatgaaactgcagatattaactccacaaaaattggaattgctaagagcccaaatacaacaagaattagaaactccaatgagagaacgttttaggaatctagatgaagaggtagaaaagtatagagctgtatataataagcttcgctatgaacatacatttctcaagtcagaatttgaacaccagaaggaagagtatgcacgtattttagatgaaggaaaaataaaatatgaatcagagattgcaagactggaggaagataaagaagaactacgtaaccagctgcttaatgttgatctcacaaaagacagcaaacgagtggaacaacttgctcgagaaaaagtctatttgtgtcaaaaattaaaaggtttagaggctgaagtagcggaattaaaggctgaaaaggagaattctgaggctcaggtggaaaatgcccaaagaatacaggtgcggcagttggctgagatgcaggctacagtcagatccctggaggctgaaaaacaatcagctaatttacgggcagaacgtttggaaaaagagctacaatcaagcagtgaacaaaatacctttttaattaataaattgcataaagctgaacgagaaataaatacattgtccagtaaagtaaaagaacttaaacattcaaacaaactggaaataacagacatcaaactggagacagcaagagctaagagtgagctagaaagagaaaggaataagattcaaagtgaactggatggattacagtcagacaatgaaattctcaaagcagctgttgaacatcacaaagtgctcttagtagaaaaggatcgtgaattaatacgtaaagtacaagctgccaaagaagaaggttatcaaaaacttgtggtattacaagatgaaaagttagaactcgagaacagattagcagatttggagaaaatgaaagtggaacatgatgtctggaggcaatctgaaaaggatcagtatgaagagaaattgcgggcttcacagatggcagaagagatcaccaggaaggagcttcagagtgttaggttaaaacttcagcaacaaattgtgactattgaaaatgcagagaaggaaaaaaatgaaaattctgacctaaaacagcaaatcagtagtttgcagatccaagtgacttcacttgcacagtcagagaatgacttgctgaattcaaaccaaatgctgaaggaaatggtggagagattaaaacaagaatgccgaaattttagaagccaagctgaaaaagcgcaactagaagctgaaaagacattggaagagaaacagatacagtggttggaagaaaagcataagcttcatgagcgtatcacagacagagaagaaaagtacaatcaagctaaggagaaactgcagcgagctgcaattgcccagaaaaagcttgaacaggatcttgagttgggatgcccttctgtgactgatacatacagagagagtgtattccccccacccccattgaagagagatctcttgaagtga

SEQ ID NO: 189484 - DNA, 3183 bp, Artificial Sequence
  derived and/or modified sequence
gggacagagcccgctcctccaggctggtggggcggtgcgatgaggcggcttctgggccatacgtcagcacgtggggtggcgccgcacccctgaggatcccggtccacgcggaggagtggggcttttcaccgccgccgccgccgccctcggacctctcccgggatacttcacatttccctagggacgggagcccgaggggtccgttcggccctcttcctctcgctgggccgacaccccgctgtaggaccgtaacccttagtcccaatgcctccgtaagcggagttgagtgggtgcctgtggttggagctgtggaggtgtccccggtggcgagcgcggccagaactgcggtcacttaagttttccgtgtgcgggttgcaaggagcgtgcgtgcgtctggtatagggaggacacctctggattgaggatcttatgacctactttagaggaaggtataatttggcttcctgagattctgccttagcaagaaaggagtgggaaatacccttggaaagaaaactaaaacagtaagaaagccaaaacttatttttacatggttgtcagcacatttaccgatatggacacttttcccaataattttcctcctggtggagacagtggattgacaggttctcagtcggagttccagaaaatgttaattgatgaaaggttacgatgtgagcatcataaagctaattatcagacactgaaggctgaacacacaaggttgcagaatgaacatgtaaagttacaaaatgaactcaagcacctgtttaatgaaaagcaaactcagcaggaaaaacttcagctcctgcttgaagaactaagaggagaattagtagagaaaactaaagatttagaagaaatgaaactgcagatattaactccacaaaaattggaattgctaagagcccaaatacaacaagaattagaaactccaatgagagaacgttttaggaatctagatgaagaggtagaaaagtatagagctgtatataataagcttcgctatgaacatacatttctcaagtcagaatttgaacaccagaaggaagagtatgcacgtattttagatgaaggaaaaataaaatatgaatcagagattgcaagactggaggaagataaagaagaactacgtaaccagctgcttaatgttgatctcacaaaagacagcaaacgagtggaacaacttgctcgagaaaaagtctatttgtgtcaaaaattaaaaggtttagaggctgaagtagcggaattaaaggctgaaaaggagaattctgaggctcaggtggaaaatgcccaaagaatacaggtgcggcagttggctgagatgcaggctacagtcagatccctggaggctgaaaaacaatcagctaatttacgggcagaacgtttggaaaaagagctacaatcaagcagtgaacaaaatacctttttaattaataaattgcataaagctgaacgagaaataaatacattgtccagtaaagtaaaagaacttaaacattcaaacaaactggaaataacagacatcaaactggagacagcaagagctaagagtgagctagaaagagaaaggaataagattcaaagtgaactggatggattacagtcagacaatgaaattctcaaagcagctgttgaacatcacaaagtgctcttagtagaaaaggatcgtgaattaatacgtaaagtacaagctgccaaagaagaaggttatcaaaaacttgtggtattacaagatgaaaagttagaactcgagaacagattagcagatttggagaaaatgaaagtggaacatgatgtctggaggcaatctgaaaaggatcagtatgaagagaaattgcgggcttcacagatggcagaagagatcaccaggaaggagcttcagagtgttaggttaaaacttcagcaacaaattgtgactattgaaaatgcagagaaggaaaaaaatgaaaattctgacctaaaacagcaaatcagtagtttgcagatccaagtgacttcacttgcacagtcagagaatgacttgctgaattcaaaccaaatgctgaaggaaatggtggagagattaaaacaagaatgccgaaattttagaagccaagctgaaaaagcgcaactagaagctgaaaagacattggaagagaaacagatacagtggttggaagaaaagcataagcttcatgagcgtatcacagacagagaagaaaagtacaatcaagctaaggagaaactgcagcgagctgcaattgcccagaaaaagagaaaatctcttcatgaaaacaaattgaaaagactacaagagaaagtagaagtcttggaggcaaagaaagaagaattggaaacagaaaatcaggtcttaaatagacaaaatgttccttttgaagactatacaaggcttcaaaaaagactaaaagatatacagagaagacataatgaatttcgaagtctaattttggttcctaacatgcctccaacagcatctatcaatcctgttagctttcagtcatcagccatggttccaagcatggaactaccatttcctcctcatatgcaggaggaacaacatcaaagggaactctctctacttcgcaaaagactagaagaactggaaacaacacaaagaaaacaactagaggaacttggatcttccggagaatgatgttcttggagaacaggcagatcaaaagaggtgaagttggtgactcagtaaaacttgacattttaacctgtggcatttagatactttttactgtttgccaaaacacttgaatgtgcctcaagaaaaggtacctactacatgctgtattgtatgactgtcaggattttaagattatacaagtgaagcattaaaagagaaattctcagagatatttagaatatttgacaatggtttgagaatgtaaaacaaaaaggaactagttagagtcaagttttaaaatttttactttgttgaatttttttttttggcattttgagtgaaatataactatcattaattctctcttcatctttgagatgcttggccataacagggtccatacacatcttctggtttactatatacaaaaactgtagttgaaaaaagatgacaatttaaaagtcagcctaaagaatgtaaaggtatctatatacaaaaggctaccttttctaaaatctgtgtgcacataattaaagagcttaattttt

SEQ ID NO: 189485 - DNA, 2106 bp, Artificial Sequence
  derived and/or modified sequence
atggtagtgagcaccttcacggacatggacacatttcccaataacttcccccctgggggtgactccggcctgactggcagtcagtctgaattccaaaaaatgttgatcgatgaacggttaaggtgcgagcatcataaagccaattatcagaccctgaaagctgagcacacacgactccagaatgaacatgtcaaactccagaacgaactgaagcacttgttcaatgaaaaacaaacacagcaggaaaagctccagctactgctggaagagctaagaggagagttagttgagaagactaaggaccttgaagagatgaaactacagattctgacaccccagaagcttgaattactaagggcccagattcagcaggagctcgaaacccctatgagagaacggttcaggaatcttgacgaagaggtcgagaagtacagagccgtctacaacaagttaaggtacgaacacacctttctgaagtctgaattcgagcaccaaaaagaagagtacgctcgcatcttggacgaagggaagatcaagtacgaatcggagatcgctcgcctggaggaagataaggaagagctcaggaaccaacttctgaatgtcgatctgaccaaggactccaagcgggtggagcagctcgccagagaaaaagtctatctgtgtcagaagctgaagggactggaagccgaagtagccgagctgaaggccgagaaagagaattccgaggctcaggtggagaatgcccagcgcatccaggtgaggcagctcgccgaaatgcaggccactgttagatcactggaggctgaaaagcagtctgctaatctgagagccgagagactagagaaggagctgcagtcctcatcagaacagaatacattcctgattaataagctgcataaggccgagagagagataaacacactcagttccaaagtgaaagagctgaaacattccaataaactcgagattactgacatcaagctagagacggcacgggcaaaatctgaactggagagggagcggaataagattcagagtgagctggatggtctgcaatcggataatgaaatccttaaagccgctgtcgaacaccacaaggttctgctggttgagaaagatcgcgagctcatcaggaaggtacaggctgcgaaagaagaaggctaccaaaaactggtcgttttgcaagatgagaagctggagctagagaatagactcgctgatttggaaaaaatgaaggtggagcacgacgtctggagacagtcagaaaaggaccagtacgaagagaagctgagagcttcccagatggctgaggagatcacacgcaaggaattgcaatcagtgcgcctcaagcttcagcagcagattgtgacaatcgagaatgcagagaaagaaaagaatgagaattccgatctgaaacaacagatcagctcacttcagatccaggtcacttcactggcccagtccgagaacgacttgctgaactctaaccagatgctgaaggagatggtggagcggctgaaacaggagtgccgtaactttcggagccaggccgaaaaggcgcagctagaagctgagaagacactggaggaaaagcagatccagtggctggaagagaaacataaacttcatgagagaattaccgaccgcgaggagaagtacaatcaggcaaaggaaaagctccaacgagccgctatcgctcaaaaaaaaagaaagagccttcacgaaaacaagctgaaacgattgcaagaaaaagtagaggtcctggaagccaaaaaagaggagctggaaactgagaatcaggtcctaaacagacagaacgtgcctttcgaggactacactagactgcagaaacgcctgaaggatattcaaagacgccacaatgagtttagatctttaatactcgttccgaatatgcccccaaccgcctctatcaatcccgtgtcctttcagtcttctgcgatggtgccctctatggagcttccctttccgcctcatatgcaggaagagcagcatcaaagggagctttctctcttgagaaaaagactggaagaactggaaacaacccagagaaaacagctcgaagagctcggatcatccggcgagtag

SEQ ID NO: 189486 - DNA, 1707 bp, Artificial Sequence
  derived and/or modified sequence
atgctcatcgatgaaaggctgcgatgcgagcaccacaaagctaattaccagactctgaaggccgaacacacacggttacagaatgaacatgttaagctgcagaacgaactgaagcacctgtttaatgaaaaacagacacagcaggagaaactgcaacttctgctagaagagctccgcggagaattggtggagaaaacaaaagatctcgaggagatgaaactgcagatcctgacgccccagaagcttgaactgctgcgcgctcagatccaacaggagctagagacgcccatgcgggaacgattccgtaatcttgacgaggaggttgaaaaatatagagcagtgtacaataaactcagatatgagcacactttcctgaagagtgagtttgagcatcagaaagaagagtacgcaagaatcctggacgagggaaaaataaaatatgaatccgagattgcacgactcgaggaagacaaggaggagctgagaaatcagctgttgaacgtggacctgacgaaagactcgaaaagagtagagcagctggcacgggagaaggtttacctgtgtcagaaattgaagggtctggaagcggaggtggccgaactgaaagctgaaaaagaaaactctgaggcccaggtggagaacgcacagcggatacaggtgaggcagcttgcagagatgcaagccaccgtgcggagcctcgaggcagaaaaacagtctgcaaacctgagggccgaacgtctggaaaaggagttacaaagctccagcgaacagaatacgtttctgattaataagcttcacaaagcggagagagagattaacacattatctagcaaggttaaagagttaaaacattctaataaactcgaaattactgatatcaagcttgagacggcacgcgcaaagtcggaactcgagcgcgaacgaaataaaatacagtctgagctggatgggctccagagtgataacgaaattctgaaggcagcagtcgaacatcacaaggtgttgctggtggaaaaagatcgggaattgatcagaaaggtgcaggccgctaaagaagaaggctaccagaaattagttgtgctccaggatgagaaactggagctcgagaaccgcctggctgacctagagaagatgaaggtggagcacgatgtgtggagacagtctgaaaaagaccagtatgaggagaagctccgggccagccagatggcagaggagatcactagaaaggagctccagagcgtcaggctgaaattacaacagcagatcgtgaccattgagaacgctgaaaaggagaaaaacgagaatagcgatctgaagcaacagatttcctccctccagattcaggtgacctcactggcccagagtgaaaacgatttactaaactctaatcagatgctgaaagagatggtggagagattgaagcaagagtgcaggaacttccgtagccaagcggaaaaagctcagcttgaagcggagaagactctcgaagagaaacaaattcagtggctcgaagagaaacataagctccacgaacgtattactgacagggaggaaaagtataaccaggccaaggaaaagcttcagcgagctgccatagctcaaaaaaaacttgagcaggatcttgagctgggttgtcctagtgtgacagacacatacagagagtcagtctttcccccacccccactgaaacgcgatttacttaaatag

SEQ ID NO: 189487 - DNA, 2106 bp, Artificial Sequence
  derived and/or modified sequence
atggtcgtctccaccttcactgacatggacacattcccaaataatttcccccctggtggggatagtggcctgaccgggagtcaaagcgaattccaaaagatgctcatcgacgagcgcttaagatgtgagcaccataaggcgaactatcaaacgctgaaggcagagcacaccagattacagaacgaacacgtcaaactccaaaatgaactgaaacacctgttcaacgagaagcagacgcagcaggaaaagctgcagttgcttcttgaggagctgcgcggtgagctggtcgaaaaaaccaaggacctggaagaaatgaagctgcagatcctaacgccacagaaactggaacttcttcgagcccagatccaacaggagctggaaacccctatgagagagcgcttcagaaacctggatgaggaagttgagaaataccgggccgtgtacaataagcttagatacgagcacaccttcttgaaaagcgagtttgaacaccagaaggaggagtacgccagaattctcgatgaaggtaaaattaagtatgagtctgagatcgccagattggaggaggacaaagaagaactccggaaccagctgctgaatgtcgacctcaccaaagactcaaagcgcgtggagcagctagccagggaaaaagtttatctctgccagaagctgaaggggctggaggctgaagtcgcagagttaaaggcagagaaggagaattctgaggcacaggtcgaaaacgcgcagagaattcaggtgcgtcagttggcggagatgcaggcgacggttaggagcctggaggctgagaaacagagcgctaacctgagagcagagagactcgagaaagagttgcaatcttcctctgagcaaaacaccttcctgattaacaaactgcataaagccgagcgagaaataaacactctcagtagtaaagttaaggagctcaagcacagcaacaagctggagatcacggacataaaactcgagacagcccgggcaaagagcgaattggagcgcgaacggaataagatccagtctgagttggacggattgcagtcagataacgagatcctgaaagcggccgtggagcaccacaaggtccttctggttgaaaaggacagagagctgatcagaaaggtgcaggcagcaaaggaagagggctaccagaaattagtggtcctgcaagacgaaaagttggaattggagaataggctggctgacctggagaagatgaaggtggaacacgacgtgtggaggcagtcagaaaaagaccagtacgaagagaaacttcgcgcctctcaaatggccgaggagattaccagaaaggaactgcagagtgtgcgactaaaactccaacagcagatcgtgactattgaaaatgctgagaaggaaaagaatgaaaacagtgacttgaaacaacagatctctagcctgcagatccaggtgacatctctggcccaatcagaaaatgacctgctcaattctaaccagatgctgaaggaaatggtcgagcgcctgaagcaagaatgtaggaactttaggagccaggccgagaaggcacagttggaggccgaaaaaaccctcgaggaaaagcagatccagtggctggaagagaagcataaactacatgagcgaataactgacagagaggagaaatacaatcaggccaaggagaaactccagagagctgctatcgcacagaaaaagcggaagagtttgcatgagaacaagctcaaacgtctccaggagaaggtggaagtactcgaggccaagaaggaggaacttgaaacagaaaaccaggtactgaaccggcaaaacgttccattcgaagattacacacgcctgcagaagaggctgaaggacatccaaagaagacataacgagttcaggtcactgatactggtgcccaatatgccccccacagccagcataaaccctgtgtccttccagtcatctgctatggttccctcaatggagctcccgttcccacctcacatgcaggaagagcagcatcagagggaactatcactgcttcgaaagcggctcgaggagcttgaaactacccagcgcaagcagctcgaagagctgggatcatcaggcgaatag

SEQ ID NO: 189488 - DNA, 2106 bp, Artificial Sequence
  derived and/or modified sequence
atggtggtgtccaccttcacagacatggacaccttccccaacaacttccccccaggaggagacagcggcctgaccggcagccagagcgagttccagaagatgctgattgatgagcggctgcgctgtgagcaccacaaggccaactaccagaccctgaaggccgagcacacccggctgcagaatgaacatgtgaagctgcagaatgagctgaagcacctgttcaatgagaagcagacccagcaggagaagctgcagctgctgctggaggagctgcggggggagctggtggagaagaccaaggacctggaggagatgaagctgcagatcctgaccccccagaagctggagctgctgcgggcccagatccagcaggagctggagacccccatgagggagcgcttcaggaacctggatgaggaggtggagaagtacagagctgtgtacaacaagctgcgctatgagcacaccttcctgaagtcagaatttgagcaccagaaggaggagtatgcccgcatcctggatgagggcaagatcaagtatgagagcgagatcgcccggctggaggaggacaaggaggagctgaggaaccagctgctgaatgtggacctgaccaaggacagcaagagggtggagcagctggcccgggagaaggtgtacctgtgccagaagctgaagggcctggaggccgaggtggccgagctgaaggccgagaaggaaaattctgaggcccaggtggagaatgcccagaggatccaggtgcggcagctggccgagatgcaggccaccgtgcgcagcctggaggccgagaagcagagcgccaacctgcgggcagagcggctggagaaggagctgcagagcagcagcgagcagaacaccttcctgatcaacaagctgcacaaggccgagcgggagatcaacaccctgagcagcaaggtgaaggagctgaagcacagcaacaagctggagatcacagacatcaagctggagacagcccgggccaagtctgagctggagcgggagaggaacaagatccagagcgagctggatggcctgcagagcgacaatgagatcctgaaggctgctgtggagcaccacaaggtgctgctggtggagaaggaccgggagctgatcaggaaggtgcaggccgccaaggaggagggctaccagaagctggtggtgctgcaggatgagaagctggagctggagaaccggctggccgacctggagaagatgaaggtggagcatgatgtgtggaggcagagcgagaaggaccagtatgaggagaagctgcgggccagccagatggccgaggagatcaccaggaaggagctgcagagcgtgcggctgaagctgcagcagcagatcgtgaccattgaaaatgctgagaaggagaagaatgaaaattctgacctgaagcagcagatcagcagcctgcagatccaggtgaccagcctggcccagagtgaaaatgacctgctgaacagcaaccagatgctgaaggagatggtggagcggctgaagcaggagtgcaggaacttccgcagccaggccgagaaggcccagctggaggccgagaagaccctggaggagaagcagatccagtggctggaggagaagcacaagctgcacgagcgcatcacagaccgggaggagaagtacaaccaggccaaggagaagctgcagagagctgccatcgcccagaagaagaggaagagcctgcacgagaacaagctgaagaggctgcaggagaaggtggaggtgctggaggccaagaaggaggagctggagacagagaaccaggtgctgaaccggcagaatgtgccctttgaggactacacccggctgcagaagaggctgaaggacatccagaggaggcacaatgagttccgcagcctcatcctggtgcccaacatgccacccacagccagcatcaaccctgtgtccttccagagcagcgccatggtgcccagcatggagctgcccttccccccccacatgcaggaggagcagcaccagcgggagctgagcctgctgaggaagaggctggaggagctggagaccacccagaggaagcagctggaggagctgggcagcagtggagagtag

SEQ ID NO: 189489 - DNA, 1707 bp, Artificial Sequence
  derived and/or modified sequence
atgctgattgatgagcggctgcgctgtgagcaccacaaggccaactaccagaccctgaaggccgagcacacccggctgcagaatgagcacgtgaagctgcagaatgagctgaagcacctgttcaatgagaagcagacccagcaggagaagctgcagctgctgctggaggagctgcggggggagctggtggagaagaccaaggacctggaggagatgaagctgcagatcctgaccccccagaagctggagctgctgcgggcccagatccagcaggagctggagacccccatgagggagcgcttcaggaacctggatgaggaggtggagaagtacagagctgtgtacaacaagctgcgctatgagcacaccttcctgaagtcagaatttgagcaccagaaggaggagtatgcccgcatcctggatgagggcaagatcaagtatgaaagtgaaattgcccggctggaggaggacaaggaggagctgaggaaccagctgctgaatgtggacctgaccaaggacagcaagagggtggagcagctggcccgggagaaggtgtacctgtgccagaagctgaagggcctggaggccgaggtggccgagctgaaggccgagaaggagaacagcgaggcccaggtggagaatgcccagaggatccaggtgcggcagctggccgagatgcaggccaccgtgcgcagcctggaggccgagaagcagagcgccaacctgcgggcagagcggctggagaaggagctgcagagcagcagcgagcagaacaccttcctgatcaacaagctgcacaaggccgagcgggagatcaacaccctgagcagcaaggtgaaggagctgaagcacagcaacaagctggagatcacagacatcaagctggagacagcccgggccaagtctgagctggagcgggagaggaacaagatccagagcgagctggatggcctgcagagcgacaatgagatcctgaaggctgctgtggagcaccacaaggtgctgctggtggagaaggaccgggagctgatcaggaaggtgcaggccgccaaggaggagggctaccagaagctggtggtgctgcaggatgagaagctggagctggagaaccggctggccgacctggagaagatgaaggtggagcatgatgtgtggaggcagagcgagaaggaccagtatgaggagaagctgcgggccagccagatggccgaggagatcaccaggaaggagctgcagagcgtgcggctgaagctgcagcagcagatcgtgaccattgaaaatgctgagaaggagaagaatgaaaacagcgacctgaagcagcagatcagcagcctgcagatccaggtgaccagcctggcccagagtgaaaatgacctgctgaacagcaaccagatgctgaaggagatggtggagcggctgaagcaggagtgcaggaacttccgcagccaggccgagaaggcccagctggaggccgagaagaccctggaggagaagcagatccagtggctggaggagaagcacaagctgcacgagcgcatcacagaccgggaggagaagtacaaccaggccaaggagaagctgcagagagctgccatcgcccagaagaagctggagcaggacctggagctgggctgccccagcgtgacagacacctaccgggagagcgtcttccccccaccacccctgaagagggacctgctgaagtag

SEQ ID NO: 189490 - DNA, 2106 bp, Artificial Sequence
  derived and/or modified sequence
atggtggtgagcaccttcaccgacatggacaccttccccaacaacttcccccccggaggcgattctggcctgaccgggtctcagtcagaatttcaaaagatgcttatagacgagagattacgatgtgagcatcataaagccaactaccaaaccctgaaggccgagcatactaggctccaaaatgagcatgtcaagttgcaaaatgaactcaaacacctctttaacgaaaaacagactcagcaggagaagctgcaacttctgttggaggaactaaggggtgaactggtcgagaagaccaaggacctcgaagagatgaagctgcaaattctcacacctcagaagctggaactgttacgggcccagatccaacaagaactcgaaacgccaatgcgggagagatttagaaacctggatgaggaagtggaaaaatatcgtgccgtttacaacaaactgcgttatgagcatacttttctcaaaagcgaattcgagcatcagaaggaggagtatgcgcgcatcctggacgagggaaagatcaagtatgaatctgaaatcgcgagactggaagaggacaaagaggaactcaggaatcagctgttgaatgtcgatttaaccaaggattccaagagggtggagcaacttgcaagagaaaaagtgtacctgtgccaaaagctgaaaggtttggaagctgaagtggccgagcttaaggctgaaaaggaaaactctgaggcccaggttgagaatgcccagagaatccaggtgcgccaattggccgaaatgcaggccactgtccgctcactagaagccgagaaacaatccgcaaacttaagagccgagagactagaaaaagagctgcaatccagcagtgaacagaatacgtttttaattaataagttgcacaaagcagagcgcgagatcaacaccctgagttcgaaggtaaaagaactgaaacatagtaacaaactggagatcacagatatcaagctggagaccgctcgcgccaagtcagaacttgagagggagcgtaacaaaattcagtccgaattagacggcctgcagagcgataatgagattcttaaggcagcagtcgagcatcataaagtgctgttggtggagaaagaccgggagctgatcaggaaggtgcaggccgcaaaagaggagggatatcaaaagctggtcgtgcttcaggatgagaagcttgaactagaaaacaggctggcagatttagaaaagatgaaagtcgaacacgacgtgtggaggcaatctgagaaggatcagtatgaagagaaactgcgagcgtctcagatggcggaggagattactcgaaaggagctgcagtctgtccgacttaaactccagcagcaaatagtgactatagagaatgcggagaaggaaaagaatgaaaacagtgacctcaagcaacagatctcaagtctgcaaatccaggtaacctccctggcccaaagcgagaacgacctgctgaactctaatcagatgctgaaagaaatggtggagaggctgaagcaggagtgccgaaattttaggtcccaggctgaaaaggctcaactggaagcagaaaagacactggaggaaaaacagattcagtggctggaggagaagcataaactgcatgaaagaatcaccgatcgagaggagaaatacaatcaagccaaagagaaactccagagggccgccattgctcagaaaaaaagaaaatcattacatgagaacaagttgaagcgcctgcaagagaaggtggaggtcttagaagccaagaaggaggagctcgaaaccgaaaaccaagtgctgaaccggcagaatgtgccatttgaagattacaccagactccagaaacgactgaaagatattcagagaagacacaacgagtttcgaagtctgattctggttcccaacatgcctccaaccgcctctatcaacccagtcagctttcagtcctccgcaatggtgccctctatggagctgccgtttcccccccacatgcaggaagagcagcaccaacgcgagctctcactcttgcgcaagagactggaagaattagagaccacacaacgcaagcagctagaagagctgggtagctccggagagtag

SEQ ID NO: 189491 - DNA, 1707 bp, Artificial Sequence
  derived and/or modified sequence
atgctgatcgacgagcggctgcggtgcgagcaccacaaggccaactaccagacactgaaggcggaacatacacgcctccagaatgaacacgtcaagttgcaaaacgaactaaagcatctgttcaatgagaagcagacccaacaagaaaaactgcagctactgcttgaggaactccgaggagagttagttgaaaagaccaaggatcttgaagaaatgaagttgcagattttgactccccagaagttggaactgttgagggcgcagattcaacaagaattagagacacccatgagggagcgatttaggaatcttgatgaagaagttgagaaatatagggctgtgtacaacaagctaaggtacgagcacactttcttgaagtcagagtttgagcaccaaaaagaagagtacgcacggatcctggacgaaggcaagatcaagtatgaatctgaaattgccaggcttgaggaagataaagaggaactgcggaatcagttgctcaatgttgatctgacaaaagactcaaagcgtgtggagcaattggctcgagagaaagtctacctgtgtcaaaagctcaagggcctggaggctgaagtggccgagctaaaggcggagaaagagaactcggaagctcaggtggaaaatgcccagcggatccaggttcgtcagctagccgaaatgcaagccactgtcagatcactggaagcggaaaaacagtcagctaatcttcgtgctgaaaggcttgaaaaagaattgcagtctagctctgaacagaatacttttcttatcaataagttacacaaagcagagcgcgagattaacaccctcagctcaaaggtcaaagaactgaaacactctaataagctggagattactgatatcaagcttgaaaccgctcgcgccaagtcggaactggaacgcgagagaaataaaatccagtccgagctggacggactccagagcgacaacgagatcttaaaggcagccgtggagcaccataaggtgcttctcgttgagaaagacagggagctgatcaggaaggtgcaggctgcaaaggaggaaggctatcaaaagctggttgtactgcaagatgagaagttagagttagaaaacaggcttgctgaccttgaaaagatgaaggtggagcacgacgtctggcggcagagtgagaaggatcagtacgaggagaagctgcgggcctctcagatggccgaagagattaccaggaaggagctgcagtccgttagactgaaattacagcaacaaattgtcacgattgagaatgctgagaaagaaaaaaacgaaaatagtgatctcaagcagcagatatcaagtttgcagatccaggtgaccagccttgcccaatcagagaacgacctgctgaactcaaatcagatgttgaaagaaatggtggaacggctgaaacaagaatgcagaaactttcgcagccaggcggaaaaggcacagctggaagccgagaaaacacttgaagaaaagcagatccagtggttggaagagaagcacaagctgcacgaacgtatcactgaccgggaggaaaaatacaaccaagcaaaggagaagctccagcgagctgcgattgctcagaaaaagttggaacaggaccttgagctgggatgtccctctgtcacggatacataccgggagtcagtgtttcccccacctccactgaagcgcgatctcctcaagtag

SEQ ID NO: 189492 - DNA, 2106 bp, Artificial Sequence
  derived and/or modified sequence
atggtggtgagcaccttcaccgacatggacaccttccccaacaacttcccgccaggaggcgattccggactcacaggatcccagagcgagttccagaagatgttgattgacgagaggctgaggtgtgaacatcacaaggcaaactaccagactctcaaggcagagcacacacggctgcagaatgagcacgtgaaactgcagaacgagctgaaacacttattcaacgagaagcagacccagcaggaaaagttacagctactgcttgaggagctgcgaggcgaattggtagagaaaactaaggacctggaggagatgaagctccagatcctcaccccccagaaactggaactgttacgggctcaaatccagcaagagctggaaactcccatgagggaacgatttcgcaacctggatgaggaggtcgaaaagtacagagcggtgtacaacaagcttcggtatgagcacacttttcttaagtcggaatttgaacatcagaaggaggagtatgcccgcattctagacgagggcaagataaagtatgagtccgaaatcgctcggctggaggaggataaagaagagttgcgtaatcagctgctgaacgtggacttaaccaaagactccaaacgtgtggagcaactcgctagagagaaagtttatctgtgccaaaaactgaaggggcttgaggccgaagtcgccgaactgaaggccgagaaggagaattccgaggcccaggtcgaaaatgcgcagagaatacaggtgaggcagcttgccgagatgcaggctacagtaagatctctggaagccgaaaagcagagcgctaacctgagagcggagcgtttggaaaaggagttgcagagctcgtcagaacaaaacaccttcttgatcaacaaactgcacaaggctgaaagggaaatcaatacactgagtagcaaggtgaaagagctcaagcatagtaataaattggaaataaccgatattaaactagaaaccgctagggcgaaatcggagctggagagggagcgcaataaaattcagtccgaattggacggcctacagtccgataacgaaattttgaaggccgccgttgaacaccacaaggttctcctcgtggaaaaggatcgcgagctgatccgcaaggtccaggctgctaaggaggaagggtaccagaagctagtcgtactgcaagacgagaagctggagctggaaaaccggttggccgatttagaaaagatgaaggtagagcacgacgtctggcgtcagtccgagaaagaccagtatgaggaaaagctgagggcttcacagatggctgaggagatcaccagaaaagagctacaatctgtgaggttgaaattacagcagcagattgtgacaattgaaaacgcagaaaaagaaaaaaacgagaattccgacttgaagcagcagatctcctccctgcagattcaagttaccagcctggcacaaagtgagaatgatctcctcaactcaaatcagatgcttaaagagatggtggaacgtctcaagcaggagtgccgaaatttccgatcgcaagccgaaaaagcccagctggaggcagaaaagactctagaggaaaaacagatccagtggcttgaagagaaacacaagttgcacgaacggataaccgacagagaagagaagtataaccaggccaaggagaagctccaaagagcagccattgcacaaaaaaagcgtaagtcactgcacgagaataaactgaaacgtctgcaggaaaaagtcgaagtgttagaggccaaaaaagaggaactagagacagagaaccaagtcctgaataggcagaacgtgcccttcgaggactatacccgccttcagaagaggctgaaggatattcaaaggagacataatgagtttaggtcgcttattttggtgccaaatatgccgcccactgcttctatcaatcctgtgtcgttccagtcttccgctatggtgccctctatggagctgcctttcccaccacacatgcaggaagagcagcaccaacgcgagttgtctctcctgagaaagcgcttggaggaacttgaaactacgcagagaaaacaacttgaggagcttggctccagcggcgaatag

SEQ ID NO: 189493 - DNA, 2106 bp, Artificial Sequence
  derived and/or modified sequence
atggtagtgtctacttttaccgatatggacacttttcctaacaactttcctccagggggagactccggtctgacaggttcgcagagcgaattccagaaaatgctcattgatgaaagacttcggtgtgagcaccataaggccaactatcagaccctgaaggctgagcacacacggctccagaacgagcacgtcaagctacagaatgagctgaagcatctgttcaatgagaagcagacacaacaagagaaactacagctgctgttggaggagctacgtggagagctggtggaaaagacaaaggatttagaggagatgaaactgcagatcctgacacctcagaagctggaactgctcagagcccaaattcagcaggaactggagaccccaatgagagaacgattccgcaatctagatgaggaagtggagaaataccgagccgtttacaacaagctgagatacgagcatacattcctgaagagtgaattcgagcaccagaaggaggaatacgcaagaatactggatgagggaaaaataaagtatgagagtgagatcgctaggcttgaggaggacaaggaagaactgcgtaatcagctcctgaacgtggacttgacaaaagattccaagcgtgttgaacagcttgcccgtgaaaaggtctatctgtgccagaaactgaaaggtttggaggctgaggtagcagaactgaaggccgagaaggagaactccgaagcccaggttgagaacgcacagcggattcaggttcgccagctcgcagagatgcaggccacagttagatcgcttgaagcggaaaaacagagtgcaaatttgagggccgaacgtttggaaaaggagctgcaatcatcctccgagcagaatacctttctgataaacaagttacataaggcagagcgtgaaataaatacactttctagcaaggtgaaggaattaaagcactccaacaagctggagatcacagacatcaaactggagactgccagagcgaaaagtgaactcgaacgtgaacgcaacaagatccaatccgagctggatgggctccaaagcgataatgagattctgaaggctgccgtggaacaccacaaagtgttgttggtggagaaggatagagagctgattcggaaggtgcaggccgcaaaagaagagggttatcagaaactggtcgttctgcaagacgaaaagctggaactcgagaaccgcctggccgacctggagaagatgaaggtggagcacgacgtgtggaggcagtccgagaaggaccagtacgaggaaaagctcagggcgagtcagatggctgaagagatcacaaggaaagagctacagagcgtccgcctcaagctacagcagcaaatcgtcaccatcgagaacgccgaaaaagagaagaacgaaaacagcgatttgaagcaacagatcagcagcctacagatccaagtgaccagcctggcccagtcagaaaacgacctgttaaacagcaatcagatgctgaaggagatggtggaacgactaaaacaagagtgtcgcaacttccgttcccaggcagagaaagcacaactggaagcggagaagaccttggaggaaaagcagatccaatggctcgaggagaaacacaaattacatgaaaggatcacggatagggaagagaagtacaaccaagcaaaggaaaagctccagagagccgcaattgcacaaaagaagagaaaaagtcttcacgagaataaactgaaaaggctgcaggagaaggtggaggtcctcgaggccaagaaagaagaactagagaccgagaatcaggttttgaatagacagaatgtgccttttgaggattatactagacttcagaaaaggctcaaagacatccaaaggcggcataacgaatttaggtcgttgatccttgtgccaaacatgcctccaaccgcatccattaatccggtctcctttcagtcttctgcaatggtgccaagcatggagctgcctttccccccacacatgcaggaggagcaacatcagagggagctgtccctccttcgtaaaagattggaggagctcgagactacgcagcggaagcagctggaagaactgggctcctccggggagtag

SEQ ID NO: 189494 - DNA, 1707 bp, Artificial Sequence
  derived and/or modified sequence
atgttgattgatgagaggctgaggtgtgaacaccataaggcaaattatcagacactcaaggccgagcacacacgcctgcagaacgagcacgtgaaactccagaatgagctgaagcacctctttaacgagaagcagacgcaacaggaaaaattgcaacttctcttagaggagctgcggggtgagctcgtggaaaaaaccaaggatctcgaggagatgaaactgcagattctcacgccacaaaagttggagcttctgcgtgcccaaatccagcaagaattggagacgccaatgagggaaaggtttaggaacctggacgaggaagttgagaagtaccgggcagtgtacaacaagctgagatacgagcacaccttcctcaagtccgagttcgaacaccagaaagaggagtatgcccgaatccttgacgaggggaagatcaagtacgagagcgagattgccagactcgaggaggacaaggaagagctgcgtaatcagctgcttaacgtggacctgactaaagacagtaagagagtcgagcagctggcacgagagaaagtgtatctttgccaaaagctcaagggacttgaagctgaagtcgccgagcttaaggccgaaaaagaaaacagtgaggcacaggtggaaaacgcacagcgcatccaggtcagacagcttgctgagatgcaggccacagtcaggtccctagaggctgagaagcaaagtgccaaccttcgagctgaaaggctcgagaaggagctgcagtcaagctcggaacaaaatacatttctgattaacaagctgcacaaggcagagcgggagatcaacacattatctagcaaagtaaaggaactcaaacatagcaataagctggagatcactgatatcaaacttgaaacagcccgagccaagtcagagctggaacgtgaaagaaataaaatccagtctgagctggatgggctgcagtccgataacgaaattttgaaggccgctgttgaacatcataaagtgctcctcgtggaaaaggaccgagagcttattagaaaagtgcaagctgcaaaagaagagggataccagaaattggtggtgctacaagacgagaagctggaactagaaaacaggctggctgatcttgagaagatgaaagtcgaacatgacgtatggcgtcagagcgaaaaggatcagtatgaagagaaactgcgggctagccagatggccgaagaaattactcggaaggagctacagtcagttcggctgaagctgcagcagcagatcgtaaccatcgagaacgctgaaaaagagaagaacgagaatagcgacttgaaacagcaaatctccagtctgcagatacaggtgacctccctggcgcagtcagagaacgatctcctgaatagcaatcagatgctaaaagagatggttgaacggctgaagcaggagtgtcgaaacttccgtagtcaagcagaaaaggctcagttggaggctgagaaaacactggaggagaagcagattcagtggctggaggagaaacataagcttcatgagcggattacagaccgggaagagaaatataaccaagccaaggaaaaactgcaacgggctgccatcgcacaaaagaaattagagcaagatcttgagctggggtgtccgagtgttacggacacttaccgggaaagcgtatttccacccccaccgctgaaacgcgacctcttgaagtag

SEQ ID NO: 189495 - DNA, 2106 bp, Artificial Sequence
  derived and/or modified sequence
atggtggttagtacattcacagacatggacacattccccaataactttcctcctggaggggactccggactgaccgggtctcaatctgagtttcagaaaatgctaattgacgagcggctgcgatgtgaacaccataaggccaactatcaaacattgaaagctgaacacacccgcctccaaaacgaacacgtgaagttacagaacgaactgaagcacctgttcaacgagaaacagacccagcaagaaaagctgcaactgttgctcgaggaactgaggggagagcttgtggaaaagacaaaggacctagaagagatgaagctgcagatcctgacgccccagaaattggagctgttgagggcccagattcagcaggaactggaaacgcccatgagagagaggtttaggaatctggacgaggaggtcgaaaagtaccgcgcagtgtacaataagcttaggtatgagcatacattccttaagagtgaattcgagcaccaaaaagaggaatacgccaggattctggatgaaggtaagatcaagtacgagagcgagatcgcaaggctggaggaggataaggaggagttgaggaaccaactgcttaacgttgatctcacaaaagatagcaagcgtgtcgaacaactggccagggagaaagtatacctctgtcagaagctgaagggtttggaggccgaggtggccgagctaaaagccgagaaagagaatagcgaagcacaggtcgagaacgcacaacggattcaggtaaggcagctggctgaaatgcaggccaccgtgagatctctggaggccgagaaacagagtgctaacctcagagccgagaggctggaaaaggaattacaaagcagcagtgagcagaatacttttctcatcaataagctgcacaaggccgaaagggaaattaatactttgtcttccaaggtgaaggagctgaagcattccaacaagctggaaattacagacataaaactggagactgcccgagctaagagtgagttagagcgtgaacgtaataaaatacagtccgagctggatgggttacagtccgataacgaaattctcaaggccgcagtggagcaccacaaggtgctgctggtcgaaaaagatcgcgagctcatccgcaaggtgcaagctgcgaaggaggagggatatcaaaaactggtagtcctgcaggacgagaagctggaactggaaaatcggcttgcagatctggagaagatgaaggttgagcatgatgtatggagacagagtgagaaggatcagtacgaagaaaagttgcgggcttcccagatggccgaggagataactaggaaggagctgcagtcagtgaggctgaagctacagcagcaaattgttactatcgagaacgcagagaaggagaagaatgaaaattccgacctgaaacagcagatctcatccctgcagattcaggtgacatcattggcccagagcgagaatgatctcctgaacagtaatcagatgttaaaggagatggtagaaaggctcaagcaggaatgtcggaatttccgctcacaggccgaaaaggcacagcttgaagccgaaaagactctcgaggaaaaacagatccagtggctggaagaaaagcataaactgcacgaacggattacggaccgggaggagaagtacaatcaagccaaagagaaacttcagcgggcagctatcgcccaaaaaaaaaggaagtcgctgcacgagaacaagttgaaacgcttacaggagaaggtggaggtcctagaagctaagaaggaggagctggaaaccgagaatcaggtgctgaaccggcaaaacgttccttttgaggactacacgcggctccagaagagactgaaggacatccagaggaggcacaacgaattccgtagtcttattcttgttcctaacatgccccctacagcatctattaatcctgtgagttttcagtcttccgccatggtaccctcaatggagctgccctttccgcctcatatgcaggaggagcaacatcagagagagcttagccttctgcgcaagagattagaggagctcgagacgacacagcggaagcagctggaggagctaggatcgagcggtgaatag

SEQ ID NO: 189496 - protein, 218 aa, Artificial Sequence
  derived and/or modified sequence
MNKPITPSTYVRCLNVGLIRKLSDFIDPQEGWKKLAVAIKKPSGDDRYNQFHIRRFEALLQTGKSPTSELLFDWGTTNCTVGDLVDLLIQNEFFAPASLLLPDAVPKTANTLPSKEAITVQQKQMPFCDKDRTLMTPVQNLEQSYMPPDSSSPENKSLEVSDTRFHSFSFYELKNVTNNFDERPISVGGNKMGEGGFGVVYKGYVNNNCGSEEACSNG

SEQ ID NO: 189497 - protein, 460 aa, Artificial Sequence
  derived and/or modified sequence
MNKPITPSTYVRCLNVGLIRKLSDFIDPQEGWKKLAVAIKKPSGDDRYNQFHIRRFEALLQTGKSPTSELLFDWGTTNCTVGDLVDLLIQNEFFAPASLLLPDAVPKTANTLPSKEAITVQQKQMPFCDKDRTLMTPVQNLEQSYMPPDSSSPENKSLEVSDTRFHSFSFYELKNVTNNFDERPISVGGNKMGEGGFGVVYKGYVNNTTVAVKKLAAMVDITTEELKQQFDQEIKVMAKCQHENLVELLGFSSDGDDLCLVYVYMPNGSLLDRLSCLDGTPPLSWHMRCKIAQGAANGINFLHENHHIHRDIKSANILLDEAFTAKISDFGLARASEKFAQTVMTSRIVGTTAYMAPEALRGEITPKSDIYSFGVVLLEIITGLPAVDEHREPQLLLDIKEEIEDEEKTIEDYIDKKMNDADSTSVEAMYSVASQCLHEKKNKRPDIKKVQQLLQEMTAS

SEQ ID NO: 189498 - protein, 89 aa, Artificial Sequence
  derived and/or modified sequence
MNKPITPSTYVRCLNVGLIRKLSDFIDPQEGWKKLAVAIKKPSGDDRYNQFHIRRFEALLQTGKSPTSELLFDWGTTNCTVGDLVDLLI

SEQ ID NO: 189499 - DNA, 657 bp, Artificial Sequence
  derived and/or modified sequence
atgaacaagccgataactccttccacctacgtgaggtgcctcaacgtcgggctcattcgcaagctgtcagatttcattgacccacaggaaggctggaagaagctcgccgttgcaatcaaaaagccctccggtgacgaccggtacaatcagttccacatccgacggtttgaagccctgctacagactggcaagtcccccacctccgaacttttgtttgactggggcacaactaattgtactgtgggagacctggtagacctgttgatccagaacgaattctttgcacccgccagcctccttctgcctgacgcagttcctaagaccgccaacactctgccctcaaaagaagcaattacagtgcagcagaagcagatgcccttctgcgacaaggatcggactctcatgacacccgtccagaatctggagcagtcgtacatgccccccgattcatcatcccctgagaataaaagcctcgaagtatccgatacccgattccatagcttttctttctacgagctcaagaacgtgactaacaatttcgacgagcgacctatttccgtggggggcaataaaatgggcgaaggcggcttcggcgtcgtgtataagggatacgtcaacaataactgtgggtccgaggaggcctgttccaacgggtag

SEQ ID NO: 189500 - DNA, 1383 bp, Artificial Sequence
  derived and/or modified sequence
atgaataaacctatcacaccctcaacttatgtgcgctgcctcaacgtcggcctgatcagaaagctgagtgactttattgatccacaggaaggttggaagaaattggccgttgccattaagaagccatccggagatgatcggtacaaccagttccacataagaagattcgaggccctcctgcagacaggaaaaagccctaccagtgagctgttgttcgactgggggacaaccaactgcacagtgggcgacctggttgacttactcatacagaatgaattctttgccccagcctctttgttgcttcccgacgcagttccaaagaccgctaacacccttccttccaaggaagccattacagtgcaacagaagcaaatgcccttctgtgacaaagatcggacattgatgacacctgtgcagaacctcgagcagagctatatgccacccgatagcagcagccccgaaaataagagcctggaggtatccgatacgagatttcactcattctcattctacgaattgaagaatgtcacaaacaattttgatgagcggcctattagcgttggcggcaacaagatgggagagggcggattcggtgttgtatacaaaggatacgtgaataatactactgtggcggtaaagaagctcgccgccatggtagatatcacaaccgaagaacttaagcagcagttcgatcaggagatcaaagttatggcaaagtgtcagcacgaaaacctggtggagctactgggattctcctctgacggtgatgacctgtgtctggtttatgtctacatgccaaatggatctcttctggataggttatcgtgtcttgatggcacgccgccgttgtcatggcatatgaggtgtaaaattgcccagggcgcggccaatggcataaactttctccatgagaatcaccacatccatagagatattaagtctgccaacattctgctcgacgaggcatttacagctaaaatcagcgatttcgggctggcacgcgcatctgaaaagtttgcacagacagtgatgactagtagaattgtcggcacgaccgcctacatggcccctgaggctttaagaggtgagattacacctaagtccgatatctactcattcggcgttgtcttgctcgagattatcactggcctgccagctgtggatgagcatagagaacctcaactgctcctcgatatcaaagaggagatcgaagatgaagaaaagacaattgaagactatattgataaaaagatgaacgatgcagattctaccagcgtcgaggctatgtactctgtcgcctctcaatgcttgcacgaaaagaagaacaagaggccggacattaagaaggttcagcagctattgcaggagatgacagcttcatag

SEQ ID NO: 189501 - DNA, 270 bp, Artificial Sequence
  derived and/or modified sequence
atgaacaaaccaatcacaccctctacttatgtgcggtgcctcaatgtcgggcttattaggaagttatcagatttcatcgacccacaggagggatggaagaagctggccgtggcgatcaaaaagccatccggcgacgaccgatacaatcagtttcatattagacgcttcgaggcgttgctacagaccggaaagagcccgactagtgagctgctgttcgactggggcacgaccaactgtaccgtgggagacctggtggatctgctcatctag

SEQ ID NO: 189502 - DNA, 1383 bp, Artificial Sequence
  derived and/or modified sequence
atgaacaaacccataacaccaagtacctacgtaagatgcctgaacgtgggactgatcagaaaactgagcgacttcattgacccacaggagggctggaaaaaattggcggtggctataaagaagccatccggcgatgatcgctacaatcaatttcatataagaaggtttgaagcactattgcaaactggtaaatcaccaacttccgagctactcttcgactggggcaccactaactgtaccgtgggggacctggtagacttgctgattcaaaacgagttttttgcacctgcgtctctgctgctccccgatgctgtgcctaagacagctaatactctcccttccaaagaagctatcacggtgcagcagaagcagatgccattctgcgacaaagacaggaccctgatgacacctgtgcagaatttagaacagtcatacatgccaccggactcttcctctcccgagaataaatccctggaagtgagtgatactaggttccattcattttccttctacgagctgaaaaatgtgacaaataattttgatgagagacccatttccgtgggcgggaataaaatgggtgaaggaggttttggtgtggtgtacaagggctatgtcaataatacaacagtggctgtaaaaaagttagcagcaatggttgatattacgaccgaggaactgaagcagcagttcgatcaggaaattaaagtcatggcaaaatgtcagcacgagaaccttgttgagctgctgggtttcagtagcgacggcgacgatttatgcctggtgtacgtgtacatgccaaatggatcactgcttgacagactaagctgcttagatggcacacccccgttgagctggcatatgcgatgcaagatcgctcagggcgccgccaacggtatcaatttcctgcatgagaaccatcatattcaccgcgatattaagtccgcaaatatcctcctcgacgaggctttcaccgctaaaattagcgacttcggactcgctcgagccagtgagaaatttgctcagacagttatgactagccggatcgtcggcacaaccgcctacatggcccctgaggcactgcgaggagagatcacccccaaatccgatatatacagcttcggcgtggtcttgctggaaatcattacaggactgcccgccgtggatgagcatagggagccccagttactgctcgacattaaagaagagatcgaggatgaagagaagaccattgaagactatattgacaagaaaatgaatgatgcagattctactagcgtcgaagctatgtacagcgtggcatcccagtgcttgcatgagaagaagaacaaacgcccggatattaagaaggtccagcaactactccaagaaatgacggcatcctag

SEQ ID NO: 189503 - DNA, 1381 bp, Artificial Sequence
  derived and/or modified sequence
atgaacaaacccataacaccatcaacatatgtgcgctgcctcaatgttggactaattaggaagctgtcagattttattgatcctcaagaaggatggaagaagttagctgtagctattaaaaaaccatctggtgatgatagatacaatcagtttcacataaggagatttgaagcattacttcaaactggaaaaagtcccacttctgaattactgtttgactggggcaccacaaattgcacagttggtgatcttgtggatcttttgatccaaaatgaattttttgctcctgcgagtcttttgctcccagatgctgttcccaaaactgctaatacactaccttctaaagaagctataacagttcagcaaaaacagatgcctttctgtgacaaagacaggacattgatgacacctgtgcagaatcttgaacaaagctatatgccacctgactcctcaagtccagaaaataaaagtttagaagttagtgatacacgttttcacagtttttcattttatgaattgaagaatgtcacaaataactttgatgaacgacccatttctgttggtggtaataaaatgggagagggaggatttggagttgtatataaaggctacgtaaataacaactgtggcagtgaagaagcttgcagcaatggttgacattactactgaagaactgaaacagcagtttgatcaagaaataaaagtaatggcaaagtgtcaacatgaaaacttagtagaactacttggtttctcaagtgatggagatgacctctgcttagtatatgtttacatgcctaatggttcattgctagacagactctcttgcttggatggtactccaccactttcttggcacatgagatgcaagattgctcagggtgcagctaatggcatcaattttctacatgaaaatcatcatattcatagagatattaaaagtgcaaatatcttactggatgaagcttttactgctaaaatatctgactttggccttgcacgggcttctgagaagtttgcccagacagtcatgactagcagaattgtgggaacaacagcttatatggcaccagaagctttgcgtggagaaataacacccaaatctgatatttacagctttggtgtggttttactagaaataataactggacttccagctgtggatgaacaccgtgaacctcagttattgctagatattaaagaagaaattgaagatgaagaaaagacaattgaagattatattgataaaaagatgaatgatgctgattccacttcagttgaagctatgtactctgttgctagtcaatgtctgcatgaaaagaaaaataagagaccagacattaagaaggttcaacagctgctgcaagagatgacagcttcttaa

SEQ ID NO: 189504 - DNA, 4147 bp, Artificial Sequence
  derived and/or modified sequence
cccgccccttcgcggcgcttcctagttcggctggttcttctgtcgccggcttcagcagcccgcgcccgggcaggaatagaagatgaacaaacccataacaccatcaacatatgtgcgctgcctcaatgttggactaattaggaagctgtcagattttattgatcctcaagaaggatggaagaagttagctgtagctattaaaaaaccatctggtgatgatagatacaatcagtttcacataagatgctgttcccaaaactgctaatacactaccttctaaagaagctataacagttcagcaaaaacagatgcctttctgtgacaaagacaggacattgatgacacctgtgcagaatcttgaacaaagctatatgccacctgactcctcaagtccagaaaataaaagtttagaagttagtgatacacgttttcacagtttttcattttatgaattgaagaatgtcacaaataactttgatgaacgacccatttctgttggtggtaataaaatgggagagggaggatttggagttgtatataaaggctacgtaaataacacaactgtggcagtgaagaagcttgcagcaatggttgacattactactgaagaactgaaacagcagtttgatcaagaaataaaagtaatggcaaagtgtcaacatgaaaacttagtagaactacttggtttctcaagtgatggagatgacctctgcttagtatatgtttacatgcctaatggttcattgctagacagactctcttgcttggatggtactccaccactttcttggcacatgagatgcaagattgctcagggtgcagctaatggcatcaattttctacatgaaaatcatcatattcatagagatattaaaagtgcaaatatcttactggatgaagcttttactgctaaaatatctgactttggccttgcacgggcttctgagaagtttgcccagacagtcatgactagcagaattgtgggaacaacagcttatatggcaccagaagctttgcgtggagaaataacacccaaatctgatatttacagctttggtgtggttttactagaaataataactggacttccagctgtggatgaacaccgtgaacctcagttattgctagatattaaagaagaaattgaagatgaagaaaagacaattgaagattatattgataaaaagatgaatgatgctgattccacttcagttgaagctatgtactctgttgctagtcaatgtctgcatgaaaagaaaaataagagaccagacattaagaaggttcaacagctgctgcaagagatgacagcttcttaaaactttattggaaaagactcttgactttttatatacacctatctcaaccatttttttaactgatttttttcctaaatattcttctttacctttaacaaggcataggctgttgcaggacagtggttattaaagcatgggttgaacttccaaaatataaaaatagagccaccatatcaacacttagccctacccattagtatcacccccagttcttacagtaatccctgagaaatctccttcaagcatcaccaaacacagtttgaaaattacagggttagcaaaaagagcctgggctgtatgtagggtggaaacactctgatctgaagcccagctgactccactactaatttgctgtaaagctttggacatacacttagctgctgtgagccactaataacattgggctaatatctgctgtgcttctctgacaggtagtcatgaaaatcaaatgatgcaaaatatatacaagcactttgtaaattgtaaaatgatacaaaatttaaagtttatagagccagttacaaaatcctattagtcatatatttatagattgtgttcacagcaatcatttaaccacaaataaaatatcccttgatgatactgccataatgatatgtccattattagattatgttacatgacaaagttgaaggaatttggcagatgcagttaaggttcctaaacaactcactttgagactgttgaaagggcctgacctaatcaagtgaacccttgcaagaagaattctccttgtaagccttgaagaagtatgtgagagggccacattggctaaaacctaaaggtggcctctaggagatgagacctaccttccagttgtcagcaagcaggaaaaaaaaattgggacctcagttgcaaccacaaggaactgaattctgccaaaaatctgagtcagcttagaagagtactccaagcttcagatgataaccacagcctgggctgacacctggatttcagctttgcatgatcctcagtatgagaatctatctgttctgtgctggacttctaatatatagaactgtgagataatgggtcacattggctggatgtggtggctcatacctgtaaatcccagcactttgggaggccgaggcaggcagatcacctgaggtcaagagttcaagaccggcctggccaacatggtgaaaccccgtctctactaaaaatacaaaaattagacgagcgtggtggtggacacctgtagtcccagctacttgggaggctgaggcaggagactagctggaaccagggaggtagaggttgcagtgagctgagatcgtgccactgcactccagcctgggtgacagagtgagactccatcataaataaataaataaataaatgggtcacattaagcctttaagtttgtggtaatttattattcagtaatagaaaacaaatacagatactctcccatgatgtttttcccatgatgatttcccatgatatttacaggttttgcccacatttgaggggtatgtggaaattatacagagcatgtacagcgggaggcttatagtgtacgtactgaaatgtggggttggagccccaacacagagaccccagcaggacactgcctagtagagctatgggaagggtgctgccaccctccagacttgagaattgtagagccaccagcagcttgcactctgagcttggaaaagccacaggcactcaacttcaaccatgagggaagccacgcaccctgcaaagccacaggagtggagctgcccacggcctcgagggcccaccccttgcaccagtgtgccaggatgtgggacatggaatcaaggaatatgttagggcttttttttttttttttttgagacggagtcttgctctgttgcccaggctggagtgcagtggcacgatctcggctcactgcaagctctgcctcccaggttcacgccattcccctgcctcagcctccccagtagctgggactacaggtgcccgccaccatgcccagctaattttttttgtatttttagtagagatggggtttcactgtgttagccaggatggtcttgatctcctgacctcgtgatcacccgcctcggcctcccaaagtgccagtatttaaagtttaatgtcttcccagctgggtttcagacttgccaggatcctgttgcccctttctttagccaatttctcccttttgggacaagaatgttttacttattgcctgtaccaccaactgtatcttggaaataaataacttatattttatttcagaggctcataggcggcaggaacttaccttgagtctcaaatgagacttaggacttttgagtgatgctagaatgagttaagactttgggaagggatgattatattttgcaatgtgagaaagacattagatttggggggctgggggtagaatgacattgtttagatgtttgtctccttcaaatttcatgtttaaatgtaatccccagtgttgggggtggaggtggggcctgatgggaagtgtttgggtcatggtggatgatccctcatgaatggcttagagccactggtgatgagtgagttctcactcagttcgtgtgagatctggtggcttaaaagagtctgctccccctttgccttccattgtgattgtaaccttcctggggccttcatcaaaggccaggcaaatattggtgccgtgctagtatggcctgcagaaccgtaagccaaaacaaaccttttttctttataaattacccagcctcagttattcctttatagtgatgcaaaacgggctaactatataaatttgtaatttttaagttatagattgtttttattaaacacttatgaatactgtt

SEQ ID NO: 189505 - DNA, 1409 bp, Artificial Sequence
  derived and/or modified sequence
cccgccccttcgcggcgcttcctagttcggctggttcttctgtcgccggcttcagcagcccgcgcccgggcagatgctgttcccaaaactgctaatacactaccttctaaagaagctataacagttcagcaaaaacagatgcctttctgtgacaaagacaggacattgatgacacctgtgcagaatcttgaacaaagctatatgccacctgactcctcaagtccagaaaataaaagtttagaagttagtgatacacgttttcacagtttttcattttatgaattgaagaatgtcacaaataactttgatgaacgacccatttctgttggtggtaataaaatgggagagggaggatttggagttgtatataaaggctacgtaaataacacaactgtggcagtgaagaagcttgcagcaatggttgacattactactgaagaactgaaacagcagtttgatcaagaaataaaagtaatggcaaagtgtcaacatgaaaacttagtagaactacttggtttctcaagtgatggagatgacctctgcttagtatatgtttacatgcctaatggttcattgctagacagactctcttgcttggatggtactccaccactttcttggcacatgagatgcaagattgctcagggtgcagctaatggcatcaattttctacatgaaaatcatcatattcatagagatattaaaagtgcaaatatcttactggatgaagcttttactgctaaaatatctgactttggccttgcacgggcttctgagaagtttgcccagacagtcatgactagcagaattgtgggaacaacagcttatatggcaccagaagctttgcgtggagaaataacacccaaatctgatatttacagctttggtgtggttttactagaaataataactggacttccagctgtggatgaacaccgtgaacctcagttattgctagatattaaagaagaaattgaagatgaagaaaagacaattgaagattatattgataaaaagatgaatgatgctgattccacttcagttgaagctatgtactctgttgctagtcaatgtctgcatgaaaagaaaaataagagaccagacattaagaaggttcaacagctgctgcaagagatgacagcttcttaaaactttattggaaaagactcttgactttttatatacacctatctcaaccatttttttaactgatttttttcctaaatattcttctttacctttaacaaggcataggctgttgcaggacagtggttattaaagcatgggttgaacttccaaaatataaaaatagagccaccatatcaacacttagccctacccattagtatcacccccagttcttacagtaatccctgagaaatctccttcaagcatcaccaaacacagtt

SEQ ID NO: 189506 - DNA, 2835 bp, Artificial Sequence
  derived and/or modified sequence
gcggcgcttcctagttcggctggttcttctgtcgccggcttcagcagcccgcgcccgggcaggaatagaagatgaacaaacccataacaccatcaacatatgtgcgctgcctcaatgttggactaattaggaagctgtcagattttattgatcctcaagaaggatggaagaagttagctgtagctattaaaaaaccatctggtgatgatagatacaatcagtttcacataaggagatttgaagcattacttcaaactggaaaaagtcccacttctgaattactgtttgactggggcaccacaaattgcacagttggtgatcttgtggatcttttgatccaaaatgaattttttgctcctgcgagtcttttgctcccagatgctgttcccaaaactgctaatacactaccttctaaagaagctataacagttcagcaaaaacagatgcctttctgtgacaaagacaggacattgatgacacctgtgcagaatcttgaacaaagctatatgccacctgactcctcaagtccagaaaataaaagtttagaagttagtgatacacgttttcacagtttttcattttatgaattgaagaatgtcacaaataactttgatgaacgacccatttctgttggtggtaataaaatgggagagggaggatttggagttgtatataaaggctacgtaaataacacaactgtggcagtgaagaagcttgcagcaatggttgacattactactgaagaactgaaacagcagtttgatcaagaaataaaagtaatggcaaagtgtcaacatgaaaacttagtagaactacttggtttctcaagtgatggagatgacctctgcttagtatatgtttacatgcctaatggttcattgctagacagactctcttgcttggatggtactccaccactttcttggcacatgagatgcaagattgctcagggtgcagctaatggcatcaattttctacatgaaaatcatcatattcatagagatattaaaagtgcaaatatcttactggatgaagcttttactgctaaaatatctgactttggccttgcacgggcttctgagaagtttgcccagacagtcatgactagcagaattgtgggaacaacagcttatatggcaccagaagctttgcgtggagaaataacacccaaatctgatatttacagctttggtgtggttttactagaaataataactggacttccagctgtggatgaacaccgtgaacctcagttattgctagatattaaagaagaaattgaagatgaagaaaagacaattgaagattatattgataaaaagatgaatgatgctgattccacttcagttgaagctatgtactctgttgctagtcaatgtctgcatgaaaagaaaaataagagaccagacattaagaaggttcaacagctgctgcaagagatgacagcttcttaaaactttattggaaaagactcttgactttttatatacacctatctcaaccatttttttaactgatttttttcctaaatattcttctttacctttaacaaggcataggctgttgcaggacagtggttattaaagcatgggttgaacttccaaaatataaaaatagagccaccatatcaacacttagccctacccattagtatcacccccagttcttacagtaatccctgagaaatctccttcaagcatcaccaaacacagtttgaaaattacagggttagcaaaaagagcctgggctgtatgtagggtggaaacactctgatctgaagcccagctgactccactactaatttgctgtaaagctttggacatacacttagctgctgtgagccactaataacattgggctaatatctgctgtgcttctctgacaggtagtcatgaaaatcaaatgatgcaaaatatatacaagcactttgtaaattgtaaaatgatacaaaatttaaagtttatagagccagttacaaaatcctattagtcatatatttatagattgtgttcacagcaatcatttaaccacaaataaaatatcccttgatgatactgccataatgatatgtccattattagattatgttacatgacaaagttgaaggaatttggcagatgcagttaaggttcctaaacaactcactttgagactgttgaaagggcctgacctaatcaagtgaacccttgcaagaagaattctccttgtaagccttgaagaagtatgtgagagggccacattggctaaaacctaaaggtggcctctaggagatgagacctaccttccagttgtcagcaagcaggaaaaaaaaattgggacctcagttgcaaccacaaggaactgaattctgccaaaaatctgagtcagcttagaagagtactccaagcttcagatgataaccacagcctgggctgacacctggatttcagctttgcatgatcctcagtatgagaatctatctgttctgtgctggacttctaatatatagaactgtgagataatgggtcacattggctggatgtggtggctcatacctgtaaatcccagcactttgggaggccgaggcaggcagatcacctgaggtcaagagttcaagaccggcctggccaacatggtgaaaccccgtctctactaaaaatacaaaaattagacgagcgtggtggtggacacctgtagtcccagctacttgggaggctgaggcaggagactagctggaaccagggaggtagaggttgcagtgagctgagatcgtgccactgcactccagcctgggtgacagagtgagactccatcataaataaataaataaataaatgggtcacattaagcctttaa

SEQ ID NO: 189507 - DNA, 547 bp, Artificial Sequence
  derived and/or modified sequence
ccttcgcggcgcttcctagttcggctggttcttctgtcgccggcttcagcagcccgcgcccgggcaggggcctggagcagtatctagcacaaagtagacactcagtaaatatttgctggattttcttcatatacatcaaccaaaacaacatgctgcagtgggttgagtgcagaagcagatacaagaattcagctctcttctattaagttaaatattgaagagattagcaaaactttaaaacaatgttgttcttctgtttttgaggaaaaggaatagaagatgaacaaacccataacaccatcaacatatgtgcgctgcctcaatgttggactaattaggaagctgtcagattttattgatcctcaagaaggatggaagaagttagctgtagctattaaaaaaccatctggtgatgatagatacaatcagtttcacataaggagatttgaagcattacttcaaactggaaaaagtcccacttctgaattactgtttgactggggcaccacaaattgcacagttggtgatcttgtggatcttttgatcc

SEQ ID NO: 189508 - DNA, 1684 bp, Artificial Sequence
  derived and/or modified sequence
cttcctagttcggctggttcttctgtcgccggcttcagcagcccgcgcccgggcaggggcctggagcagtatctagcacaaagtagacactcagtaaatatttggaatagaagatgaacaaacccataacaccatcaacatatgtgcgctgcctcaatgttggactaattaggaagctgtcagattttattgatcctcaagaaggatggaagaagttagctgtagctattaaaaaaccatctggtgatgatagatacaatcagtttcacataaggagatttgaagcattacttcaaactggaaaaagtcccacttctgaattactgtttgactggggcaccacaaattgcacagttggtgatcttgtggatcttttgatccaaaatgaattttttgctcctgcgagtcttttgctcccagatgctgttcccaaaactgctaatacactaccttctaaagaagctataacagttcagcaaaaacagatgcctttctgtgacaaagacaggacattgatgacacctgtgcagaatcttgaacaaagctatatgccacctgactcctcaagtccagaaaataaaagtttagaagttagtgatacacgttttcacagtttttcattttatgaattgaagaatgtcacaaataactttgatgaacgacccatttctgttggtggtaataaaatgggagagggaggatttggagttgtatataaaggctacgtaaataacacaactgtggcagtgaagaagcttgcagcaatggttgacattactactgaagaactgaaacagcagtttgatcaagaaataaaagtaatggcaaagtgtcaacatgaaaacttagtagaactacttggtttctcaagtgatggagatgacctctgcttagtatatgtttacatgcctaatggttcattgctagacagactctcttgcttggatggtactccaccactttcttggcacatgagatgcaagattgctcagggtgcagctaatggcatcaattttctacatgaaaatcatcatattcatagagatattaaaagtgcaaatatcttactggatgaagcttttactgctaaaatatctgactttggccttgcacgggcttctgagaagtttgcccagacagtcatgactagcagaattgtgggaacaacagcttatatggcaccagaagctttgcgtggagaaataacacccaaatctgatatttacagctttggtgtggttttactagaaataataactggacttccagctgtggatgaacaccgtgaacctcagttattgctagatattaaagaagaaattgaagatgaagaaaagacaattgaagattatattgataaaaagatgaatgatgctgattccacttcagttgaagctatgtactctgttgctagtcaatgtctgcatgaaaagaaaaataagagaccagacattaagaaggttcaacagctgctgcaagagatgacagcttcttaaaactttattggaaaagactcttgactttttatatacacctatctcaaccatttttttaactgatttttttcctaaatattcttctttacctttaacaaggcataggctgttgcaggacagtggttattaaagcatgggttgaacttccaaaatataaaaatagagccaccatatcaacacttagccct

SEQ ID NO: 189509 - DNA, 657 bp, Artificial Sequence
  derived and/or modified sequence
atgaacaagcccatcacccccagcacctacgtgcgctgcctgaatgtgggcctcatcaggaagctgagtgacttcatcgacccccaggagggctggaagaagctggccgtggccatcaagaagcccagcggagatgaccgctacaaccagttccacatccgccgctttgaggccctgctgcagacaggcaagagccccaccagcgagctgctgtttgactggggcaccaccaactgcaccgtgggggacctggtggacctgctgatccagaatgagttctttgccccagccagcctgctgctgcctgatgctgtgcccaagacagccaacaccctgcccagcaaggaggccatcaccgtgcagcagaagcagatgcccttctgtgacaaggacaggaccctgatgacccctgtgcagaacctggagcagagctacatgcccccagacagcagcagccctgagaacaagagcctggaggtgtctgacacccgcttccacagcttctccttctatgagctgaagaatgtgaccaacaactttgatgagcggcccatctctgtgggcggcaacaagatgggagagggcggctttggagtggtgtacaagggctacgtgaacaacaactgtggcagcgaggaggcctgcagcaatggatag

SEQ ID NO: 189510 - DNA, 1383 bp, Artificial Sequence
  derived and/or modified sequence
atgaacaagcccatcacccccagcacctacgtgcgctgcctgaatgtgggcctcatcaggaagctgagtgacttcatcgacccccaggagggctggaagaagctggccgtggccatcaagaagcccagcggagatgaccgctacaaccagttccacatccgccgctttgaggccctgctgcagacaggcaagagccccaccagcgagctgctgtttgactggggcaccaccaactgcaccgtgggggacctggtggacctgctgatccagaatgagttctttgccccagccagcctgctgctgcctgatgctgtgcccaagacagccaacaccctgcccagcaaggaggccatcaccgtgcagcagaagcagatgcccttctgtgacaaggacaggaccctgatgacccctgtgcagaacctggagcagagctacatgcccccagacagcagcagccctgagaacaagagcctggaggtgtctgacacccgcttccacagcttctccttctatgagctgaagaatgtgaccaacaactttgatgagcggcccatctctgtgggcggcaacaagatgggagagggcggctttggagtggtgtacaagggctacgtgaacaacaccaccgtggccgtgaagaagctggccgccatggtggacatcaccacagaggagctgaagcagcagtttgaccaggagatcaaggtgatggccaagtgccagcacgagaacctggtggagctgctgggcttcagcagtgatggagatgacctgtgcctggtgtatgtgtacatgcccaacggcagcctgctggaccggctgagctgcctggatggcaccccacccctgtcctggcacatgcgctgcaagatcgcccagggcgccgccaacggcatcaacttcctgcacgagaaccaccacatccaccgggacatcaagagcgccaacatcctgctggatgaggccttcaccgccaagatcagtgactttggcctggcccgggccagcgagaagtttgcccagacagtgatgaccagccgcatcgtgggcaccacagcctacatggcccctgaggccctgcggggggagatcacccccaagagtgacatctacagctttggagtggtgctgctggagatcatcaccggcctgcctgctgtggatgagcaccgggagccccagctgctgctggacatcaaggaggagattgaagatgaggagaagaccatcgaggactacatcgacaagaagatgaatgatgctgacagcacctctgtggaggccatgtacagcgtggccagccagtgcctgcacgagaagaagaacaagaggccagacatcaagaaggtgcagcagctgctgcaggagatgacagccagctag

SEQ ID NO: 189511 - DNA, 270 bp, Artificial Sequence
  derived and/or modified sequence
atgaacaagcccatcacccccagcacctacgtgcgctgcctgaatgtgggcctcatcaggaagctgagtgacttcatcgacccccaggagggctggaagaagctggccgtggccatcaagaagcccagcggagatgaccgctacaaccagttccacatccgccgctttgaggccctgctgcagacaggcaagagccccaccagcgagctgctgtttgactggggcaccaccaactgcaccgtgggggacctggtggacctgctgatctag

SEQ ID NO: 189512 - DNA, 657 bp, Artificial Sequence
  derived and/or modified sequence
atgaacaagcccatcacccccagcacctacgtgcggtgcctgaacgtgggactcattagaaagctgtcggacttcattgatccccaagagggatggaagaaattggcggttgccatcaaaaaaccttccggggatgatcggtataaccaattccatattcgtagattcgaagcgttgcttcagacaggaaagtcacccacaagcgagctgctgttcgactgggggactacaaattgcacagttggagacctggttgacctgctgatccagaatgagttcttcgcgccagcttctctcctgctcccagacgcagttccaaagacagccaacactctcccctcaaaggaagcaatcactgtgcagcagaaacagatgcctttctgtgataaggacaggacgctcatgacccctgtccagaatctagagcagtcgtatatgcctccagactcaagtagccctgagaataaatctttggaagtcagcgacacaaggtttcattctttcagcttttacgaactgaaaaacgttaccaacaactttgacgagcgccccatttccgtcggcggaaataaaatgggcgagggcggatttggcgtagtgtacaaaggctacgtgaataataactgtggctccgaagaagcttgctctaacgggtag

SEQ ID NO: 189513 - DNA, 1383 bp, Artificial Sequence
  derived and/or modified sequence
atgaacaagcccatcacccccagcacctacgtgcggtgcctgaacgtgggtcttatcagaaaactgtccgacttcatcgatcctcaagagggttggaagaaattggcagtggccattaagaagccatccggagacgaccggtacaaccaattccatattcggaggttcgaagcacttctgcaaacagggaagtctccaacttctgaattactcttcgactgggggacgacgaattgcaccgtcggggaccttgtcgacttgcttatccaaaacgagtttttcgcgcctgctagcctgttgctgccagacgcagtccctaaaactgctaatacccttccttccaaggaagctattacagtccaacagaagcaaatgcccttttgcgataaagatcgtactctcatgactcctgttcaaaacctggaacagagctatatgccacccgacagttctagccctgagaacaagtccctggaagtgagcgatacgcgttttcatagcttttctttctatgaacttaagaacgtgacaaacaacttcgatgagcgcccgatctcagttggcggaaataaaatgggagaaggtggcttcggggtggtttacaaaggatacgttaataacactaccgtggctgtgaagaagctcgccgcaatggtggacattacaaccgaggagctcaagcaacagttcgaccaagaaatcaaagtgatggcaaaatgtcagcacgaaaacttagtggagctgctgggattcagttccgatggtgacgatttatgtctcgtctatgtttacatgcccaatggaagtcttctggacagactatcatgcttagacgggaccccaccactgtcatggcacatgcgatgtaagattgctcaaggggcggcaaacggcattaatttccttcatgaaaatcaccatatccaccgagacataaagtcggccaatatcctgctcgatgaagcttttactgctaaaataagtgactttggcctggcccgagcgtcagagaaatttgctcagacagtcatgacatctagaatagttgggaccaccgcctacatggcccccgaggctttaagaggcgagatcacccctaaatctgacatatactctttcggagtggtcctcttagagatcatcacaggactccctgccgtggatgagcaccgggaacctcagctcctcctggatataaaggaagaaatcgaagacgaggaaaagaccatcgaggattacattgacaaaaaaatgaacgatgctgattctaccagtgtcgaggcaatgtactctgtcgcctcgcagtgcctccacgaaaaaaagaacaagagaccggatattaaaaaggtgcaacaactgttacaagaaatgactgcaagttag

SEQ ID NO: 189514 - DNA, 270 bp, Artificial Sequence
  derived and/or modified sequence
atgaacaagcccatcacccccagcacctacgtgcggtgcctgaacgtcgggctgattcgcaaactgtccgactttattgacccgcaagaaggttggaagaaattagcagttgcgataaaaaagccctccggagacgaccgatataaccaatttcatatcagacgctttgaggccctgttgcagacagggaagagccccacatctgagcttctctttgattggggaactaccaactgcactgtgggcgacctcgtggatctgctgatttag

SEQ ID NO: 189515 - DNA, 1383 bp, Artificial Sequence
  derived and/or modified sequence
atgaacaagcccatcacccccagcacctacgtgcggtgcctgaacgtggggcttattaggaaactgtcggatttcattgatccccaggagggttggaagaaactcgcagtagccatcaaaaagccctcaggcgacgatagatataaccagttccacattcggcgctttgaagccctgctccagaccggcaaatctcccacttccgaattgcttttcgattggggaaccactaactgcacggttggggacctcgttgacttgctgatccaaaacgagtttttcgcaccagcatctctgttgttgcccgatgctgtccccaaaaccgcgaatactctcccatccaaagaggccatcacagtccaacagaagcagatgcccttctgcgacaaagataggacccttatgactcccgttcaaaaccttgagcagtcttacatgccgcccgatagctcctctccagaaaacaagagcctcgaagtgtccgatacccggtttcactccttcagtttctatgagttgaaaaatgtcactaataacttcgatgagaggcccatcagcgtcgggggcaacaagatgggagaggggggctttggtgtggtgtacaaaggctatgtgaacaacaccaccgtagctgtcaaaaagctagccgcgatggtggatattacgacagaagaactgaagcagcagtttgatcaagaaattaaggttatggcaaagtgccagcacgagaacttggttgaattattgggcttctcttcagatggtgatgacttatgccttgtctacgtgtatatgcccaatgggagtttgctcgaccgtttaagttgcctggacggtacgccaccgctgtcctggcatatgagatgcaagatcgctcagggtgccgccaatggaatcaactttttgcacgaaaaccaccacattcacagagacataaagtccgccaatatcctgttggatgaggcgttcacagccaaaattagcgatttcgggctggcgagagcgagtgagaaattcgctcagactgtcatgactagcagaattgtgggcacaactgcgtatatggcgccagaagcgctgcggggcgagatcacccccaagagcgatatctattcctttggcgtcgtcctccttgaaatcattacaggcttgcccgcggtggacgaacaccgtgagcctcaacttctcctcgacattaaggaggagatagaagacgaggaaaagaccatcgaggattacatagacaagaagatgaacgatgctgactccactagcgtggaagccatgtacagcgtcgcttctcagtgtctacacgaaaaaaaaaataagagaccggacattaagaaagtccagcaattactgcaagaaatgactgcgagttag

SEQ ID NO: 189516 - DNA, 657 bp, Artificial Sequence
  derived and/or modified sequence
atgaacaaacccattaccccaagcacctacgtgaggtgcctgaacgtgggactcatccgcaagctgtctgatttcatcgatccacaggaagggtggaaaaaattggctgtagctattaagaaacccagcggcgatgaccgctataatcagttccacatcagacgatttgaggccttgttacagacaggaaagagccctacctctgagctgctgtttgattgggggaccaccaattgtacggtgggggacctcgtggatctgctgattcagaatgagttcttcgctccagcaagtctgttgctgccagatgcagtcccaaagactgccaatactctgccgagtaaagaagccattacggtacagcagaagcaaatgcctttttgcgacaaggaccgcactctgatgacaccggtacaaaacctggaacaatcctatatgccccctgattccagttcccccgagaacaaaagcttggaagtgtccgatacaagatttcacagcttcagtttttacgaactaaagaatgtcacgaataactttgatgagagacccatctcagttggaggaaacaaaatgggcgagggaggcttcggagttgtatataagggctatgtcaataacaactgtgggtccgaggaggcatgctccaacggatag

SEQ ID NO: 189517 - DNA, 1383 bp, Artificial Sequence
  derived and/or modified sequence
atgaataaacctatcaccccctctacatacgtgcgttgccttaatgtcggcctgatcaggaagctttccgactttattgacccgcaggagggctggaagaagctggcggtagctattaaaaaaccatcaggtgatgaccggtataaccagtttcacatccggaggtttgaggctctcttgcagactggcaaatccccaaccagcgagctcctgttcgactgggggaccaccaattgcactgttggtgacctggttgacctactgattcaaaatgaattcttcgctcctgcctctctcctcttacccgacgcagtgccaaagactgctaacactctgccctccaaagaggctatcaccgtccaacaaaagcagatgccattctgcgataaagaccggacattgatgaccccagtgcaaaatctggagcagtcgtatatgcctcctgacagttcctctcccgaaaataagagcctcgaagtgtcagatacccgttttcattccttctccttctatgagttgaagaatgtaactaacaactttgatgaaaggcctatatcggtaggtgggaacaaaatgggggaagggggatttggagtggtctacaaaggctatgttaataatacgacagtcgcagtcaagaaattagccgcaatggtcgatatcacgactgaagaacttaagcagcagttcgatcaagaaataaaggtcatggctaagtgccagcacgagaatcttgtagagttgctcggcttttcaagtgatggtgacgatctatgccttgtgtatgtctacatgcccaacggatctctactggatcgcctgagctgcctggatggaacacccccactgagttggcacatgcggtgtaagattgcccagggagccgctaatggaattaattttctccacgagaatcaccacatccatcgtgacattaagagtgcgaacatccttctggacgaggcgtttacagcaaagatcagcgacttcggcttggcaagagcctccgagaagttcgcccagacagttatgacctcccgcattgtaggtacgactgcttatatggcacccgaggcactccgaggagaaattactccaaaatcggacatatacagcttcggtgttgtgctgctcgagattataaccggcctcccggctgtagatgaacacagggagccgcagctgcttctggatataaaagaggaaatcgaggacgaagagaaaaccatcgaagactacatcgataagaagatgaacgatgccgattctactagcgttgaagctatgtattccgtagccagccagtgtctgcatgaaaagaagaacaaaaggcccgacattaagaaggtccagcagctgttacaggagatgaccgcctcatag

SEQ ID NO: 189518 - DNA, 270 bp, Artificial Sequence
  derived and/or modified sequence
atgaacaagcccatcacacctagcacttacgtgaggtgtctgaatgtcgggctgattcgcaaattatccgacttcatcgaccctcaggaaggttggaagaagctggccgtggccattaagaagccaagcggcgatgataggtacaatcaattccacatacggcgatttgaggctcttttgcagaccgggaagagtccaacgtccgagttgctgtttgactggggtacaaccaattgcaccgtaggtgatctggtggatctccttatttag

SEQ ID NO: 189519 - DNA, 1383 bp, Artificial Sequence
  derived and/or modified sequence
atgaataagccaattaccccttctacttatgtgagatgtctgaacgtcgggctcatcaggaagctgtcagacttcattgatccgcaggagggctggaaaaagttggccgtggccatcaagaagccaagcggggacgaccgctacaatcagttccatatccggcgttttgaggcactcctgcagacaggtaagagtcctacttccgaactattattcgattggggcaccactaactgcacagtgggtgaccttgtggaccttctgattcaaaatgagttttttgcccctgctagcctcctgctacccgacgccgtgcctaagactgccaatacactgcccagcaaggaagcaatcactgttcagcagaagcagatgccattctgcgataaagacagaacgcttatgacacccgtacagaatctggagcagagctacatgccacctgacagttcctctcccgagaacaagagtctggaagtgtctgacactcgctttcactcattttccttctatgagctgaagaacgtcaccaacaattttgatgaaaggccgatcagcgtcgggggtaataagatgggtgaaggaggtttcggagttgtctacaaaggatacgtaaataatactaccgtggctgttaagaagctggcggcaatggtcgatattaccaccgaagaactgaagcaacagtttgaccaagaaattaaagtgatggctaagtgtcagcatgaaaacttggtggagctgctgggattctcttccgacggtgatgatttgtgtctggtgtatgtctatatgcctaatggttctcttcttgaccggttgtcttgtctagacggaacccctccgctctcctggcatatgagatgtaaaattgcacagggagccgcaaacggcatcaacttcctgcacgagaatcaccatatccatcgcgacatcaaatcagccaacatcctgctggatgaggcatttacagcgaaaatttccgacttcggacttgcgcgtgcctctgagaaattcgcccagaccgtgatgaccagcagaatcgtggggactacagcgtatatggcacctgaggcgctgcggggagaaatcacccctaaatccgatatttattcatttggagtggtactgctcgagatcatcactggactgccagccgttgacgagcatcgggaaccgcaactcctgctcgacattaaagaggaaattgaagacgaagagaagaccatcgaggactacatcgacaaaaagatgaatgacgccgactctacaagcgtggaggccatgtacagcgtcgcttcccagtgcctgcacgagaagaagaataaacgccctgacataaagaaggtccagcagctgctgcaagaaatgacagcgtcgtag

SEQ ID NO: 189520 - DNA, 657 bp, Artificial Sequence
  derived and/or modified sequence
atgaacaagcccatcacccccagcacctacgtgagatgcctgaacgtgggcctgatcagaaagctgagcgacttcatcgacccccaggagggctggaagaagctggccgtggccatcaagaagcccagcggcgacgacagatacaaccagttccacatcagaagattcgaggccctgctgcagaccggcaagagccccaccagcgagctgctgttcgactggggcaccaccaactgcaccgtgggcgacctggtggacctgctgatccagaacgagttcttcgcccccgccagcctgctgctgcccgacgccgtgcccaagaccgccaacaccctgcccagcaaggaggccatcaccgtgcagcagaagcagatgcccttctgcgacaaggacagaaccctgatgacccccgtgcagaacctggagcagagctacatgccccccgacagcagcagccccgagaacaagagcctggaggtgagcgacaccagattccacagcttcagcttctacgagctgaagaacgtgaccaacaacttcgacgagagacccatcagcgtgggcggcaacaagatgggcgagggcggcttcggcgtggtgtacaagggctacgtgaacaacaactgcggcagcgaggaggcctgcagcaacggctag

SEQ ID NO: 189521 - DNA, 1383 bp, Artificial Sequence
  derived and/or modified sequence
atgaacaagcccatcacccccagcacctacgtgagatgcctgaacgtgggcctgatcagaaagctgagcgacttcatcgacccccaggagggctggaagaagctggccgtggccatcaagaagcccagcggcgacgacagatacaaccagttccacatcagaagattcgaggccctgctgcagaccggcaagagccccaccagcgagctgctgttcgactggggcaccaccaactgcaccgtgggcgacctggtggacctgctgatccagaacgagttcttcgcccccgccagcctgctgctgcccgacgccgtgcccaagaccgccaacaccctgcccagcaaggaggccatcaccgtgcagcagaagcagatgcccttctgcgacaaggacagaaccctgatgacccccgtgcagaacctggagcagagctacatgccccccgacagcagcagccccgagaacaagagcctggaggtgagcgacaccagattccacagcttcagcttctacgagctgaagaacgtgaccaacaacttcgacgagagacccatcagcgtgggcggcaacaagatgggcgagggcggcttcggcgtggtgtacaagggctacgtgaacaacaccaccgtggccgtgaagaagctggccgccatggtggacatcaccaccgaggagctgaagcagcagttcgaccaggagatcaaggtgatggccaagtgccagcacgagaacctggtggagctgctgggcttcagcagcgacggcgacgacctgtgcctggtgtacgtgtacatgcccaacggcagcctgctggacagactgagctgcctggacggcaccccccccctgagctggcacatgagatgcaagatcgcccagggcgccgccaacggcatcaacttcctgcacgagaaccaccacatccacagagacatcaagagcgccaacatcctgctggacgaggccttcaccgccaagatcagcgacttcggcctggccagagccagcgagaagttcgcccagaccgtgatgaccagcagaatcgtgggcaccaccgcctacatggcccccgaggccctgagaggcgagatcacccccaagagcgacatctacagcttcggcgtggtgctgctggagatcatcaccggcctgcccgccgtggacgagcacagagagccccagctgctgctggacatcaaggaggagatcgaggacgaggagaagaccatcgaggactacatcgacaagaagatgaacgacgccgacagcaccagcgtggaggccatgtacagcgtggccagccagtgcctgcacgagaagaagaacaagagacccgacatcaagaaggtgcagcagctgctgcaggagatgaccgccagctag

SEQ ID NO: 189522 - DNA, 270 bp, Artificial Sequence
  derived and/or modified sequence
atgaacaagcccatcacccccagcacctacgtgagatgcctgaacgtgggcctgatcagaaagctgagcgacttcatcgacccccaggagggctggaagaagctggccgtggccatcaagaagcccagcggcgacgacagatacaaccagttccacatcagaagattcgaggccctgctgcagaccggcaagagccccaccagcgagctgctgttcgactggggcaccaccaactgcaccgtgggcgacctggtggacctgctgatctag

SEQ ID NO: 189523 - protein, 406 aa, Artificial Sequence
  derived and/or modified sequence
MAAAVRQDLAQLMNSSGSHKDLAGKYRQILEKAIQLSGAEQLEALKAFVEAMVNENVSLVISRQLLTDFCTHLPNLPDSTAKEIYHFTLEKIQPRVISFEEQVASIRQHLASIYEKEEDWRNAAQVLVGIPLETGQKQYNVDYKLETYLKIARLYLEDDDPVQAEAYINRASLLQNESTNEQLQIHYKVCYARVLDYRRKFIEAAQRYNELSYKTIVHESERLEALKHALHCTILASAGQQRSRMLATLFKDERCQQLAAYGILEKMYLDRIIRGNQLQEFAAMLMPHQKATTADGSSILDRAVIEHNLLSASKLYNNITFEELGALLEIPAAKAEKIASQMITEGRMNGFIDQIDGIVHFETREALPTWDKQIQSLCFQVNNLLEKISQTAPEWTAQAMEAQMAQ

SEQ ID NO: 189524 - DNA, 1221 bp, Artificial Sequence
  derived and/or modified sequence
atggctgctgctgtgcggcaggacctggctcagctgatgaattcctctggcagccataaggacctcgcgggaaagtaccgacagatcctggagaaggctatacaactgtccggagcagaacagctagaggcgcttaaggcatttgtagaagcaatggtgaacgaaaacgtgtccctggtcatttcaaggcagctactcaccgacttttgtacccacctgcctaaccttcccgacagcaccgccaaggagatttaccacttcacgctcgagaaaattcagcctcgcgtgatatctttcgaagagcaagtggcttccatccgacaacatcttgcctcaatttatgaaaaggaggaggattggagaaacgccgctcaggtgttagtcggaatccccctggagaccggtcagaagcagtacaacgtcgattacaagttagaaacctacttgaagattgcccggttgtatcttgaggatgacgaccctgtacaggccgaggcctatatcaaccgcgcctcgctgctgcagaacgagtccactaacgagcagttacagatccattataaggtctgttatgcccgggtcctcgattataggcggaaattcattgaggcggcccaacgttacaatgagctatcatacaaaacgatcgtgcatgagtccgagagacttgaggcattaaaacatgcgttgcactgtaccattctggcaagcgccgggcagcaaagatcgcggatgctggcgaccctttttaaggatgaacggtgtcagcagctcgctgcttacggcatactggaaaaaatgtatctggataggatcatacgggggaatcagcttcaagaatttgcagccatgcttatgcctcaccagaaggctacaactgcagatgggagctcaatactggatcgagccgtgatcgaacacaacctgctatctgcctccaaactctacaacaacattacatttgaggaactcggcgccttactggaaataccggctgctaaggccgagaagatcgccagtcagatgataacagagggccgcatgaatggatttatcgatcagatagacggtattgtgcacttcgagacacgcgaggctttacctacctgggataagcagattcagtcgctgtgttttcaggtcaacaacctcctggaaaagatctcacaaactgcccctgagtggaccgcacaagcgatggaagcccagatggcacagtag

SEQ ID NO: 189525 - DNA, 1221 bp, Artificial Sequence
  derived and/or modified sequence
atggctgctgctgtgcggcaggacctggcccagctgatgaacagcagcggcagccacaaggacctggccggcaagtaccggcagatcctggagaaggccatccagctgtctggagctgagcagctggaggccctgaaggcctttgtggaggccatggtgaatgaaaatgtgtccctggtgatcagccggcagctgctgacagacttctgcacccacctgcccaacctgcctgacagcacagccaaggagatctaccacttcaccctggagaagatccagcccagggtcatcagctttgaggagcaggtggccagcatccggcagcacctggccagcatctatgagaaggaggaggactggagaaatgctgcccaggtgctggtgggcatccccctggagaccggccagaagcagtacaacgtggactacaagctggagacctacctgaagatcgcccggctgtacctggaggatgatgatcctgtgcaggccgaggcctacatcaacagagccagcctgctgcagaatgaaagcaccaatgagcagctgcagatccactacaaggtgtgctacgcccgggtgctggactacagaaggaagttcatcgaggccgcccagcgctacaatgagctgagctacaagaccatcgtgcatgagagcgagcggctggaggccctgaagcacgccctgcactgcaccatcctggccagcgctggccagcagaggagcaggatgctggccaccctcttcaaggatgagcgctgccagcagctggccgcctacggcatcctggagaagatgtacctggaccgcatcatccggggcaaccagctgcaggagtttgctgccatgctgatgccccaccagaaggccaccacagcagatggcagcagcatcctggacagagctgtgattgagcacaacctgctgagcgccagcaagctgtacaacaacatcacctttgaggagctgggcgccctgctggagatcccagctgccaaggccgagaagatcgccagccagatgatcacagagggccgcatgaatggcttcatcgaccagattgatggcatcgtgcactttgagacccgggaggccctgcccacctgggacaagcagatccagagcctgtgcttccaggtgaacaacctgctggagaagatcagccagacagcccctgagtggacagcccaggccatggaggcccagatggcccagtag

SEQ ID NO: 189526 - DNA, 1221 bp, Artificial Sequence
  derived and/or modified sequence
atggccgccgccgtgcggcaggacctggcccagctgatgaacagctctggttcccataaggatctggcgggtaagtaccgacaaatactcgaaaaggctattcagctcagcggtgctgaacagttggaggcccttaaggcattcgtggaggccatggtcaacgagaatgtatcattggtgatcagcagacagttgctcactgatttctgtacccacctccctaacctcccagacagcaccgccaaggagatatatcactttactctggagaagattcagcctagggttatctcttttgaggaacaggtagcctcgatcagacagcacctggcgtcaatctatgagaaagaggaagactggcgaaacgccgcccaggtgcttgttggaattccgctcgagaccggccagaagcagtataacgtggactataaactggagacgtacttaaagatcgccaggttatacttggaagacgatgaccctgtgcaggcggaggcctacatcaatcgggcctcactgctgcagaatgaatctactaacgaacagctgcagatccactacaaggtgtgttatgcacgggtcttagactatagaaggaagtttattgaggccgcccagcgatacaacgaactgtcgtacaagactatcgttcatgagtctgaaaggttggaggccctcaaacatgctttacactgtaccatactagccagtgccggccagcaacgctccaggatgttagccaccctcttcaaagacgagagatgccagcaattagcagcgtatgggatcttagagaagatgtacctcgaccggatcatccgcgggaatcaactgcaagagtttgccgctatgctgatgccacaccagaaagccactactgcagatggttcatccatcctggatcgggcagtgattgagcacaatctgctgtccgcttccaagctctacaacaatattacgtttgaagagctgggggcgttgctggaaattcctgcggccaaggcagagaaaattgctagccagatgataacagaggggagaatgaatggatttatcgatcagatagatggcatagtccacttcgagacccgggaagcactgccgacatgggataagcaaatacagtctctgtgctttcaggtaaataacctcctcgagaaaatcagtcagacggcccccgaatggacagcccaggcaatggaggcccagatggcccagtag

SEQ ID NO: 189527 - DNA, 1221 bp, Artificial Sequence
  derived and/or modified sequence
atggcggcagctgttcggcaggatctggcacaactgatgaactcatcagggagccataaggatctggcgggtaagtaccggcagatacttgaaaaagccatccagcttagcggagcagaacagctggaggctctgaaggcgttcgtcgaggcgatggtgaacgagaatgtctcccttgtgatctcacggcagctgctgaccgacttttgcacccacttacccaacctgcccgattcgacagccaaggaaatttaccattttacgctcgagaagatccagccgcgagtcatcagcttcgaggagcaggtggcttccatccgccagcatttggcttccatctatgagaaggaggaggactggagaaatgctgcacaagtactcgtcggcatccccttagagacagggcaaaagcaatacaatgttgactacaagctggagacatacctcaagatagcacggctctatctcgaggatgacgatccggtccaggccgaagcttacattaaccgcgctagtttactgcagaacgaatctacaaatgagcagttgcagattcattacaaagtgtgctatgcccgagtactagactatcgacgaaagttcatcgaagccgctcagagatacaatgagctgagctacaaaacaattgtgcacgagagtgaaagactggaggccttaaagcacgcactgcactgtacaatcctcgccagtgcaggacagcagaggtcccggatgctggccacccttttcaaggatgagaggtgccagcaactcgccgcttacgggattctggagaagatgtatctcgaccgaatcatacgtggcaatcaactgcaggagttcgcagctatgctgatgccacaccagaaggctacaactgccgacggctcctccatactggaccgggctgtaattgaacataacctgctcagcgccagcaaactttacaacaacatcacgtttgaggagttgggcgcactgctagaaatcccggcagcaaaggctgagaagatagctagccagatgataacagagggcagaatgaatggctttatagaccagatcgacggaattgtgcattttgaaaccagggaggccttacctacgtgggataaacagatccaatctttatgcttccaggtgaacaatttattggaaaagattagccagactgcgcctgaatggacagctcaggccatggaagctcagatggcccagtag

SEQ ID NO: 189528 - DNA, 1744 bp, Artificial Sequence
  derived and/or modified sequence
acacccgacgctctggcccacacagacgctactctgtagcatctcaggttccctctggctgcactctggaggaccacactcgttttctttttggctgccagaggcccccgcatccaccgctgagctgggagaaagatggcggcagccgtgcgacaggatttggcccagctcatgaattcgagcggctctcataaagatctggctggcaagtatcgtcagatcctggaaaaagccattcagttatctggagcagaacaactagaagctttgaaagcttttgtggaagcaatggtaaatgagaatgtcagtctcgtgatctcgcggcagttgctgactgatttttgcacacatcttcctaacttgcctgatagcacagccaaagaaatctatcacttcaccttggaaaagatccagcctagagtcatttcatttgaggagcaggttgcttccataagacagcatcttgcatctatatatgagaaagaagaagattggagaaatgcagcccaagtgttggtgggaattcctttggaaacaggacaaaaacagtacaatgtagattataaactggagacttacttgaagattgctaggctatatctggaggatgatgatccagtccaggcagaggcttacataaatcgagcatcgttgcttcagaatgaatcaaccaatgaacaattacagatacattataaggtatgctatgcacgtgttcttgattatagaagaaaattcattgaagctgcacaaaggtacaatgagctctcttacaagacaatagtccacgaaagtgaaagactagaggccttaaaacatgctttgcactgtacgatcttagcatcagcagggcagcagcgttctcggatgctagctactctttttaaggatgaaaggtgccagcaacttgctgcctatgggatcctagagaaaatgtatctagataggatcatcagaggaaatcaacttcaagaatttgctgccatgctgatgcctcaccaaaaagcaactacagctgatggttccagcatcttggacagagctgttattgaacacaatttgttgtctgcaagcaaattatataataatattaccttcgaagaacttggagctcttttagagatccctgcagctaaggcggaaaagatagcatctcaaatgataaccgaaggacgtatgaatggatttattgaccagattgatggaatagttcattttgaaacacgagaagccctgccaacgtgggataagcagatccaatcactttgtttccaagtgaataaccttttggagaaaattagtcaaacagcaccagaatggacagcacaagccatggaagcccagatggctcagtgaatccttgcagaacttctgtgcacatgacatctttttccatgttgtgcagatcagtttcactatctccaaagcatttgcatcatgaccttatacatttcaatcccttttatgctggattccgtttaaagaagacattattagagcaggaagtacaagcatttaaaatatgtagttcccatatatttcagggtctctgtgtattaagctaactcagatgttttgaaagctttttctttaaacagaggtgaaatatctgtggctaaaaagtttgagatttgtgataactttgtagtcatgtaaaacttaagtgcttcatgcctctccaaatgtggttattctaataaatggagaaatgagccaaataaaagtagtactttgtttttagtta

SEQ ID NO: 189529 - DNA, 1221 bp, Artificial Sequence
  derived and/or modified sequence
atggccgccgccgtgagacaggacctggcccagctgatgaacagcagcggcagccacaaggacctggccggcaagtacagacagatcctggagaaggccatccagctgagcggcgccgagcagctggaggccctgaaggccttcgtggaggccatggtgaacgagaacgtgagcctggtgatcagcagacagctgctgaccgacttctgcacccacctgcccaacctgcccgacagcaccgccaaggagatctaccacttcaccctggagaagatccagcccagagtgatcagcttcgaggagcaggtggccagcatcagacagcacctggccagcatctacgagaaggaggaggactggagaaacgccgcccaggtgctggtgggcatccccctggagaccggccagaagcagtacaacgtggactacaagctggagacctacctgaagatcgccagactgtacctggaggacgacgaccccgtgcaggccgaggcctacatcaacagagccagcctgctgcagaacgagagcaccaacgagcagctgcagatccactacaaggtgtgctacgccagagtgctggactacagaagaaagttcatcgaggccgcccagagatacaacgagctgagctacaagaccatcgtgcacgagagcgagagactggaggccctgaagcacgccctgcactgcaccatcctggccagcgccggccagcagagaagcagaatgctggccaccctgttcaaggacgagagatgccagcagctggccgcctacggcatcctggagaagatgtacctggacagaatcatcagaggcaaccagctgcaggagttcgccgccatgctgatgccccaccagaaggccaccaccgccgacggcagcagcatcctggacagagccgtgatcgagcacaacctgctgagcgccagcaagctgtacaacaacatcaccttcgaggagctgggcgccctgctggagatccccgccgccaaggccgagaagatcgccagccagatgatcaccgagggcagaatgaacggcttcatcgaccagatcgacggcatcgtgcacttcgagaccagagaggccctgcccacctgggacaagcagatccagagcctgtgcttccaggtgaacaacctgctggagaagatcagccagaccgcccccgagtggaccgcccaggccatggaggcccagatggcccagtag

SEQ ID NO: 189530 - protein, 600 aa, Artificial Sequence
  derived and/or modified sequence
MADANKAEVPGATGGDSPHLQPAEPPGEPRREPHPAEAEKQQPQHSSSSNGVKMENDESAKEEKSDLKEKSTGSKKANRFHPYSKDKNSGAGEKKGPNRNRVFISNIPYDMKWQAIKDLMREKVGEVTYVELFKDAEGKSRGCGVVEFKDEEFVKKALETMNKYDLSGRPLNIKEDPDGENARRALQRTGGSFPGGHVPDMGSGLMNLPPSILNNPNIPPEVISNLQAGRLGSTIFVANLDFKVGWKKLKEVFSIAGTVKRADIKEDKDGKSRGMGTVTFEQAIEAVQAISMFNGQFLFDRPMHVKMDDKSVPHEEYRSHDGKTPQLPRGLGGIGMGLGPGGQPISASQLNIGGVMGNLGPGGMGMDGPGFGGMNRIGGGIGFGGLEAMNSMGGFGGVGRMGELYRGAMTSSMERDFGRGDIGINQGFGDSFGRLGSAMIGGFAGRIGSSNMGPVGSGISGGMGSMNSVTGGMGMGLDRMSSSFDRMGPGIGAILERSIDMDRGFLSGPMGSGMRERIGSKGNQIFVRNLPFDLTWQKLKEKFSQCGHVMFAEIKMENGKSKGCGTVRFDSPESAEKACRIMNGIKISGREIDVRLDRNA
